United States Patent Application Publication US 2014/0057251 A1 - sequence listing, part 12

SEQ ID NO: 16141 - DNA, 3506 bp, Cannabis sativa
tttataataggatacacttaaaattaaagtgttggcaaagaattcatatatttaaagtcctaacattttaaaacaaataataataaacaatagtaacacttataaaaaagcgttttcattgataataaaaaataatcataggtaactctttctaaataagtgttgcaatatataatattgatttatacatattgatcttaattaaaaaaaaaaaagatgttagtggagtataacttctttcagttatataccattcgtaaaatatgagcttaataaataactatccatttctttctctaaactaccagtaacattaagaaatcctccaaattaaagaactcttgcagtatctaatctacgccatatttcttatatattcactattatatatttagacatgtttaccttgtaattcaaacgcaatcaatgctttcactttcaagctagatgaatctcttttaattcaaatttattgtacatttaataaattaacaatgtttgggcaatttaaggtagtttttatattcctatttgtttttagttcattatttcattggattttattttttgtgtgattgtgttcttgctttatataattgtgtaattgttttctatgagcagattaattgtgcgtagagaaactataatcttaatcatatatatatatgtatataaatcgagccatgcactttttaaatttgttttcttacattctgggtattatagagttaaggttattaaatgttcttggcatattattattaatggagtataaaatttgataatttaaatcaatatttatttttaaaaaaaattaatattttttataattgtaaaaaaaaatatggcaacgtttttttaactagtgttgttatatatgtgtattaagtagtatatcatatagtaatacttttaaaaacgttgttttatgtctaaacctttggtaacactctaggaggcaacacttgtaaaagtattactttttaattttgttaagttaaaaaaaagtgttgctaaacatcttttttgtagtagtgtaacttcggctgttacaagaggaaactgcccttggaaaaccttcgtgcatccctccaccagcaaaccccgagcatcccaagccaccaaaccaatcccaaattgtctggagtcattaaacaaagcagcgtcaacatttatcttgacactaccagaaaaagtggcctcaatcacagttttttgagcattttgccaatggttaaggaagctttttgctgacgaaattatgctatctactcccacaattttaccttaccaaaccttattatttcttgcattccaaacagaccaacacacagccactaacaacttctttttacccttatccagctgctgaaagtttgaactctggtgcacatctgtgccaatcccaacctgatcccagcatgaagaagcagctgggcattctaccaaagcatgcaaagtggattcatcatcaagagaccaaaccagacatagtgatgcaaccgcaacatgcttaattcgaagttgaagcatcgtgggaagacaaccacaaacttttccaaaatttatttaatgtgtcatccaacattggtgtttactttaaacataatttctaggtacaaattaaacactataattaccgatcaaatcgaaaagatgagaatggtaatctttgtcaagcagttgatcatctcatcaacaaaccatgcattcaactggtaactaatcatgtggatcaagacaaaaaaaatccacaagctatcaagttggaaaccaaaggaacagatattgtcattgatctaaaaactccttatccagaagtatctgttgatcaaaagtaacaaatatatgatttgactttttttttattattattattacatttttaaatttatcaatcataacgaaagaagaattatgatgaataattcaagaaaacgtactttaatcataggcaagtcttcagtacacccttttaaaaggggtgtttcaatagatccctatctcttttggcacttaggaaaaaaattaatttttttttatgatcgtatatgttatagttattaaagatcacttataaatttttttaaaaaatcaaatagtttacgatgccaaaaataaaattcatatatttttgttgtttttttattataacgtggttagtagctatttaaactttattttcagtattgtaaattatttaaaattttctaaaactttacatttaattctaaatagttacaatgtcatgaaaaaaaaaaaataaacaaaaaatgttttttaaatgtgataaaactatacaagaacgactcttatggggtctagtacagaaatttcctaatttatatactcttctaccatattacaaataatgtattactttctaactttgataacaaatgaatatttatattttaccggtgaagccgatgacaattaagaaggataaaacggaggttgagtagtttgaccaactttgagggcaaaaagaaagaaaaagatcagaaaagcaaagacaacataatatcaaattcctaaattttgagtattttggaatcattttgagacagcatataatgcaaacgatttaaaatagtcttgtgactaatcattttgcatgtattatttttgtatcaataaaacactaacatgccataatcaaactaaattttaatagctaaactcgtaacaacacgcgagtttgtggctatagtcctttattacacccaagattggtcactaaaattgaagccctaacctattcctcaaccacgatccctaatttcgctcatgatcatgactggtatgctgatactagtgcaaccatgattagttgccacaggaatggaacatctggattggcaaccaaacatggaactcacattctgagcttgctgcggctgaagatgggttttcggctagaaatccaatccaacaacagaaaagatttgttgttgttgttgcaactgatggagagagacacgttagaaattgggttactagtgtgtcttgatggctgagctgaacgaaactttgtgggcgttgttgatagtattctaggagtgttaggtttagggtgttcaaattttaaggagcttttacagctacaatgttggaagatagagaaagagtttgagatggtccaagctttatttgatagcaatacaaatgaatcaaaataataatatttctactttattttgtctgtttaatccatctattattagaataaatggtaagtaatacacttgctactacgcttgttggattagcaaacttgaagtgattctttaagctctatatttttagaataggtcctataatttcttcactttgatatcacgctgttacagattcataatcatagattttgtaacatatggttaatacttatatagattaaacgagtgattaatttaggtagataggcatatgataacagtcatggagattacaaggaaaatgcacagacacccaagaaaaaaccaaaccaaattctgtgagaa

SEQ ID NO: 16142 - DNA, 11257 bp, Cannabis sativa
atgataaaatatttttgtcaattaaatatgccaaaaatgtaattaacactaagtatgcgatcattacagcttctctacaaacatgtttaaaagtaacattagagggaaaagagatagaaaaaatctaatacatttaattacatcaaacagagtagacaaatcttcataggaaaaattaactcgatctactactcttttgagtctattttccacttgactaatagggagcttgaccaagctactaaggctagcttagtggtgaggtaggaatgcgtaaaagagaaaaagcatgagttcgaacctaagacctttaagccaaaattgattataatactattacgctaagctaaaaaaaatagggagcttgaccacattcaacaattggagagagtattttagtgctaatgcttctgcagtctattccagtcattgggataaacacaatgtcaattggacttaaatttgtctttctattaatcttttttcgctgtgctttaaattcttgtaagaaagaaagcggcatctttaggctgaacacattgttgtgaatgtgtagtggagaaagtagaataaaaagatttaaactaggtaagtagttctacactttactagctcaggaataatcgaaaaaaataaaacatgaataaccgttttataaatagagcaaacccgtttttaaatcacctttcttgaaaagagattaagcagaaggaaggagatgatggtagcatgaatgcctatcaatgtttcgtagaaaacatagactaatcaaaacgacaattatatagtctgcctatttatgtgtaggcttcttaatttccacaaattaaactttcggcaaaagttcacaattatttgttttccaacaattccttgtatattattgtattatacacaccaaatcgagcaccagtgactacactgactgcaaaatgtgaacacataactttttgttctttttagtactttatttaagtttgaaaataccaacgtaatgttgaccaccaaacagaagctacctactttaattttaatccctaaataaataaataaagaaaaagaaggaaattgtgtgttttggctcacattttgagagcacagagtaaattcttctctgtttttgtccttgattctcatcatattgtaccagaagtgaatatctaaaagtcaaactgaaacattttcattacacttctcggttctgcttttttatgaaaaagtgtagctggacgcaatgctagtgaacccactctcataactacccaaattaaatttctagtataaacagaagaaaatgaatcttaaaggataggcaacagagatggtaccacacttttctcatgtgataccatactcgactaaccaacaaataagttatcattccgaatttaatccacaacacaaataacataaagaaaaataacaaaactttatatatatatatagaccaaaatatgaaaacagtgtataaatattatatttgatatggtgcttagcttagtgagcaaagctgcgggccacctatctttgaagccacttcagctcttttcaaaacattcaattcaaagtactgagtctgataagatcatatatatatatatatatgagaccaaccaacagtcctcctccctcaaagtcaaaatagtttttttttttaactaatcccaacgacactttccccttcattttctcactacttctttctctttctttttttccaagaaaaatcaacatgattcacctatttatatatatatatatatatattatattagtaagtagtaaggcttctgaaattgggtatgaatgagtcagaccctgaaattctttccggtgaaagtctggccaaattgccaattggaaggaacaacgttccaagaagtggaggtgcgtcggtcactgcctgtgaccctgaaagagagtgactgaccaatcaagatggcatttgattgccaattctgaccccagttacgactcaagctcatccacccagtctttgatcctttcacgctcgccttcacgatatcccctgcacccgcgacgttggtgatcagaaccaagttaaagtacttgaacccgttgatcgtgaacctgattcctccttgctttcggcacggaaccctgttatttaaatatatttataatatttgtattacataaaggtataaggttcttaaattgtgattttaataaaaatttaaatattcattttataatattatatggagcatttttctttttgatgtggacgtaacttgcttgtaggacaaaaaagctatacactagtaaaaatttggatggttattataacttacttcctatcaattactactttataaattattcattaggatttttataattatgagagtgataaggtaggggtgtgaatgtgatactttttatatacaacataggtataggtatcatgatttaaagttgtgtcacgttatttataatataattaatttaatatttgataactaatttgttaccggcgataagagacgggaacaatgccggcgcggtactcggcgatcttgagaaacatgggcatggcgaggtcgaaatggggacgtggagggttgcaccaaccaccgttgtcgctagcttgagcgaaattcgggggacaaaagttggtagcggtgatgaaaatggaggggctgccagcgtggcaccactgaggatcattagcacactttagctcgaagcaagcaccgcagctcagcccgttgttgaacagcgccgtgctcagcgctgccgtgttcacgccgtacccttggctgtaaaggttcccgtatccacaagccccacctgaccatttaattttcaccacaacaaaacaacattatcaacccaaaaccacaactattttagctacaaaatgtatgtataaaaattgtgagaggtacccattgtgccagaagcgtcgctcccgccgtaaaatgtagcgtgagcactttgccacgccccaccaccgtaaacgccagggattctggcgtcgacggtggacgcaaatgctaagagacaaagtgttagaaggatactcataatggccatagttgatttgggctttgactcactcaatgaccactacaagagacgaaaaagaagagagtaatttttgctcttcaaaggggcagagtgtgaggaaccaaagtagagaaacgttagctatttatacaaagagaagcagagagagaaaatttaaaggattagaattgtcaataaagtgaaattatcacccttaattaatgctgtttggtctcccgtttgttagttaaacatgaactctttttttatttgtttggcagtaattccattcaactccctctaactccatcttttgagttagaaagacgaaaatgccatggattttttatttatttatatttttgcaatttttctttatttaagagttttttttttttttggaatgaaattaataatgatgatggtagggtctaaaagagggttggagctcaaggctgatgatatgaaaccgctttgcttcatttggaagttgtgccattatctgcggctctctatgtgctcctaaattctttgttctttgttcttctgataactttaaatttattttatttattttttgggttgtcacttttgaaaatttggacactaggatcgtcgaccgcataagaagtaagactttggtagttagcttgtgtactcaaatagtacggaaaaagggttttgaattaatcttcgctttctaattaataattgaggagtgctaattataaccatttattataattttttaattaattgcaacgctcgaaattatatgacgaaatatttatttttcggtatttgttaaaattacagtatcatctctataaatttttgaaagcttttaaataatttacaatgccgaaaatagagtttctgatattctagtttactacgcgtgttcaaaaaaattcaaacgtatttttggcattgtaaactattcgaaatgtttcaaaactttacagggatgatattataagcatacgaacacctttttttttaaaaaaaatctgacatgtatttttaaacaaaaaaattaactaaaagattgtaataggaagttgctacacctcttaataatttaatcttcaataatattagattatctaatcacctattttaggtcttagatacatttaatctttagtgttcttcacataacttactctatataatgacagatgttatgcaaatctaatgtgccaacaaatttatacatatatgtacaattcatttaatttttttgagagaagggatgcccttaggatagaggatagactcaagattgcaggggtcatcaccaaatcaaattgcagcttcatctagtcccagagctaactttgccaaattatggcaaaagtgtttgccgtgcgtttaacatgagagattgtggcattggggaggtgagataaagccattttaatttgcttgataatgtctccgaagagggagaggtcttctctgctggttgctaaggcatcggtgatccttttacagtctgtttttatctgatggataggaaaagattcttcaatgcactagagcagcactttgagggtagactttgcttcgagagttgcaacttctccaccttctttatatggaaaaataatcgctgctacaactccaccttctttatatggaaaagcaatcgctgctacaactccaccttcactgttacgaattacaccaccaaaacctgttgtatgatttgattgcgagcatgctgcttagtgttgagcttgagaagacctggtgggggaagtccaattggttggaggaacctctggagttccaagaccttctatgttatgagtggttgttcttgttgtgtactctgtcaagtagttttccgcaagggtgggaatagcatgaagctggttcgttctttaatgcttgatcttcttaaatcccgccagataaaccaagagatacaaaaaaaaaaaaaaaattccacatccttcttttccatgttagtataaatattataagcattttcatgaaaagaagtattggtagccacagagagatagggatagaaaatactacctttccaaactctttaaattcgcttgcaaaagaacaaagcatgagtaacaaattcctcttctcttgtacaaaggtcacatacaggggagtgggtaatctttcttatgaagagtgattatttagtgggaggagtcgatgaggaggctctataggtaaagtgtttcaatttagaagggatatcaagatgccaaaataatttccaccagggggagggggatgaggaggaagggatatttggtggtgagtggtgggagaaacttaagtaatatcttattttgacagagtaggttcctgactttgtaagcttccatatgagtttgtcctctgccgggtgaagaggaagtgggatagaaaggacatcgacaaccacaagagggggaaaggattggtttaggcgaggtatattgcaagtcatgttgttagagatatagaaagctacattgttgggaacatggggttgtgggtggaaatgcttgtaggaaggtatccattaatcatgaattggagatgtgttcttaccgttgccaatcttcattatgagtcctttgtgcagtaattctcttccctagtgaatgctatgccagacaaaagatggagagtggccaaggctgcaattctagaaaaaaaacgggggtggtatttggcagcaaagattttgccacgagagagtttggatgctaaaggattcgccaagcttgctttgtaagcatagcttgattaaaatgaacaagtgagcaagaacccagaccaccgtttctcttggattgatatagcttctatcatttttgccagttagttgaggggttattattggaattgaacccccacaaaaaaatttccatgatagattcgaaggaatggcaggtggtagaaaggagacgaaaacaagccatagtgtaagtggggatggcttggattacggatttaagaaaaacttccttaccgcattttgaaaagggcttatgcttccaattattgagatggtttcagattttatctttgaggtagtggaagacctatttttttgagcggtcaataagctaggggagccctagatatattttaaaggtatcacggataggaatacccatgtaattagagataagattattgtctctgagatcggtgttgggagagaagtaaagtgacaatttttggagattaacttgttggccagtggctttttcgtagttgtgaagaacatctttgatggcattgtaggaagtgatggtagcttgggcaaaaaggatactatcatcgacaaagaaaagatacgagattgtaggggcactcctggcaactctgtatccattaaggatttgagctctatcgtggtgaccaaggagagcgaagaaacctttagagcacaataaaaatatataaggtgagagagggtcaccctgtcggattcctctagaaagtgtgatggttcccacaatttgtccgttaacattaaatcgaaaggtgactgaggtgaggcaattgagaactaggttggtaaaggtcgtggggaacttgaacttatctataatggccctaatgaaactccattcaactttgtcaaatgcttttgccatatccaactttaaggccatccaacctttttttccacgcgatttaatttttagggagtgagttatttcctgagccaccatgatattatcagaaatgaggcatctttggagaaaagtttttgattgggagatatcagtttattaagaaccaatttaagcctattagcgattgttttcgacaggattttataagtgacattacaaacgcttataggtcaaaaatccttgacgaggacgagttgtttgaccttggggataagagtgatgagggtttgattaagttgggtgatatcaccaacttcattaagcgcctagagaatggcagccaccacaaactgtttaacaagacaccaattctttcggtagaaattggtgttaaaaccatcaatgctcggggctttatccaggggaagttgaaagaaatctttctccactttatcaatggtgtaggcttcctgaagtatttgtatgtcaatctctggaagagtggcaacaatacctttgaaagcatatccgatatcttccatcgtaggggtcgaggaagtgaaatgattcaaaaaatagcgctcaatttccttagtgatgtcttccaaggaagtaacagtggttccattgtccttttcaagtttataaatgttgtttgatttctttctagacgaggcatgacgatggaaaaacttggtatttttatctccttgggaaagacattgggttctcgccctttgcttccaataggtctcttcgttaaaaagaagtctatcaagatgggactggagagtttttattctttagacagtgttgtcatcccaattatagctgctcctaatgttgtcaagttcttttttcaagagtacttattcgctgcttgaattagaaacctgacttgtggttacaatcattgaggcgttgccacatgcagatttgatggccacaagattggagatggaacaagaattaacaccttgacttgcccaaaaggaattcacggtcttgggccaattaggatcagtgagccaaacattttcaaagagaaaacatttggtgttatggtgagagggttggaaagacattccatgagagtcaaatagaagggcacgatgatctgaaccaaaaaatcttggtgatgaaggcaagccttaggaaaattattcgccaagggtgcattaacaatacaccaatctaaacgctcctggatgtttttcctattggaactgtggttataccaagtaagagtagggccaatcagatcaacgggggacaaattaaattggtcaagaaactgtttaaagctgtttgatggtcccttttcggggttacctccaattttgtcatccaaggtaagtatggcattaaaatcccccatgataatccaaagatcgatagggctattgtcaccaatcctataaatttttttccaagtgtggattttatgggcctcaatgggggaaccattgaaacaggtgaggtgaaaaggagaaaaactatctattgaggacgagacataatagtcaaaatgattcatagattgagataataaagttaaaacaacatcattgttccaaaataagaggagccctcctcctgtacctaatctaaggacttccaaaccataagcaaaatgaaaattaagtttattaaagtccaaagcacccctagcaagtctagtttccataagaaataaaatattaggattacaattatatataagacgggagaggttacggaatgcacgatcactcccaatgacacgtaatttccagctaaggatcttcatggctgtaggctggcttgcacatctgcaggacctgcctctaagaaaatgatttctatttcagcagggttctccaatcaggtatgtttgatcagttgtcgagtttcaccattgatcacttctgcctgccttttgaaactttatttgcctttagaggattgttttcttttggagatttcggggcctgtgggagtggttagccaaggttggaaggtaaggggtgagagcttcgggtttgtgcttgggtcgaggaggggtatgttggttggtaagggaaggtggcagtactttgagctagtggatttggaactgctggaactttgggaggtgtttgacagggttaaggttattgttttcacggtttgttgctcactgatgttgctcatgatggcattgagtagagcggtgaaagttggtggggggttcaatggtgttgggttggtagtttcttggccttgggagattttgttggtccaaagggtattttttgatagttggcctgagtgttctgacctgtggaggccaacaagttgggattgctccgaagctactggtggttcagttggaagttgtggtggaactgaaggtatggttttggggagcgagacacaaacattgctggttaggtttgatgtcatgaaggttgcaacagagggttggcaaagtttatctgttctggacaagacagtagaggattagttgaaactttaactttaccagtgatggttttgctatcatacctgaggtacagtggtagtggtgcttcatcacatgccttcatgtagtccatgcagccgttattgtagctatgtcccatacatccacagaagaaatttatgtcatgaacattctcatactttagctcgagccaaacaattttgttaatgccaacaaaattgataggaattcccctaggcagaggaagagcaacatccatcatgaccctaatgcaaaagtagggcccccaggtttctttgagagggtcggtagatttccaggagatgcccaaggcttgttgaaacaagttcagcaagttgttgagatattttgaggaagggagtgttatgaacttgaacccaaagtgggagtttgataagcctatctccattcagagcatccactgaactagggatgtccatgaggatggcttggttcaagtaggtccaaggctgctgaagcagcaccctgcgacggtctcccacgcttcctaactcaaccaagaaaagtcctttggtcctttctgttatggtgacagggaaatgagagatattgctccagtctcctgtcattttctccataaagactttcctattaaaggacttaatggtgtggagctttgccgccagaaatatatctgtggcaggggcatcaggatcagggacattcgagggtgtagggtcgtggagagtgtgcacagtacattcagcatccgtaaggttgagggccacggacaaagagtttgctaagtcatccattgagagtgattggtgtgtgtacatgagcaaatatggaaatgttaaaagtaatctaggctttgtactagtgttctggttttcaggtaacaataccaaaaatggtaaaaaaaatccttttataataggaatactaggggaattaattaatggagaagagattagctgcacatcctatccaaattccacagaggaaagaacaccaacagtctaattcataattaatgagaaatcagaaacaatttcaaaataatagatgcaattattagcaagattagggggaggggtgtctaaattacctaccaaaatgtagttgtacgtttggacaaaacgagatttattgctaaacctcacattaaacccaaatatcatgatgagattccaaatgtgggcttcaaaattgacacgaagggttaagatgatgatataaggtttgtgtacctggaggagctccattaatgcttaggagcgttgaaggtctgtgtaataggactggtgcgaggcaatcttcagattgatggctgatgcgatagtggtgatgagtacattgacaatggccggagttggaagaggtggaggagtcaccaaatcctaaaggatctggaacttggggaaggtttcaccatggggaaacagttcaggtttaagtatgaaaaggcaaactaggatgtagcttttttcatttgcatttcgagagaaaacgaagagtctagaaaaggcccacgatgataattctctacaactatatgtataattcatagtaatgaactaatttcaacttttttgatctacttttattcttttatctacttgtttattatgtagcagattttatggtataaacttcaaacgaaaaatttcactcattaattgggcaagttcattagtaaaaaaataaagtaatttacggtataaatacttaagtttaactcttagttataaataaatacctaaatttaatttttgccagtaataatacctaacttatatttctggaactccgtagatacttgaccgttaaatgtcaaattattattcacgtgtcattttcttatgagtaattggcggctaaacccccaactctcattccacttgcattcaaccttccaagctcgaattttggtgggaaaacctaccaaactcatattctatttacatttttaagtgtcatcccacaatctctgttagtttatcattttgcctgcatggctagtgacacatcaccactaaggtacaatgtggttgcccattgtattatttcaaaataaaaaataaattaaaactaaaaatatttcaatttttttattaattaactcttattaataataatgataaagcttaatttctctttctctctc

SEQ ID NO: 16143 - DNA, 2785 bp, Cannabis sativa
ctcttctgcagaattaccgcgaaattggggttatgaaagtcatcagagtgcacagtcttcaaagtccggaaaaggtgatggtgtggagtatcatagcggcctgtgctaagatcaagtcctccaacaaaagcaacaatctttcttctgtaattacctgcatcagcatctacaattactgttttctgatgatgagtgtagattgctcctacttcctgataacaagagatttcaaaagccaaacaaacactttgttcagaacatgactaataatgccttttcaaaaaaagaaaaactttgttcattaattcttctataaattcatcacctgcttttttatccagctatgtcctttcgcagcagaacgagggcaaagcaagacttggacagaagagtgcttgaagaaccggcgagtatcttcatcacaggttcccatgactccatcctaaatgtcataaaaaccaatgaacatatcagtatgcaaaagaaaattagcattaacattataacttatatagaaggattaccttcctaaaacccaatatggtcctagaagttggatcatcccaaacaaggagcagaactctcacaccttcctgtgacttggctttgagaagctcccctaacatgcttcctgctccattatcattgtttcgaaccagagtaactttgtgaaccacagaccatccaacaatgtaaaccaaacgccgagcctgactaattgcattaaagatatcaccccaacaactcgaatgctcataccgaatccctctatcaagctcaaaattaggaagaccacaatcttgttcatgtgcatcctgataaagggtaactttcccacctttccttggaggaaaataagttccaggaacaccaagattctcaggacttgaccccaaaccacctcgataaaggctcacattctccattggcgtgtactgaattgaaagagtcaaaacagctccaggcttgcagggtttcccactgtcactaagaataggaaaaacaccttcaattctaacacctgagtataattgctcaactgggattcccacagctcctatcaactgtgaccccacaacatcattatccttcaccacaaagtgaacttcagctgctttatgagctacagggatgttaaaatgttgattccaaacagggttttcggaattggttatcacaaaagttctcccaaccacagctcctgatacggaaacagtcacataaggatcacttgttaccttgctggacacatggccttcaattttggtcgatagctttccgagtcttccaaacatgtcccctagagtcttgtgaaacatgtccatgttaggaagattcttggcctccataatccaaatatccaagttcccatgtaagagcataactctcaaggaatccttgctggtcttaaacggcaattcttgttgaccttgcccatgacttgagcctccaaacgacattgatccagcatatatagaatgagccatgtttcttacaatacacagattaaaataagaaaaaaaaatacacaaatcaaactcctgcaataataactattcaagatttttctttttctggggatgaatgaaatgagaaaagaaaaccaggtagatgggcaaaagagtgaagattaggattgaaattggcaataatgaaaaatgattataaatgaaaaattgaatgagtaaaagaacgtgagatagaactatagtagtgtagattagatggttggcttgaccatgtatgcaaatgggattggttagtctgactaacccaataacaaagaagctttaataataaataatgttgaaaatgtgaatctagaacgattaggatacaacacaacacaagaagtctttattgaatttgaaagaagaaacataaaaagaaaataaaaacaaagtaaaaagtagaattttgtcaacgcaaaatgcaaggttgagaaacgtataggcaccgttaaaggatgagattctaataaacgtgttgtggtgtgattgcctagtttaatagtcttgtatataaaataataggatattatgtatttggattgggaaggttcctttggcccactgaataaatatagttaattagttatgtacatctttgtttcttagtcaaattatgtgaatggactctccaatgccattaaagagcctagtaagcaaataggcaggccgccgccggcggaggctaggaacttcatattgttaaagattatatattatgtaggccataattacacaagaacagattgagagatttgtatgaaaaatatttagccgcaggactggattaaattagacagctaatttgtccaatctagtgtttgggcatagcagaagtctggataactaatccagctgatcttatctgtgcgattatttattttatcctgctataatcccatgaagataagttttttttatcggttttttaattttgattttattaatatattttaaattttataagaatttaaaagaaagaattatcacatattaatttataattttttttatcaaaaatttattcattaaaattagtgaaaatgtataattttaaattattatacataagttctcaaaatttaaaatattgttaattaaacaacagttacttaaattgattttaagagaaataatatcacaataaaattatatattgtttttaaatgataaaaaaattatcaaaatattttaaaaaattaatatttaaattaaattagtaattaaattagtatttaacataaataattttatattattcaattatttttatttta

SEQ ID NO: 16144 - DNA, 2005 bp, Cannabis sativa
ccctaacggccatggtgtgaagcaaggggaaacttggtgggctggcaagtatggagaacggtggaacagaacctggggtgagggccacaacggttctggatggattcacaagtacgggaagagcagttgtggtgaacattgggacacgcacatccaacaagacacatggtatgagagattccctcacttcggcttctaccattgctatgacaattcggtccagctccgagaggttcctaagccatccgacatggtctgatcttctgatgcactactagtttattgtatcgaaatttcgtatatagatgcagtacattgcctttaagtcatatttagatgatccctctagtcgaaatgttgtttccactagttgactagagggagtagctgagtttctttataaataaagtagcaatattttttccctccaattctccttgatctgtaactgtaaggtctaaaatatgaaagaaattaatttttaaagaagttcacggcattctcatggttgccatttacatatataaaaaataatgtagttattaattgtagcctaatgacatcaactatccggacaaaaaaccagaggagtggacaacaaaggctgatggtgaaattagtgagctaaatttttctttactcataaaattgtcaaaacgttgtcaattacactttctaacagatgttgggttgtggtcttctgagtctgacgccattacctgcctaacacgtgaccccattttatccagaatcatgaagctcctagtgacgctgctgtaacttgtttgttctgttctttggatcttcttttttcattacatgtattcatccatcatccatgtctctcatgcttattatcacttcttaagtttcttcatctgagagtgtatttccagtctttacaataaaactatatacccgtctttggttttgagtttctcctctaatggctcttccagtgcttaacagagctgaaaagctcaaccccattatagagctaggctataatggaataacttccaccatagatgcttccttgagaagggtttttcgtctcatggcagaatttaccagaccagaagattaatgcccaaatgcagtttatcatcgtcaagaccagcttctcagcctaggttcattcaacacaagaaagaagctttctggttctacaggttcttatccatagtgtatgatcatatcataaatcctggccactggactaaggatatgagagacgatgcacttgagctagttgagctaaacaataggaatttgactgtcgtagatgttggtggaggaactgggtttacgacacttgggatagttaagcatgttgatgctaaaaatgttacaattcttgatcagtctcctcaccaacttgccaaggctaagcagaaggaacccttgaaagaatgcaagataattgaaggtgatgccgaggacctcccatttccaactgattatgctgatagatatgttttagctgggaggtaacatttcttagtacacttcgtatggaagatacctttgttttaatggcttctcaattgggtttctgagacaacataatatttttttttgttcttatcagattaatgctttgaatatatcaatgaataatttatctaaacaggggttttgattttcttttacaattggagtaacattgttgagcaatttaggggaatagttgtatgttttagcactgactattgttgaacttcccaattagcttgttctaaagatttatctgttgagtttctgagacccaagacgaaattcgttttgctgattagttcttctaaacaaggaataatttatcaaaaccagaggtgaatggctatgctattggttttaaaaaggctaattagcaatttttctttccgaatttcgacatgtactaaatcatgctccctaaacttttttggccgttaaaaatttcgcttgaactattaagattgttagatttaaggactttttttctaattttagtaaaaaaattcta

SEQ ID NO: 16145 - DNA, 1833 bp, Cannabis sativa
cttcatcgttttggtgatactggtggttatgagggttttgatgaaggaaatgattatgatgatgatgatgatcggtttgacgaggacgatgatgagaatgaggaagaggatgaagatggttcgtatggattgaatgatgagttggttccttggtcagtgagcgataaatttggtgggagggagagaatgaggaaattggggaaaaggggtttccctaagatgtttaattcgaagaaatcgccttatttgtttgtaaggcctggtgttgttcgtggtaagcatggactgggattgaagcacagcctctaatctaatccaaagtttgactctttaactgggtatttcttagattattgaaatcttttcagttttttttttacttttgttgttgtttttctagattagattagataagataagatagactaagcttttataattggtggctttattttcatggtgatatattgaggattggattggtttatgttacacaccaaatctctctcctttttcactgtttgttaattgtttatatctaaggtatctgtaatagaataaattgtatgtgaatatataaatttgcccagaaataaatatctatggtttttcaatttttgatataacaattttggctgatgtatgttaatagtgactggctagtgctatagtgagtggtttgattatgtgagactgatatgcatgtagatgtaacagtggttagtgctacagtgactaatttgatggtttttgaaacttgtatgggaatgagacatagttgttgttcaagtcatttttatggtggtagttgatactgtgctaatagtctctggatatcataactgttgttattgaagatatgcattgattgtgaggattggataccaatagttgtgttgtataggaaggaattatttgacagtagaattagattgtgcaatggctctttattcttatctttttttttttttggagattggattgcttgtattagatgggtagaatggttgtctctttttggagagtcttaattgagtcatttttaatacatttcatagattaataaaggagagggattcattctggttttgcaagagagttattatagagagaaacatcatggtggtagaaatgtttatcacttttgggtatctgtgaattattactacttgatgtttagactaaatcatattgtaaaatcacacttcttttttgttgaaatcatgagatgttattgattgaaatgtagaaatgctatgctctgcctttccttgttctgaaattaatgctagacttggtcaattttggtcttcattaaatcaaatatgacacatttctgcaacttttttctgtcaccatacacttcccataaccagtttcaagttcaacttctcagttttaagcattatttctctcaataatgaatttcatcactgtacagactctgccactactaccaaatttaacttttctacttaattccagtcaaccccataataccaccctgcagaaactgcctttgttttggtgaaatctaattcatagctacaggaaattgattttgggacaatcttcagactatttggcataactccaatatccaagttattatgatttggtcattcaatgcttgattttgactatacccaagagggtagttcaaattgtattcatgtggtttgctcttacaagattcaaatatcataatccaaatattgtaggttaggcttagatcttattttttttttcgggtaaataccattttggactttgtgttttgcaaaagttactgattggaccctgtttttagttaaatgacaaaatagaccctat

SEQ ID NO: 16146 - DNA, 10933 bp, Cannabis sativa
  modified_base (29)..(41): a, c, t, g, unknown or other
  modified_base (2161)..(2161): a, c, t, g, unknown or other
  modified_base (2387)..(2391): a, c, t, g, unknown or other
ataatttaagtattattaccgctaaaaannnnnnnnnnnnntttatttacaactaaaaattaaacatatttatacaataaattacttcttaataaattgttaaccaatttaaatcaatgcttactattattataaaaaaattattaaccaaatcctaaatcacatctcaactcaccacactcttgaagttatgggtaattgggtaatatatgagtcgtacaacaactcaagtctctcatgagtgagttgtggccatgttaaagcattgaccaatgggctggcccaccatcacgtggctactgattcttgctctttggagagtttggaaaggccttttctctctctctttttagaaaattcaacatatgggctgaaatttggtaaagaacatgccaatctgattagctagttttaactaataacccccccccaaaaaaaacaatgcttactattgcttttaatagataagaagataagataacatgataagaaatcaccaccttcttctatgcacatatagaaaatgtgtatatatattggtgtttagcaattagatgatgactgttgctgttttcattttcatttagttattattttctggcttgagttgtccattattaatgtttttattattcaattaaattaaagttcactaaagaacagcagaacaaacagcctaagctaagttacacaagagaataaaaggaaagaataaaattagggttgtgactagtatgtttcatcattacaaaaaagagagaaagagaattgagtttgttatatactctaattcatgtcaacttcatatcatgcttgaaaatagaattatgctcaatccaagttcatctcaatcgagatctcacattacatcaacttatttgtctgaaattttatttttacttctaacttctcagaaaattcttagggagaaaactattcaatttgatttttaaaattaaaatttattgattatccaaccactaacagaagtattttttaagttttaaaattcgaaaaaaaaaacttttaaaaacctaaccaatcaggatcataatactcatacttgtttctcttttatgacctttaatacgctcttacattactaagttcgtgacacgagtaacattgttttattgtctttttatacacaatgccctctttatgctcaaatcaaacctaatcatggtaaacattggtatgagacacattattattcaaatctcaaccctaaagccacaaatgattttaataaagaccataacccatgatgcatatttcattaattgactccaattttcattcttcaaaacaaaaggccactaattgaagctatatatatatatatatttagtgactgttacaaaccaagttgtgacactagacaatgctaaaggtatccatatccctctttctagtttcttcacttggcaccacatttttcttatgaaagccaccaaaagaaaagctaataatatatgcatgcgtatgagagagagaagaaaaaaaagaaaagaaagaaaaaggccagccagcccagtagtcagaaattggtctgctcttcaatattactttttgtttttgaaaataaataaataaataaatttaatttaattttaatctttggtgaatgtcagaataggcagtgaatccaagagaatgctcaagtgtaggtggggaacaccattgttgtaatgtagccacatctttcttatttatagtccttttctcttttttttacttgtaatttcaaatgaataatgtacaaaaaacatcaaggactgcttgctaagaattaatacaaatacaatacacaaagtacctcttcttctcttttctactatttctactacatcactgcgtttcttgttgtttcttttgtcgtttcacacactaaaaacgttttagtaatatataatgaatgattgataatgtttttttttttatataaaataaatagttcttcatttaaaagctaaaccacatgccacactaaaattataagagtttttcgctgttaaattctcttaattatcatttcacttgcacttaatccttcaaatattaaggtagtgtttggtgataatataggaatagaaatgagaatgggaaaaaaatcatgcattgaaatggtcttttctttcattttaaaatggaatagtcnttccaccaaaatggtagaaaggtcattccattgcaatgacattctaatattttaatatgcaaccaaacaaaagaatagaatgaagattgttacattttctttccattccattccatttcattacctccaatcaaacaccacttaagtgtcattcatttaattactaatatggactacttaagtataaactattgtacacgtgacacatttatattggtacacctannnnnattatttaaaaattataaaaaataatttcaaaattcatattaaaattaagaaagcgataaataaatacacaaataaaagaaaataaaaaaaaatgttgtatttttcagtaaccctaaacctaaatccctaggagcccatctctttgaccctatctcttctgcctccctcactcataaagttagtatattgagaatcctggaacacgaactaatgatggttgcattcttccttcatcatcgtcattcttttactttgaagtaactaggtagaatttgtagtatacttcctccaaataaaaaggtctccacaatcatcatttttagaaagttgtttactcacggttgccagtctcggaagggagttcccggatgtctatcatgtccactccgggtccagttcttgggatagctagcctcattccaggatggagctctagttggctagtcttccttcctggagtggtagttaagcgtgcttgacctggggtaatttcaggatgggtgacctcttgggaagttttcccaagaagcgggcgagtgaggacaaatcacgttggaaacactcgtgttggtttgtagggtcagtcatcattccatgaagcaactagagtgatgtactcgtgtataagagccatcattctgtgggtgtaagggcccaatagaggcttgaaattgggacgttacagtattgtacatattcttgctcaatcaagaaggattgtactgtaccagtatatatcttggtgttgttttctttattttatgtatttattattttttggttttcattactctgtttgtccttgttttttactgtcgattattgttcttgatctattaatattgtccttactaatcgttttattgtttaaaatttaattaatttaattttgcacatttagtcataattttctcacagtaattatttggaaatgaggtttcaaacaagctctagaaataaatatttagttacaaattatgtgtaatcttagttacaataacataatatacacaaagaataaaaatgattgtgattaaaattgtgattaaaaatacatttttaatcacacaaaaaattgtaatcatattcataaaaaaaaaaagaactaattctttttactacgatttttttagtgatgacaaataggtataatgataaatttttagttataatttttttcactttcactaaaaatatattttttaatgtagtgtaagtgtggcattaaaaacaaatctaaaatattataactattaatttatacatattgagagtttgagtttgactggtttaagagcaaattatgaatggcttaaagaattttgagaaagaaaagtgtgaagaaaaataaggtatgaacggcgttttagtcaaagttatcaataatagtatagtagagagtttgacaataaaaacaagttaggtgcccacttgaaaagcacttggaaaaaagaaaaaaaaaacatggaagtagagatggatttgaaaacatcctaattataataattatcattatcattattatttattttaagaagaaaaaaacaaaattcaacttatttcttacttgcaaaattgagtgagaaaaaaaaagtgtaataaagatatatgcttaatgtttttttaagtgctttaataacttctcaataatggtttttgattacatagagaagaggtggttccccatcatgctagtatagtagtagtagtagtaaaaccccattaaaatgaccactaataattggctttttgaaaaatgtaaatagattatctgtttcttttatcacacccaaaatttcctcaaaatcataaaaataacaaaagaaaaaaaaaaactataaaataagaatattatttttgtttttattagtagagttacttttattttgtgtagtcataaatacatcttattattaaaaaaattttaaataatttttaaaaattattcttaatattttttaaaaatttatttatattattttatgttaattttaatactttttttattttattttctaaattatttttatatttttttgtcatagtatttaaaatataatttatttttatttaatataaattagaaaaaaaattaaaaaaattttatataattaaaaatataaattttatataaaataaaaattaaaatataatatttctaaaaaaatttagaatgtaaataaaatttccaaaaatgcatttcaaaaaattacagtagctaatttttatcaaaaactggtataataactactataactataatttttttttgaaaattataatttctccaaatatatacaatttatttttttttgaatcattgaataacaacttcccgtaaatcatttaacagttgcatttattgttgtaacaatagtactaggtactgaaaatgagtgatgcaatagagccaagtactctctctttcaaaaccttttttttttctattaagttttaaaatctctatcatatcctcatagccaaacaaacaccaaaataaatgtgtgctgtaatgtagtacagttgaaccatttaagtagagagaagagaaggtggaatgtagtacagtgcaccatcacacacagaatcatatgatcaatcataatggtcatcgatcgttatccttatcataatcataataatcacaagtttttcaattaaattctcacaattattattttatttgtatttaatttttttaatagtgataaaatctttcaaattgttaatttattaataatttaaggtgatattaattttttactgttaaaatttagccgctgaaaactctaataccttattcttcggtatgagttcttgtatatcaagctattctaatcaccaccattttcatcatatttgatttcggtgcattgaaaatcagtattttttttaacctgaatctccctaatcattaatcaaatcccatattaatattatcataatttatccaaaattttcaactaataaaattactataaattaaaaaaaaaaaaagaaaaagtaatttaaaaaaaaccaattaaataaaatataatattttttatttcaaaaccacaaatttagaaaaagctactctcgcgagtaaagatttagtgtactcgctttctctgaggtttgagtgtcggtctagggcactacgattcaatcacatgggctgtctcacgagtcgtaagccgcgagtgtcgaacactcgcgcgcgtaacgaagatatcaatcttatctctctgcatggttttttcgtaatttcactttactgatatgtgaagagagagaagcgtcccttcggaacgtgacaaggacacatgcatgataacctaatcaacggtcagaaatcattcttcattctctcaccaaatgaagtctgaccgttagatctaataagtaaaagcctacaagaaaagaaccaatggttggggttagtttctctaaccatggttaggttaaggctgtgttagctttaacacaagggtttgtgattcagagagagaagagagagagagagtagcagtagtgagagagtagctatgggtgtgttgataaacactctctcttgagtttagaatcatatttacgagtttccatttctggaaaacaagtttgttgattctgagttatctacgagtttcgatctgtatttttctttttttcctttttcgattgttttcgtcatagtaatcatcactatttgattcaagatgatcacccagaacaaaagagaatatctttctttcttttcattttcattttcagctcaattatttttatttatttattttgtttcctcagagtacagatctgagattgagaagtaattaatggaagaagagagtggcagagtctgtaattttaagcctctctttctctttctctctctttattatatattttagatctaagcttttctttttttttttcttccaaagatcctggactagaagtgagccgaaaatctggttcagatcttcggaagttttttcttttttcctgagaaagttgggatttttaaggtatttttgaattgggtgttcgaaaaaagatgaactattttcctgacgaggtagtagaacatgtgttcgactacgtaacatcgcacaaggaccgaaacgcgttgtcgttggtgtgcaaatcatggtatagaatcgagaggtttagcagagaaaaagtgttcgtagggaattgctatgcaatcagtcctgagaggactatcaatagatttccaggtctaaagtcacttactttgaaggggaagcctcattttgcagatttcaatctggttcctgatgaatggggtggttatgttcagccatggattgaagccttggctagtagccgtgttgggttggaagagcttagattgaagagaatggtggtatctgatgatagcttggatttgctttctaggtcttttgtcaatttcaaaactttagttctcgttagctgtgaagggttcaccactgatggccttgctgctattgctgccaattgcaagtaagaattttgaattgacttctttacttttgtcatgactatgttgagctttgtctttgtcttttttttttttaaccttttttgtaccctcaaatgtcaactgtagctaatttgggaaaacccctttgattcaaaattactgttttgtgattttagttattatgagtatttctgtttaaggctcttgttaaacattattatgtgttggtgaactaaagaggtataggaacgtgtagatcgagccaaatgaggcaattaatgctatattggtgtcaggatgttgttgttgagcttgtatctgacactgtcttactactctttctttatgtgttgttgttttttttttttttggtataggcatctgagggagttggatcttcaagagaatgatattgatgaccataaagggcactggctgagctgctttgctgatcaatgcacttctctggtgtcacttaattttgcttgcctcaaaggagaaatcaatttagctgctcttgagagactagttgcaaggtcccctggcctcaaagtattgagggtaaaccgtgctgttcctcttgacacccttcagaaaatactggtgaaagctcctcaactagtggatttgggtactgggtcttgtgtccaagacccccattctgagtcctaccttaacctaaagaacactctttcgaaatgtacatcaattaggagcttgtcagggtttttggaggtgacacctaggtgcgtcggagctttctatccgctttgtgataacctcacatctttgaacttgagttatgctccgggcatacatggttttgatctcattaagctaattcgtcgatgtgttaaacttcagcgcttgtgggtatgtatagttttaaccatttagtaaaattttagttgctttttattaattttgcatcaaattacattggtctttgtgattgagcagatactagattgcattggagacaaagggttggcggttgtagcttctacttgtaaagagttgcaggaattgagagtttttccatctgatcctaatggaattgggcatgatgctgttacagaagaaggcttagttgccatatctatgggatgcccaaagcttcattccttgctgtacttctgccagcagatgaccaatgcggctctgataacagtagccaagaattgtcctaattttatccgtttcaggttatgcatccttgatcctacaaaaccagacccggtgacctcacagccgttggatgaaggttttggagcgatcgtccagggatgcaaaaacattaggcgtttgtccctctctggccttcttacagaccaagtttttctctacattggaatgtatgccgagcagcttgaaatgttgtctattgcatttgctggagacagtgacaaaggaatgctgtatgtgttgaatggctgcaagaagcttcgaaagctcgagattagggattgcccctttggtgacgtggcactactatcggacgtgggaaagtatgaaacaatgcgatccctttggatgtcgtcctgtggagtcaccttgggaggctgcaagacagtggccaagaagatgcccagtcttaatgttgaaattataaacgacaatgaagagagcgagttttgcctcaaccaagacgggcacaatgtagagaaaatgtacctgtaccggacgatggtagggagaaggggtgatgcgccggagtttgtggtgacgctgtagctgcagttggggtttttacctttttttctttcttttttaggcttccactttattttttgttcttctttaatttagtagttgcaagatgttgtactctgtttagcagaacagataagtggacttatatagcttgatgttggttattaatggttagtggtggcatgtaattgtgtttgtttacgaaggttttgactattgtaaaccgatgtgataatttagacggtgttagcacttgcagatattgtttgttcttttccaagtcagattggtattttgtatatagatattagccaactcaaactatatgctcttgaattgaatgaagaggaggagacctcttttaccaaaaagaagtgctttttgaatggactttatggatgtcaaattataaaattcttaatttcaattcggttctaacaaagatgccaataaactttgggaattgcattggtgaaaatggggagaaaaaaaatgtgagaaacagcattggaaactcaaaggaacaacacactatccagaaatgtcagaaatcatatactgttaataatgaaacatttttttacacacaaactgcacaaaataaaggggagaatgatgaagcaaccccaataaacaatgtcacaaaacctcttcaatataactcaaagaggttaacaacagcaactctttcgtaataattaaaacaattttagctttagatgaaaatctctagcacaacaccaagagcagaaagaaagtgctgaaatgattattatcaatcacttgctttttgaattcatcaaaaatagcagcagcagcattcttctaacaaacaacagcagcaaagagcggcgaaactgcatgatacattgaattattgtcagaatcactaaaacaaaaaaaaaaacataagaagatagtttagagttggatagaatcaaggcttaagttaaactacactactaattcaatagacataaattataacaattactacatagatgtcctcaaacatcatagattattaataacaaaacacatacaatgacgatttgagccttttgggtcgaatcttttgaaggtgttatgtactacttttggggaaaaagctaaaaaataatataaaattatatcacataataatctcagcaaacagcaattgcattataaagttaagctaatcctacttttggataacttatgaaattgggttttagcttagctttatgatcacaaacaatttcaattaaaaacacaactaacaccaaaatcatgacccacaaataggaaaaaaaaaacaagatcaatgtaaatgtaatgaacataagaaaaagacccaatagagagttcataccagccttggagaaatgaaagacaaccattgtgttcctgctggtaacggtaatgctcgtaattatgacagtgttcgtggtaccgttggggttgaggaggaggcggtggtggtggtggataccctcctccaaaatacccttgatacccttcatactgaggaggctgatttggcagtggtggtgggtatcccggataccctggaggaggcggcgccgatggaaatcccggtggaggcggtggttcatgatgaacatgatgatggttatacgaggatccgtaacctaaaacaacacaaagataatcaaaaaccaaaattcgcatcaaaacaagatcacaaaacacaaaagtacggaaattgaattgaaattagaagcgaaaacaacgaaatgattgagaaattgaatcgaaaaactcacctggtggaggatcgtaactcatgtttgaatagcgatttttggattgatttggttcgttgttgtgatcaaaacgaatctgaattgaattttgagaatgaattgatgatgattattaatacgaagataatttaatttagtgggaccacatcatcatttttgctagcctgtttccgctattgtttctcgtgttcttattaaaaacgttgtcgttttgtgtaaaacgacagcgttatgtttggtcgtagatttgaacgacgtgtcgtttatagtgaagtcaatggactcgatacttcgatgtcaattgtcagtgacacgatgtatatagaaatcttagcctttaaggttttgactatttcagcaaattaattgatattatgggcatgtgacaagataggtaactatatacttagagatggcaaactgagatttttttggggttgaatccgaccggaaagcgcgaaccggggttttattcgggccgccaccccacattgtaatttttattttggaaagggataattgtggcaaaagtccccaaaaacttgaggttgatgccgattaatcctcaacctcaaaaattggcggtga

SEQ ID NO: 16147 - DNA, 2408 bp, Cannabis sativa
tcatcatcatcatcatcttgatcgtgatcactattattattgttattgtaattattagttattgcacgcttttttaggtgggtgtgccaatggttctttatttcattgtctgttcttccaggcaatttcgcagcaatcatcgaccatctacatatgtttaaaaagaaattgaaataagtagatgatcacgatcgatgagtacaagtgtactatacataatcaattgatattattattaattacattctatgtataaatgtatggttacttacttttttccatgttgttgatgtaatttgatgattgtattttcttcttcggctgtgtaattaccacgtctcacatctggtctaaggtaattcatccatcgtagtcggcaactctttccacaccttgatagtcctgtaattacccaaatcatcatttaatgtcattattatttatagtattgttatacataatgattggtcgatcagtcatattttttaaaattattgtttaaagttatatgggatctcataatggtgttcttgaatgtaattatacatcaaatcacgagtttgctgtgttctaaaaaaaataaaaaaaaaattaataacgagtttaactataatttctttgaaaattagaaaataatgactgtccttagtctcatgctagctgggaaattccataattaaatagatgtgtatgaatttgtatatataggcacacacttatatctgaaaagttcgaaattgaagataatgaaggtagaataactaaacgtttgtagtgaaaagcctcagtactatttatatatgtattaaaaagatcagttttataaaacacaaaccaccaaaatctttgctttcataaacatttagttcgattattatatgcataagcatgctttctgaaatattatatttatatatattatatatataaatatatataccagcaaacttgggaagttcgcgccagttccagtgtccatatctttcaacataagctcttaacttatcgtcttcttcaggactccatgcacctcttttcactccattttcgtcaataaacggagctctcaccatcttaatattaattaattaaattctagctctataactgtctacctgtagtacctctctctctctctctctctctctctctctatttatttctagagatctctgtttttttttttcgtttttcactcaattagctaatttaatttgggacagtctcttttgctttcttgaatatatataatagaatagcatagaaggcgtgagcataaaaacgtgcctttgcattattcatagtcacagtcttcaaaatatataattataatagaaaagatgttattacacatatggaccctataacagaagatgcgatgaaattaatcaaatgccccttttcgtagagtgataaataatatcactatatactttacagaaatgctttttttttttttttttcttttaagaaattcagaaatgctttgttaaaaagctaacacatgaaaccggaagaagatgtcaattgtcagttaatgcttaaagtggtccacttttgatttgagtggcactacctatacgggctacacgtatctctacaaatatattaaaaattgtcgacaggattaataattgattgtaaatttatttccaatcattacatcaaattactagtgcctatatacatatacatgtaatagtaaaataaatattgagatgctatattattagagaaaaaataatgttattttaaaaatttacacatgaatgttatattataacactgatgctattcaatattttgaagctaaaacagttattttatctaaaaaattatgatatatattaaataataatgtgtgagattataatgatactatttttaaagagtgttatatattaaaatatttttaaaaataaaagtatcaaaaataatatagaagaaaaataaaataaacagtatatttttaaataatttataaatttttagcatccttcaaatatgtgactcgatattgctctaatgaagttgctccctttgtatagagattttacacaccaaaacttgtatgagacaaggaaactgtaatatatacaacttctttgttttttcttaccccttgtagcaaatttgtatactggtcggcataaaatcaaagtttggtaaattaatttttaatattcttttattcttttgaaattaaaataaatttcaaagcatattttgaggggtaataatgtaaaattgttttttgatgagatgtatctttagaagagcaaaatgtgttttatgagcagatttgtaattatggtttttggtgagtttatattggcatgcacgagaataaaaataattaatttgaaaatttcttgtgaccatttgcttgacctcattagcgtgtgcat

SEQ ID NO: 16148 - DNA, 2586 bp, Cannabis sativa
gattatcaatacagaataccatttctcttttccttcttctcttctactcttactttagtgctgctagtttaattaaattgataggaaatcctatcacacacacacacacgactcccatggattttatcacctgtgctcaaactcaccattatttgctgcactcgtcttcttaatccaatcccctacactacagtcgacacgatcagtactcgatcatactggcagacaaccaactcaataccagttgacaccgaccttaaactcgtggatccttacctgcaactctaactaagctcttcgaagatgtcaatggcgtcttcagctttcttggtacccttttccgagtactcaacttcaccaccaccagtgttttctctctctaactctcatgttcgcagcttcactgtaagtcttttatcactattttatgtgtatcgattgtttaacttgagcttattcaaagggtctttctctcaactgatcaaaatgtttaaaaaatgaaagtagttagtatttaatttgtgttcatgaaatttaggcttcaacaaacaaatctcatcatggatcaagtggtttttatggaggagccagcttctgtcatggattttgtggctttaaactaaggcagcctaacagaaaatttggtcttaaacatgaattgaagattatcaaaaatcaagacaaagatcactcatcaaatcacattgaaacaacttcatcatttcaagaacaagcctctgatggaaccacaattgagttggggcatggttagcattaactatatcttggttgaaacttatttgcctatggattccttttagttgatttattatattttaatttttcctttcattctgattaaggttgtagaaatgagaataaaacaaaattgataaaagaaaaattattagtttgtaagacattaatcattcaaccaaaattgtagaaaagttagaatgggatgaaatttgattcatttatattccatttcatttcattatccccaaccaaacataccctaaatgtcaaatgtgtgtttagaattcaaaatggtggcatgttagactctgagattatgagacattaacttcacaaacttgaagaaagttctttgcctaacatctgatctggtgtttatgtgaagtttccacttctaagcaatcccctacatctttgccacaaatacattcctccaattcctcagataatgtcgccggaggaccgtcactgtgcatagctgtcataggagcaacaggtgagttggcaaggagaaagatctttccagcattgtttgctatgtattacactggatttcttcctgaggtaaggctaaattaacatcatttctcagtgagtttttagtgaatttcttgctatattcctatatgctaatttgtgaaaaataagcagcaatctcaattaaattgatagtctagtaagtttggtaactttttacaatggatttgggccctttggtgtctacaaaatttgattctacacctatctcttaaatgtctgtccttgggtgcagaatattggaattttcggttattcgagaaagaatttgacagatgaagaactaagatcaataatagcttcaactctgacgtgccgtgttgatcatcagtatgaatcttttattacctctgatagttatttattttatagtacaatctccccatttacacaagcaggttactaagggtttgataaagagacactttgaacttttatgagtacatttttgaagcagattttcatgtaatcaaaatattgaattttgaattaacctccaaattactaacaaccaatttcagaaacgactgtggagacaagatggatgcttttctgagtaggacatattatatacatggcggttatgataacagagaaggcatgttaaagcttaatgccttaatggagcatgttgaggtaaaaataaacattcaaaactatcaaaaaaaggttttttttctacttgtgatacttgattagaagcgattgacttaccgcaggggggatctgaagcgaacagaatattttacctttctgtgccacaagaagcacttatagatgttgcatcttctcttgctgattatgctcaaacctctaagggctggaaccgtataataaccgagaaaccatttggtctcaatttactatcatctcttcggttgacacagtctcttctttccaagtttaaggagaaacaaatatacaggtgtttaggcacaccacagtgcaactgaattatctgttataatgtaaatttgtgaaaagaagtaattgtctgtctgatcaatcttatttcaggattgatcatctcctaggaaggaaccttatcgaaaatctcacagttctaagattttccaatctagtttttgagccattgtggagttataaatacataagaaatgtgcaggtacttctgttttctttatttattgctatctaatgttacaatctactttgccttatacaatatatgctggatcattggaacatttttcagattgtcttatctgaagacctgagtgcacaaccaacaaggtaattatgtgccgtgttgtggttgctgcatagcag

SEQ ID NO: 16149 - DNA, 3631 bp, Cannabis sativa
attggaagcaaagatcaagagtctcttggctgcggtcgggtgactcaaacaacaaatttttccataaaaaagcttcaagtaggctgtccaataactccattcgaatgttgattgatgtgcatggcgttgagcacacatcacctgatgccattgcaaacattgtgcaagattattttcatgatatcttcactactgaaggctatgatgctgctgctattcaacatgtgatttcaactgttccttgtgttattacaactgaaatcaaccaagctctaacctaaccttacacttctactgaagtctacgaagcactctcctccatgaaatcggatggtagccccggtattgatggtatgtccgtcatgttctacatcaattattgggaaatcgttggtgatcttgttactcaaacagttctcagaattttgaataaggggggagatccttctagttttaatcaaacagtcattactttgattccaaaagtgaagaagccgacttccatgactcaactgcatcccataagtctttgcaatgttctttataaattggtttcaaagtcaattgtgctgaggttgaacccgtttattagtgaagcaatttctgaatctcaaagtgcatttattcaatctcgtctcatcacagataatgtacttgttgcatttgaacttcttcattctcttaaacacttgaaaaggggaaaggagggctatgctgccatcaaattagatatgagcaaagctttcgaccgggtcgaatggcatttccttcaacatatgatgttagctcttggtttccatccatctgtggtcaatcttatacagagatgtattcagagtgtctcatactcttttcttattaatggttcggtccaaggtagtgttcatccaagccgagggattagacaaggggatcccctatccccttatctatttatcatatgtgttgaaggtttatcgaaacttttccaacatgaagaggctaatggcaatctacaaggtttgaaagtatctcgtggtgctccaagtgtgtcccacttattttttgctgatgatagcttggtcttatgttgtgctaattcgtgctctgcaatagccatcaaaacttctattgatctatactatcgtgcttcaggtcaaaagctgaatgttgataagtctgtcttatctttttctccaaacacactcccttcaatccaaacaaatttgcatcagatccttctaatgcccattcaaccgtgtcatgagcgttacttgggttttccatcctattctggaagagacaaaaaagtcttatttgggagataaaagaaaagctgtggaagaacttatcgacatggcaagaacaacttttttcaattagtggtaaggaagttctccttaaagctgtggccgaatctattccgacgtatgctatgagttgttttcgtctatcgaaatcacttattaatcaaattgaggtgatgatgaataaattttggtgggtttcaaactcatctgttttgggaattaattggaagacttggtcagttctttgcaaaccaaaagttgaaggtggcttgggttttaagagtttcatacactttaatcaggctctcttagctaaacatacatggtgcatcttttccaatccgacttgcctactcagccaaattctcaaagcaatgtatcatagtcaatcatcctttttggatgctggtcatggctcttatccttcacttacttggcaagggatttcttggggaaaagaattgctcttaaaaggattaagatggaaagttggagatggtcaaagcacaacttgtagatatgatctctggttacctagtgttactaattttcaacctctagtagtaaccaacattgacttgcatttaaaggtgtcttctctgatcacaccagagaggatttggaatattgatctgctgaactcatatttcattccatcggacatttagaggatacttagtatttcattgactatttcctcttcctgtgacaagctcatctggcaccatgaaagtaacgactactacaaagttaaattagggtactttttggctaccaatattgaggaacaacaacctagcatctcgggtgtgcaatctcagcaatggtggacaaagttctggaagttaaccataccttcgaaggttcgaattttcctttggcgagccattcacgattgtctccctgctactgctattttgtttcacagacacattgcggagtctccttgctgtctgttatgcaaaagtgaaagtgaaacaataatgcatgctttattctactgccacagacctaagcacatatggaaagactcaaattttcctcttggcagtatcctcacaagtggcatgacattaaaagagtgcttgctccatatttctactatatggtctgatacaaaaattgagcaattcatcactatattgtggcatatctagaatgaaaggaacaatgaaaagcatggtaataaaactaagcctcatgaaatggttttatactttgctttgtctttcttgaaagagtttcaagctgctcaacagtcacggtcgaaggcctctcctaactcgaattcctcttccatggctgctaccacctctgtttcagattggatgaatccaccctcgggaagactcaaactaaatactgatgcagcagtaaatcgggtctctaacattactggttgcggagcaattttgagagactcaaatggtgatatcttagcagctttttcaaagtctatcctcggtacgtttaggcctaaaataatggaggctttggctcttatgcacgctttgcaatggctggtagataatcatctaaatgttcacataattgagacagactccctactcgtggttaatgggttaaagtcatctactgcctcagtttctgatttcaattgtctcttattagacatttcacatcttgtgtccaatttccctggagtgcagatttctcatgtgtatagatctgctaatacgactgctcatttgttagcgaagtatgctctttcagtggacactgtttgttcttggttggaggaagttcctctcccgctaaatgcttattgtattatgaatgattaatttaatataatttgcattttcatgtcaaaaaaaaaaatgtcacctttttgtgacattttgtcctcttttttgttttattttttagttattattttcaaatacaaaaaaggtgttaaatcttttattttataccactccccaacttccactgttcatcttcttcttcttttagttccttagacggttaccaaatcgtgggtggttattttcatttcaaaaattttcagttaacaccccatttttctcaagcttccctctcaccccccccccccctttttttctggttcttctctataaatactttcatcctacatctaaatggttcttacacggtcatccccatcatctgctaaaactaaaaatcccccaaaacaaccccagaaaatgaaacccaaacaaaaaatgggtaagaaaaatctcaaagataacccacctagccctacttctcctattgctcctaaaagaaaacaagctactggaacttcgaagaaccctcgagggaaatgtcctcgaacttttgtggagaactcagactcc

SEQ ID NO: 16150 - DNA, 1543 bp, Cannabis sativa
ataatacatacatgtacagataacagatataccatcttttattatttctgttttgtacgtgtttaattaagttaactgaaaagttgaacacgtataccattaatgcatacacagttccttttcttgtttctcatttttgatcagacacaattcattgcttttttatttattattttgttgattccacagagaaagaatctgcaagaattgaaccccaccgaatcagaggtagtgatgaatcagctaactgttcaaccttagatataacagtgagccaaggccccacgagccctctcccaaggggcataccaactttctcagttgaaatcataaacaactgtttcactggctgcaccatctcaaatattcatctcaaatgtggatggttcagctcagacaatctcatcgacccaaaaatcttcaaacgccttaattttgatgattgtcttgtcaatgatggcaagcctttactcaatggtgctattgttagtttcaagtattccactactatgcaattccctttatcagtttcttcagttgtttgtggttcattagtttgatatatagtactatcgtatatacatattataattagatatatatatatatatatagttactacttatttggggctatttgctgccaatttttggtgtttgattggaaattttttgttctagttattataatagaaaatggttcagacttacaattttgttgggagtataaaattaagaacaataaaggaaaaatgattctgaaatgagtgggtgggaaaaagcttctgctttaacttgagccttaagtagtagacgacaaaaagagttattgtttactaaaattgactcgacataatggacaacatataaaactgtgaacttcttttgaaaattcgaactgtattggcatgttcatttaggtctaggttgttctgtatggtttttttttctaaaaaaaaaaaagaaaaacacacgttgactatcaatttatgctacagttttttggttcctacttattttgacaaatggcctaaagtgtctgaaatttggatttaattaatgagagaccgattccctcttctttcttcatttattttttggaagtggacaagaaattgaatgttgtgattatagaaatattgggtttattttatttgtatttttcttgaggaagaatgtggcaaaaggaatgagtttgtccatggatgaatacacttaattttggtctcttaaatgagatattatgattctgtcagtgaatatatattgtctttaattaataatatgacatttgtcacatgtttcaatgtcaatttcattacatttcgcatgtaacaataacagtgagaatttagtaaaattaaataataatagtactggcatgcatgtcagatgataaatatataaatcttatgtcacactcatcatattgatatgattaagacacgttattcattaatttgatattttaacagatcattaatggtggctctattaatttacagtgcaaagatgccattaatactggctcaacatgtaactta

SEQ ID NO: 16151 - DNA, 6173 bp, Cannabis sativa
agatcagatttatatggtggtattgctcctttattattgaaccaatctaaatgatcaaagagattgatagacaaaaacataatgaacataaaataaactcatatttgactagtgactaatgtagagaaacaaagattgatattaaagatcgatgtaaatgtacttttcaagaaaacaaacaaccaaaataaataaaatatataacaaaccaaccaagccaatccaaggacaaccagtacaatgtctgatgaggagagtggaataagatggatgagagaagtagaataaacgtataagagattataagtaaacctggtggtcctgaacgggtgtcaatggcggaaataatcatcaatttgagatgtcccttgatgcgaagaacattggtaactctgaaggccttactgttggtagtaagtgacttattgcaaatattgattgatgtgagcagttacagttattcttacagagaggagtttaaaaaataaccgctccagagcaaagttttttgaggtatactattccaagtttaatgttgtgtgcatgttttctaattagaagaaagcattaatttatggaattacataaaataacggttgcatataataatatacggttgtattgtattgtataactacaaaccacttctctcctcctctggctgagactatcttaggtgttaatcttcttttttgtttgattgtgatctgatactgtaaataatatcttatgtatattttgcaagtctctcaacataattttgatgtgaagctactaaaattaattttgggtttataaaatgttaaaattaatgacacattcaaggtgggattcaatggaactagaagaaaaagaacttggatatactttttacatgtctcttagatttagctgtaatatgtgtgttatgtatatgctagaagactttaaatttgataatctgagaatggaagctgcaatgagtgtttatttattattaatattttctttaagccagtcatgaatgattaagccttgtatcctctcatgctttaattttcttttcagacaaatgggcagttcccacaaccacaggctattaatgtagacgtagaaaacagataaaaaagaaaacataatattaatacaaccttaaccttaatgtgatataaggtaactgttaattgcgttatccttgaataacttgttgcagggtcgcgatactgtggagctaagtagaaagcgagacaagtgatagtagaaaccgcaacatagttagaacacagagatctccaagcagtggctgtataatcctcttccacttgttataggccacacatgttcccttcatttctaaattttaaatttcctgtagtattttgtaccatgtttattttgttagcatattccattttgaagagtttaaaggtgtagcctgacgtcatattacgcaagacaacagtgcaattggttttggtgcttggtgaagaaagaagacgcctgtgggagatggtcttatgcatcattatcaggttcatcagatcttgttttgtttattttcttagctttgttcttataggctcatctttatttaactgaactgtatgtgtgggtgtggggggttgaagatagtttagtttgaaactttagttgtttagaatccatgaatgctttgcaataagccttctattaattagcctttaaaaccccatgttggagtaagaacattaataatctaatcattaattgggtgttatagattttgtgtaatatatctgtcattggtttttattcatattacctcaacttttgttctgtggaagaagccattattgtctttactttctatttgcaacaatctgttgatctgccaaataaaacatgccgtttgactggggcttggaggtaaggaagacagccacaatctttaattcattctctggaatttccaataaagattaaactttcatgcacaatacttactacttacactctcatcttggctgaggtatgcttatccataactgatagatcgtattcgtagtcagaccatgtctttttaaatgtataaaaatcatctgttttgttttttagatcatatcatccatccataccaggataggcataggggtgcattttttttaattcctctatcccatgcatattgttgtgtactgtatatatgagtgtagagattgaatcatgaatatttcttacaagtcctttatgttattttgttattactgctgtttatataatttataaatagcaacagcaggttttcaatagacctgcactctcctgtgctgtgatacctacatatttggactggactcttaatcatattgtgcataagtgtaataattaagtaaagggtctaacaatataccatgtctttaattaccctcgtagtttggttgtctcattgatctgcctaatcatgttgtgcatgcttgatcatggtgcttcattctaaaggctcaaagtaagaaacatgtagaagagtacagcaacaccaaccaacaaaatcaacgaattgatgatcgtcctactacactacaaagctacattaagttttgagtttaactgactaaagagaagactgcaatgcagagaaaaagagcatgagtgtttggattatgactcaggaggacacatttcgtatactatatttctggacttgtcgtaattcttctttatttatttattttgtaataactgaaagatttatgatctttactttcttacaaatttcgtgttttcagataccaagtgtgagactatagtaacatgacttgggattactatcaatagatgtcacaaactatcaaaataaactcgtaaatctcaaatccattaaccttcaatccaatccatcaaccaacaaatataatattacacttggtcattgttagtggaattttgagtacatttttatgtgagtcattgatagtctatacataaattagtaaattacatacaaactttaagtggtaaattgcctttaacaagtgaaaatctttaataaagatgattggttaaagaaaatttgtagcataaatgtatgtcaagcttgctgtctacaaatctctaaaaaatgtgtatgcacatatcactaaatataaatatatcatattcaagcttgacatcaaaattcaaactcataaaacattgaaaaaaaaaagtgaaaccaaaaatgaaaaataaaatattacttagcgagttcggctagtgcagttattggatttaggtatcaccttcacgtcgttaagctattctttcgtcttcagcgacaaatcttgtcgtcaagggtcgtgtcgtgtgttgccctccattggctacctaggacatggagctttctgtcgccatcgttggcttcctaaaccattgacatcgtcgtcgtaagcagccatgctcagaaaaacccatgaatttctcttcaaataattcagttcagctttttttttttcttaaatcaataaattaatctatttaaaaaataattagtgttaattaatatctgaaattaaattatgttagttattgttttaaaaaaaaattctttgggttcaaattatttgagttccaattgctaaaaacagaatcagtgaaaaaaaggctaagttgaatctaattaaacactaagacaatttgatcgcccaaacataaattaggttgggtacatacatctatagtctacaagtaactctcactaccagaccagttcataagcttgcattctaagatttaaattaaaccaaaacagttattatcgcctggcaaaataaaatagaaaatgaagtcttgatatcacccggtaaaagaaatccagctgcaaaggaagttaggactaatgttgggattgaatcctcagtttgagggtctctgacaagctgaaaagagctgacaactgatcaaagccatcactaaagaaatggatagttggaagccaaccacttctaggaagtgccatcccaagcctcgcttaagatagctgaaaaaacatcaacagacatgatcaggccaataaaccatgccagaaggcagggacattgtaggtggaaactttaagctttcgagcatattttacaaactgaaaacgacacagttaaactgaaatacagaagacacacaaacacacacacagatcatagaaacaccaaaccttgtgatggatggcattgttgctacaatcactgcacatgcgtatattattggaatcaatgtctttggtttgttttttcgaagccatatcagagaacccaatgcaacaagagatatgctgaacacctgaatacaacaagtgaatacaaataggtaaatagtgatactaatgcaatggaaatttcactccaaaactcagggaaaagcatgcactgaattcatatgacaggtcttaacaataaaaagcaaataactttaccagatttgcatttgcttcaaggccttgtaggatgaaatcccaagtaaattccaatcctctggcacctacccaaagaggtgccaatctatgcaaaacagaatctgcgaaagcccatcctgcaaacagcgaattaacattaaaaaaagttaaaagctttccctcaagtaaaagaaactacaagctaagataacaacttgaatttcgacttgcaactctttttatttatttgtcccttaacattaacatatattaatttgtttcggtaccaaattcacaaaggtcttccttaccaagtccaactgcttgaaatttatgattttgagatatatttctttgagtcgactgagtcagtgcaaactaaaggccagcaacatctataaaaccaattaaggctttcaaggcttcctgcaagtaaaatagcagaattaggtgatgtaactgcaacccaaattcatgaacaactggaattattttagaagattttaagtatccatttagcatcttattatttaaaatgatgaatggtgaccaatgttaatcgtttctagataaatgaaatgcatggtaatgcacacttgagaatttaggagtccaaatttgtgtcgaagatcttcattaattcaaccaattaagataaaaaaaaatggaactttgaagggcctccactccagtcaagcaattactcggtgggaagtcaagcaccttcatttcaacataatccacagtccattttcaagcttaaaccaaatcaatcttagtgaagggttttttcaacatatattatatagtttcaatcaagccaacatcacaaacggtaaaagccagtttaggaataaatcatataaaaaaagggggggcttttctactaattgaagttatgaaatgaagatcgagcaacaaagtagtaggtagagagcaaaattagagtagaaattacctggtaaggatcaaagttgtcagtctccaataccttaagaaaagttgcaagacaaacaagctgccaacccaacacacaatttattttaggtatacaaacaagttagatgcaattgaaattaatagaatatgaaaacaaaccttgagtaaatctgtaatgagataaacaatagcagatttaatagaggtaccaagcgtatcatactcggatctgaaaatcagttgtcatgaattgagtaaaggtaagattttgaaattgtaagtagatctatacaaaaacaaagatgtaaaagaagaagaagaagaaaggtacagaggcgtggcggagtagtagacggcgtgaggtccgaaggtaagaatggcacagttgaagaagtgaaataacgtcattctcaacaaattaaagcaaaggggtttcagtttcagagctcagagaagacaacaaccaacgaaagattcaatatttcatctcaggcaggcatggttacactgtaacttttaagatgaaaaaattgtttaatggtatttggcaaaatataaatgtgtaatttggtattattaaaaactacatgtgtaactgattagagtaacaaggaggtaattggttattctaaattattttccaatttttattattattttttttcataaattttattgtgcgtttggaaagccacaatgtaattggatttgtgtgtaattagaggtaattacacaatttgacatgtttgtctgaccatataattaaactgtaacggtgtaattagaagtaattgagaagttccaattacactctccaattctcatggccccaatgagaattgaatgtaattac

SEQ ID NO: 16152 - DNA, 11282 bp, Cannabis sativa
gccccaaccacgtaaaaaacctccatctcactttcttacagctctttattataattatattttgatagttgccgaaaacctcggtcaacaatggtttttatgggtatttttaattttgtgtctttttcagctttcgtgctattttttatggcttgaccctaattatttaggatagtgttgtggtacactcaatgaataagagaagtaattcattttgtgttattggcttatacatcaacgatttttcagttttaacaaataagtattctttatatatatagattgttttatattataatatggattattttacatttttctttcattttagctattaatttttcattaaattatgtagtaatagaattttatttatttttgttttgtaggtcagttttgtggagagcttacgactacaaagactttgccgataagattaattcaaagattgtctcttctaataactgttgttgcttggtgttgtttgttttttcagctatcaaccaaggatgagtgttttaatgagcttgggatggtgtttgaggatgttagaattttattgtctaaatttctatggacagttttgttctatgtggcttgcgatatgaatttctgccgctcatggcttggcaaagcatgtctttcgattagacgatgagctatcatggttcgagaaagtgcccccaccaattatagagtgccgcgttgttaatcacgtgtgattttcatcatcaaatagacccaagtattcaattggtaggggacatttttgcttgttttagccaccattgaatcggccagctggatcgctaatcgctatgctctttcacttgttttcaaaagcccattattttaacacatttgaactcttcacatctatctttgactatctttagcatgaccttaattacaagaacatattgattgtatatttcattggtaagtatatgggaaaatttatcaacacagacgccttcactttaccaagactccattgaaacatcaacaataccagctttgtttaaaaggtgaatcaattactgagatgggaggaggaggacacatatgaagcaaaaaaaaaaagtcatcttttttcaactaccaataaacaagtacaaaagaactcaaattaccatgaaaatagaaaacgtatcataatcgttcgttttcagtcaatctgaatctacagcgcttttctctactactcgaatgctttcgccttctctttccagccagccacttacattcttcacaatcacagatcggtactctttcaggttgcatgttgctcctcctccgcaaatttgaaaaatctgtggtgcacaggtttgtttaattctttttgtcttctctcgatgtaataataaacgcttgatgaacagaatctcttagacttgtgattgtgttgtctcaaaattcaatttttgtagagtttggcttaaagttgggtttttttttttttttttcatctttccgttccgtcctttttggtcttccgccaattactttgtgtctatgtttgatatttgttctaggccagctctaagcttctgtcttcttcttcttctaagataaaaacttgattttttttggcctttggaatggatttattaggttacttgtttacatgcttctaggtgtccgtccagcaccttttcagaaagattttgatttaattggtagtctgtcatgtgcatgtgaattctaacatattggttttcttctaattcttattctcttgtcatagtaattgttcttttctttgtgtatattaaacttcaagtatattctagtgtggctcttagctaagtgttggtttagttcattagtcttttgcttctcgaaagaattatgtaacttacctttatcaagttatgatctaagctattagtttgctttacttattgggtttaaacctgtcaaattttctaagtgttgatacatgagttaagaacaaaagttgtcctgtcatgcccttggtagttctatcaagtttagtgcagttgtcaatggcaagttgtttccaacatattattttggttttgtcaatattagatacaataaatggtgctcaatccaccacaaacatgatgagcaactatctttatctcatgttgagatgcaagtattagatagtgtttcttaaccaattaaattttcataaacatatttcagtttctgagtttcagaacacccttttttaaatcatagtttttcaatattgaatcaatcagagtttgatgaggagctcaatatagagggaccggcagtattgctggctatccaacagcaacaagacaacacacttttcagtcggtaagctttttaagtcattctctttcacttttcagttggtaagcttcttaagtcattctctttcacttttgaattgcacacatacctgtacagctttactctattgctgttttaagactcaaagcttgcccaaagagaagggccatgggggatctttatgtgtggctcatatctttcttcatcctcattgctctactcatccttattgtttaccaggttaatttctaatccactataatttattgttatgtatgcatatacatacatataattgttgggtgtgtcagagcattgaatttttgggatggacaaacttgtttatgtggatccaatatcatgatttgcaacaacaaagggttttgaaagtaggggtatttgaacaaggctaaaaatttgctttcttgtatagtgttgcaattactttatttttcccacttgttaaataaaatggaccatctaagggccttttctgatggtttgtgctcatagggtgttttaaactgaaaaagggtttttctttcttaatcatttgtcattagaatgaggaaagtattcgcagctacctctgtgggaaatcttataggagaacagagttttcttaatatatatatgtttatacatgtatattgatgttgaaccttgaactttgcattcgttgaactttctgcttgttggggcatgtaatttgtttacaagccttttgactttcctgtgtgtgtcattgtaattgcagttcttgactattttatgttggattttattataatcacatggagtatattatgactgcaaatgtgaattgtgtgaaagtaggatactctaaattcgggagtccaaaagtttaataaaatgttcttgatggaatgaagatgtgaatgaaagatatcagtgatttcaatcgggtccatgaatctaagaacataattttaataagctcaagattagttttggaaatttttgctctcaaaagatttgtgttttcaacttcctaggaatagtctggtcttgaaattgttcgacttgtaggtttgaacatcattattttgtacacaaataaccattgatacaattagcaagtcagaagttagatagcattatacagctgttaacttaactgaaagcgtccattatgaaaattggcattaagcgtgctctgggcttggatgtaataacagtttaaagactagattttggagtaatgttactgattctttcttctaaacgaagtgatatattttgctctaacacttaatttaattgcagcttatgtgtcttgctgatctagaatttgattatatcaacccctacgactcttcagcaagggtaaatagagtgattttgcccgagttcattacacaaggactgctgtgtgtcttcttctttctatcagggcattgggttatgtcattattgtgtggtccgtatctctattataacgtgcaactgtaagttctcattcatcctacatgttgctatgcagcacttcataaaatgcaattgggttatgtcattatttagattttgaaagctaaacgctaaaaggtgtaatctttttattggttctgatcagatatgcgcggaagcagcacctggtagatgttactgagatattcaacatgcttcataaagaaaagaagcaaaggcttttcaaactcttttatctcattatccaactgtttctttgcatattttggtattgtgacagagaaatactttgcttgctattgcaaaaaaaccatgtttcgaacgatatgatttactgtgacactaattatcttcctttgtgcaatatgttgcaggatgatcctaactgcactcgaagatcatgacgattaatgaggatagttgctttctagtggttagctgcctaaatggttgcttgatacaatatgggcatgctatatttagatacaagtccatttgttaaggagggaacttgatgtgacttttgcagtgttttgtataagctgcagccgcaagagagctcccgggttaagtttgtattaagttattaactaagctagtttactatttccatgagtttacggaaataggtttgctcacatatttagctagctttgctacttgttttctgagtaatatatgtattaggttgttcgagtactttattttgttttaatgtaaagcaatgattgttgttgtaataaatgtctaatcataataaagaaagaaatacattagctcaatcttcaatatttgaaacaaataattgctagttatcagggggagttgtcatgaactcctttagccatgatgaacaatatataaccttaatccatcaattcaagagaactgtagacatgatttccaaaggccttgataaaaacaagaggaccttaatccatacaagtttttcaaccgatataattgttttaacacactttggaccacttcctcattgtgtagaataaaactaacaatatcaatacccacttctttaaattccagttcatccacatgtatccttttggaagaaaaaaaaaagtagtttcacatttccaactgtgcccaagattaggcatattctttacttttcttgggattaataagagaatttgtatacgaatgttaaaacagcaaaatgtgtctccttgactaccatctacaaaacatggaaaattcaattcctttgagtctctctatagtaaaaagtttacatgaaacaattaaaaagtatgattccttgtttcgcagggtgatgccatgactgtcataagccaaaatcctgtatctctttataacatttgatgcttttcctatcttaataaaatcaatttttgaatcaaatggcccattttttaaaaaaataaataaatgtggagaaaactgttagtctaccaataattgccacaagaacattcaccgtttctaaaatgatgaaacctcttcccatctctgacaacaagttccctctccaccactcttgataggaacttaaaaaagttatggcaatctccacaaatcctaagatttttgaagaccctaactgtggctccttgtggaatattcaagagtccaaatgcaacagcaagcttctcactgtgagtagacaaagcgtactctttatgctcctcacactcagtgtcatgtaacacaaattttgtatcagggatatatcccaacttcctaatttccaatcccagtttctctaaatatttgtacacggcttgaaccctgggatgtgcagtgtcatcaaccaagaaaacatgtactttgttctcaacttcaatccaactacaaccgggttccttcttgatccctcgtcctctcattagttgccgaatttttgccacattatcccactttccaacattggcatacatgtttgacaaaagcacgtaggttccatcatgctggggtctcagctcaaacagtcgttcagcagcttcgattcctaaatccatattcccatgcgtccgacaaccagaaagaagagattcccagactgccacacctggctcgaatggcattgaatcaatcaagtttcttgcttctgagaaattcccagctcgacacagcaagtcaatcatccgggcataatgatcttcacctggggaaatgccataagtgctcaacatagaatcaaaatagtgttgtccttctttgatcaaaccagagtggctgcaagctgaaaggattgtgagaaatgttattctatctggttggatatcttctttcaacatctgttcaaaaagttctagtgcttgacgaccgcgaccgtgctgtgccaacgcagcaattagagcattccaagaaactgaatctacataaggcatagtaaggaaggccagctccgcagagtcaaaatctccacatttcgcatacatggtaacaagtgcatttccagctgataggctactatcatgccccaaatggattacttgagcatggagttggcgtccattctccaatgccccaagaacagcacaggatataaccactccagcgaatgcataatcacagggttcgaaaccttctgttctcatttggttaaaaatctttatagcttcttctccatatccattttgtgctaaagcagatatcattatggtccatgttagaagatttctctctggaatttcactgaaaaatgatttggcatcctcgatttgccttgcatctacataccctgataagatagcattccatgaaacaacatctcttacagacatcttattgaaaatcttccttgctgtatccatcttaccacatttataatataacgtaaccaatgcattactcactggcagtgagaattctggagtggactttgcttctgttcttaaaatataagcatgtaactgtcttccaagttgaaagaaacccccatttgcacatgcactgatgacatgcgtgtaagtgaaatcgtcctgagaaacacccttcaaaagcatcttcctgtaaatttgcactgcttcttgaaaacggccatggtgcacgtaacccgaaattatggcattccacacaattcccaacttttcagtcatcccatcaagaaattccgtagctgcagccaagttgttgcacttcacgtacccggtaattatcgttgtccatgataactcatccttttccaacatgtcatcaaacaaaatcctagctgaagtcatcactgaagccgatgatgacgaggccattgacgacgatgcacacttgacataaacagatatcaatgaattcaaaaccgaagtaacaaaacccaacccaatcttcacaactgcacaatgcatttgttgacactgcttttcatcgtcaactataagccccaaagcactgagaacactggataaagtaaaatcatcaggcccaacaccagcccgcctcatgtcatgaaaggtttgaatagcagcaaagccatcattgttatgagagcaacaagtgatcatggcattgtagaaaacagtatctctcatgctcaatggagttgcaaagaatatatcccttgctaacttaagactcccagcagcagagtaggcagcaatcattgtcgttctcgaaacaatatctggttcaggaatttggtcgaacagcttgcgaccataagtcaaatttgatgatttgcagtagatgtccatcaaacggttgagaatatggccacgtggacgaagcccagaagcaatcatgtgggcatgtacgtgtcgagctagagaatctgaaatggggttttggaggcggcaaaactgcaactgggttgcatatcgatttgccaattttccaacttccatggtggttctcatattcataactgtgaaaactcatgctttgccagtctcataagaacaatcaaaataatcgagctaaattacagataattaaaacaaatggaacacataaatgtaatcagctcaaaatttttttctccttagatatctatgtatgtctttaacataggcaatgaacttttatatatagaaaaaaatcctctactattacttaacattgttatttttattattttaaactttgtcggtttcacaaaagaaaaagaaaacccaacttgcttgttggttccccaatgctaaaattatattccacaatgctctaaatgtaaatatccattatttttgccatgatgttgaaccataagcttaatatgtgatgtttatttattttaatcatattaatctttatagctaatgagaaaaaaattattttataccacggaatttggacaccattaattatgcagagactttaaaattgagggagcctcaagatctagccttttgagatcactaagcaaaacaaagaagagcatagcatagatagaggccagccaaccccattatatcagtcaatttatgaggtgaactacctaccaccattagactatgctacctaggacaagcacaatcaatgaataattataattatttagctgagttgacaatttgaggtagttggcttcagaatcagggaattgtagtctttaaaaactcccatgaacattccatttcagtaaccatcttctctgcttgtttcttcttgattctcaacaacgacatgacctcatgagcatcgatcaatgcttgttttgaagtagctgctcgatcggctaaatcttcaaaactctttctaagcaaaaccttatttgccttcttttcgctcaactgtctctctagttcagcaatatcttgatcaacagtctcagcttgattccttagagtcgtgaactcagaagcaaattgcttcgcggtggtctccagttcatctattgatttttccttatcttgaacctccctcaagtcttgccgcgcacctgcgtattgctcaaagttgtctataaacttggttgtaaaacttaccatgtgattaggacacgcattgccagtaatcatgatggaaagtgaattcttgagctcaatttctcgaccttctttgatgatattggcaagcttcatattaaggcattctttgaaaacgttttttgcatgggaaatctcctctttgctaggaggaggggtggagctgctcaatgtgtttgagttggaattctttactcctaatagattttgaatgtctccaaataaggcatctaattcagacaaataagagggacttatttcagcctctacaagagttggctgctgaaagaaagtaacatagttagaatggctcgatgatctaatatgaaataggagagcatgaagtctgagttcacctgagcaagctgaacagatggtgaatcaacaataggcggggacgatgggatggttgtcgttttagcttcttcctgcacatccttggttataagagcaacctgttgattctgttgtaaggattcaattaagagagtagcagcagtaatggcttgagcatgagaagtgcttgttttctccacaagattttctccattaactttcgagggaattgccacttgtgttatttgctcaggaatgagattctctggtgttgtacggagattacttagatgagcatctggaatgatagtttgtgaatcaagagacttaggttctggctgagattcaatagggtcttcctgcaataaaagatcaattgtgaaaacatgccaagtgcagacagaatcacatctggtggagttgtgtagaagtttggactattggtcagttatcttgacataaatggagaagaagatgaatatcaaagaaaaaggtgataccagaacaacattttgaagaaccaaagttatcttattgaaaaaacatgtatttcacaagatcatacgtgaattagaaatattgatttaagctaacaaataacaatataatgtttcctaagttgttttcagtgatttaagttataaaagcaaaagtagaaaaaggaagtttggaaagatggatgaaggctagaactctaaaccagtattcaaaatcaagctggctcatacagattcttcaaagcatttattttgtatttgaaaaatcataatattggtttgttaaacaaatcccaaatgatgagtttacagcacaaattctaaatggactctaaaattccaaattgtcatgcagattgtgtttacagcacaaacacatggtatgataagaatgatgagtaaaataaccacaaagcaattttctcatggtcatttctggtctcgttaaaatcataatagataaaacattcttgtgagctgtgtcagaataaaaattataatcacaatattgacaatttgccagagcaaaactctacacaaaaaattagtgacaaaaatcaaaacaccagggcgataaataaatatttggcattaccttttcctctatctctagctccttttcatcttcctctttcttcaatgttacctgcaacgtaagttaaaacagcagaatgtcccttattgactataaaacgcgaaaaattccattcatttgattctctccatgtgaaaaattacaagacaggattaaatgcatgaaacacattgctcctcgggccaaaaattaacttgtttttttttttttttgagggttctatgcacactaacctctgctttaactatgcaagagtcgttcacaagaaaacctttgttagggtcatgtagttccccaagagcaagaaatgatgggataccccagttcttctcacctgctttaaactcatgttccaattctgcaaagtgcaaagtgcactgagaaaaacttgtttgtttcatgggaaaatgattacgagacagttaacttactttgagggacttgagttgagtacaaaaactggaaagaatacctcttgtaactgtgtttctatgatcaagttggttgataacagataagctaaacatggcatatatactccacccatgagacaaagttactgaatcagcaacagctagatatactgataaatgttccacgttgttccctttaggaaaaactagaatcctcctacacatttttcaatttaaatatcatcaaattattaccaaaagggtcaaattaaaaacccatgaacagtagtaacaaacaaaatgaatattttagtaccatttgtagcctcctacatggaatgtatccgaatatatccccttcacattaagtttagaaaaattatcaatttcccatgtgaactgcccagatgaagaaccattctccgactgagcttcaacctttgtattttcagctttagcttgtgaaattttaaaattaaatacaaatcaacaaattcttagaatattagtggaaaaactcaaaaatgagaagactttaaagtgataatgatgaaataaaaagcatgctatgatcataaatgaataaaggattgaaacaaaatgaatcaattaattgatttaccttggaatgcattagcttccatgatcagaagaacgaaaagtatccacggaagaaaggcgaatagtcatcatggatggtcaatgggttttataatttttttttattttttaagtatatataatcaaaattcccaatagaaagggaattttgattttatatatttaaaaaataaaaaaa

SEQ ID NO: 16153 - DNA, 2408 bp, Cannabis sativa
gacccggacccgaacccagacccccgactcgggcacgggcccggacctgaacccgaaaccggactctgacccggacccgagacccagactcgtagttagtgttgggatcgagtgtattaaaaatatattataactttacactatcaattaatacaagttaataccaaatattgtattgtattaaataatactaatacaatacaatacaacacaacacaatccaacaatacaatacattacaatacggcgtactaaacgagcctttaatataaatagatgtatagataaatagatagattaattagggattactcacaattagcattgactttcataaaaatttattatatgcgattattgacttacaactaacaatatacaaataaatcaaacaacaaataattgttaagaaaacattcggaagactaaataattaactaatttaattacgcaaacccgccgtaaatttgacacctgtcctcggcagccatgtcattccatcaataaaccggccaacggtaaagaaatatgcggtgccagcatccttaatgatgtgataaccgggccatttgacccggccagataaggctgcacccggtccataattcctatactcaccataccataatgtgcttaaagcaaaatcaccataccactcaagccaccctctaggctgaaccaaaccactcatgtaagtgttcataaaaacagtcctcgaaaattgtttccacggtcttcccaaataagttggttgtgtggccaagatgtagctatcttggattgaaaatccagtactctggtgtggatttttcctaccctgagctgatattgtcaccttttgtagtggcagaggtaccctcgtgtagatcttgcagttttgcaatacggctgcaccattgccaaagatgaagtctattgtgccataaatgtcacattcccggtaaaactgacggagagagtgagcgtagagggtatcttgatgtccttctatgctgcacctaaagaaggcagattggtctgagtcaactctaagagccacagcttgatgattctctggtggtgctgtgttgcgaaatgtcatgtctcttgctataaatcccttcccagatacagctacgttcaaaataacaaacaaatatagaaaataaaaaaacatggaaactttagagcatgtattagaaatcacacatattctgttgacaaatggaaaaataaattgactttgaattaatcaaaaatggaacagaatattcattttggaatctctaactaataaaaagcaataaatatattaggtatagcataattttgtttggtatacttatacaattgtttagtcttactctaaatatgttcggtagctcatattatttgtattccaccttttcaattagaatgatattttttaaaaaaatatatataatgtactacgtaaataatgaagctaacatttctatgtagattcgaattatagggtttattaaagaaaaggtggcagaaaattggattaatggatacgtattcaattcaaaatatttaccaacggtagcagttctgaaagtagtccatccttgcatgaagtttcgatcaccagtcaccacagtttttccaataccatctccaacaaatatgatattagtcttcttcttcttcatatcaatattctctctataaattcccttctttatgtatataatataccttctgttactataatttggtgctgcattaacagcttctgtaatggttctgtagtttccactcccatctgctgccacgacagcattgacatgcgtacgtgtagggtgggattggatcagctcctcatcaccatctgtgatccaagacggcaaccctgaggtctgattggtaggtatgatataattctgatctcttggaggcttaaaaggcaagctatgaagctctgtgtacaaagccaaaacatttccgataaggtgagtgacttgtctcaagcttcctctaatgaacctctcaacgcgtctatcagtgccttcgaaaccttcaagacaagtgtcttggttactcagagcagcactaagccaagccttgagattaccttcatgatgagctatgtcgtttggattagaccggattatcttcatttctcctaaggatgaagccagctcggacactgagaagtcaagaagctcctgacaatctcctatggcaacttgttctctgtaatttgtggacaaagtgttgaaccttgtgatcatttcgattgcagctcgtgcttcgtttagagagtgtttaagcgcggcgtttatgactgaatgcctgctgcgatcaggagattgttggctgagctcagtttggactttggtgatgcatgagtccttttcgtagacattgtcacaaactttcagaagcagggtttcgattgagtc

SEQ ID NO: 16154 - DNA, 9774 bp, Cannabis sativa
  modified_base (51)..(55): a, c, t, g, unknown or other
ttgtcatttaacaaaacacagggtccaactgtaacttttacaaaacacagnnnnnaaaatggtatttacccgaaaataaagtgtgaaaaacgaaaatcaattattttggtataaaaactagaaaaattggtataaaaaaggaagatatttctctaaacataagttggagttggacgatggcatttttgtatgaagtttggttaaggggggtctgtaaagccctaaactaggcggttgttacttttaacgaaatcttttatgtaatcaccggtggacaattccggtgccttccgtgtccgtgcccaaaatcccagaaatctttcagcttttccatcccgaaacgtatcgataaaaatggcgtttagaggaagagaaatgattaataacataatgaaaaaggtaggagagaagaacttggctccgggagtgaaagactctctgaaaaaatatgtgcccgactctaaaatcgtaatgggtcgggccaaacggggcatattcgccggtcgtcatattcgattcggcaatagcgtcagtgaagacggaggaaacaagtttgttctcatttctgtttctgtgttttcctcaaattgttctttttctttccttcttcttatttttgagtgagggcatagataatagttatcttttcttttacgaaaggttttgattttacttttactttgtcgagtgattcgttgtgttgtgtcaatattaatttgatggtgcagttcaagaaccatgttgtgcattggattttctcattttcattttaattggctttgaatttgtaactgttgattaagttttgtgttggagcaaaataaaggaagaattttgtaagtttttttttttaatgatttgttgtacagagttttcatttttgttgactaagtattagagaaccaccaatgtatttaggaagttgctgttgtgttgtcaatttctatcagttaaatatggatgggttctggaagcattcatcaaatgtcttcaaacttactttgtttgttgttttatatctgattttgaatgtttgtatgtatactatgtgctagtcttgcaaggccaagtggtatttgacaaacctttccatataaattgacttgcattctaattgaaatttgctcttgatattagaatgtttaactagtgttgctgcaaaaagtgtagtcttctgaagtctcaagttcattgaaaatgaagagcttgtttgatcttgatgatggaaaatgttattttggaagattcaacttgatgtataatgcatttacttgttctattttttctttatttcttcttatcatgttacttcttctgatgtgaatcatttgttatacatgaatacaaatattcttctttgcaaatgttatccatcacttgctgtcattttttgttgtgtatctttatgttttgcccaatattccaaggatttctttagatagtttacatagcatatatgagtgttgaatcctaaacaggattatttgcttgatttaacttagcaccatcaacttctgtttttgctgaaataatgaaaagatgtatactgcttggcttctttttttttttttaactacaggacaaggaggacatggaagccgaatgtccaggataagcgactttttagttacatcctagaccgtcatattcgagtgaaagtgacaacccacgcccttcgttgcatagacaaggctggtgggatcgatgagtacctgctgaaaacaccttaccgcaaaatggacacagaaacaggtctcttctggaaaaccaaaattgagaagctttatggagaacttgggaacactgaggtcctcttcttttcacctgaggatgaagccaagttcgaacaggaattcaaagaaatgaagatagctgagagggcagctcgtagtgaagctaggagaagggcatctggttggccagataaactaaagcagattgaaggaggagcagacaccaaagaatggagatcacatgatgttggagatcatgagaatgaaaaatttgctaatttgtaagtcttgcttgatgttgcttagacttcaatcagttttgtttttccctccataatttaatcataattttgttgtgttgttgagaaaacaagtcaatatattttagaaataacaaggattttgttgttgtatatatgtatatgaatcttaaatatttaattttatgttctattttgcaaatttttgatatgtcctctctataagttaagcatggtagtaggaaaaaaacaaggatcaattagaatctaaataacaataaaagaaaaatcatttacaaaaccaattagctacttaaaatgtacgtatttatgatcacacaaataataacatttattatagtggagagtgataattcaacaaaaagcagaaatcataatctccatgatccccacaataacgttcatacctctctttctttttttcttaaataaaacaatatcttttgatgagtctctccttcgtttgtatacaagtacttgtcgatccaattgaactgaagcccaagttaactaataattaacaaaagagtaattaagtaataaaaatgcatgtataaagcgcattattacttaattaattatttagattcataatcaataacagtctcaaaggcaccaaccaaagccttaactttgttctttctcttctccaaaagcttgcttgcagtctcttctattacatcattgtaagcttgagattccttcttcttcccctgtctcttcacaccttcagcctttgtcacttccttcactactagtacatcttcttcttcttcttcttcttccttgatcatcttatgatcatgatcaataatgtcaatgattttgttttcttcattattattataattatcatcaggttttgactcctgatcacctgcaataatatcatcatcttcatgatcagctaataatttgttttgattcatattctcttcaccatcttctgataataataataattgatcagtactctgatgatgatgctgatcaatattgttattatactcttcttcttgatcatcagtagtagtaccagtacttgtatcttctattccattattattattgttattgttaccaacagtatcagcttttacaaccagttcttctgagacagtggaaatatcacaaggtggagttatgagcttattaatttcatgatcatgattaatttcctcctcgtggtcgtgctcataattataatcgacaatatcagtactgacactgccaccatcatcttcatcatcatcatcacgacttatattactgttatcttctgatttgatcatgctcagctgatcattatcatcatgatcacctgctggtggagtagctttaatcatcaattcttgatcatgatcatcaaccttaacaactttagtagaagtagtagtcttgtaattagttggagctttttccttcctaacaaaactttctgtgctctttttggggttcttggcatacaatgtatgactactctgaggttttgtaggtctagtagtagtctttgatgatgatgatgatgatgatgagtgaagatagtttctggttttggatgatgagaaagatgaggagtttgagagaactgctctgtgtgaattattattaataggtgatggaggaggcttattatcaaaagaccttcttctgttgagggttggtttgttattgttattcttggggtactgtttattagttatggaattggaagtggggttagggagagagctctttgttggtttgagatagttagggacttgtttctgattaggagtactattattactagtatctgttgaagccattaaagaagatgaagctttttgagtagaattactgctattattatttgttctggtgttggaatttgtagaaagcagtgtcctcttcccaggcacatgattattactactatctcttttcacttttgtagttgccataataaaaaagatgtttaattatatgtatgtgatcactgaaacctgcatttatatttacatagagaagaacaaagaatgaaaatcattatgagaaaaacatatggtagttaattagttatacttactagacaagtgtttttttttttatcaacatgtaaattgttgattaagtaaaggatgattctattgaatattctatcagtaatttgtataagttgtgtatagtatttgagtatatatataacatattttgataaactagaagtcatttaacaattaaataattgtcatttaataaaaataaggatggaggtcaaagtaagcattgatatcaaacatgtgttaaagctgcaaaacgagcactactaatactatttatggtcaatttcaaccaccacttataaataaatggacattaatcattattaaatttggtgagtttgaaactttgaagaaaattcagtctaaattaatgatgcaattcatttaactgagtagtagattcatgattttacatcacctttcggtaacaacttcaatgcattcttattagattagatttaacatttttaatttaatttgattaacaattacatacataattatgataaaaaaaaacaattatactcaatagtcagtaagtattatcaaaaagaattgtaaatatgtacttgcttcttggtttatatttttcaagtttttcaaaatatacatatggtgccatcacgtgcacgcagggccggccctgaaacaaagtgggccataaggaaaaaaaaaatttttgggcccttatattaaaaaaaatgtgatatttttcaaaatcggtaaaaaaaatgtataattttaaaagaggaaaaaaaatttgggcccctgggctgggtgggccttaggcacaggcctagcccgcctatacccagggccgggcctgcgtgcacgtgacaattttataaggtaactccagcacggcatacaaatccaataatttcataccgtgttcgaattcgtgcctagtactctaatcctcactagtcacacattagagtttcacaattattccaacaccaacatgagttgttgctacagtaaaataatcaaaattttcatttcgaaactaaatttgatattattacaagtttagttagtaggtactagtgtacatagtgctcaacataatgtataacactatttgttttaaacattatatagttatgtattaggtaactgattgacaatatctgcaaacttgaaaaatatatattatatttgatattgtattccaataaataataacgtttaaagatgtaaattttttataatgataaatatattatatattttgtatctattaagtttattgaaaatattaatttatatgttttattctgccataataatattacaatatttttttttttttggaaaaaaactatatattattataccaaatttaatacaagtattatagctcataattttttttttattattaaagctttaaaatacattaatcacattttatgtagtaatccatttaagatgttttgagtaaaatcctacctaatagtaaatattattggataatgcttcagcagaagtattaaaaataactttacgtagaatatttttttttaatatgtgtcattattttattttatatccattaaatattatttctttatttatttttttacttaaaaacactatcattccctttgaaaaaaaattatcattcacttttctctttttctcctccctctttttctctaaaagttcttaaaagttacgaacctaaattattataaccaaaactaagaattttgaaattttctaaaataaaaatagaggttgagactcaaaaattctctaatagcgaagttaaagaacaatgcaaaaaaatattttgtacatctctcctctgagatcatattcaccaaaaaataattttttttgtgggtgagtattttgacaaataattataaaaaaaaaataaataaagaaataaaattaaatatgtacataaaatgaaataatgacacttatttaaagactctaacgtcatttttaatatttttattgaagcattatctaatattatttatatggaattgaaattttaattagaattagattttagactccattaaaactattcaacaatcatgctgttttagtttgatcttatttggtatgcatatgtacacatatcattattttattataattctcaaatataattagaaaaacataaataaaggaaaaagaaaagataaaaaggaaagagttggattatcttccatgggtctgggtgttaccatttataatgggccccaaacataccctttattgggctggatgttctttatgtctcctccttttaatctttattattaattgcactcaaaaatgcctttataaatttaattaataaagtatgtaaagagaaccccaaataaatgtcttctttacgaaaaaaaatgtaaatttttgttaggatgatatcatggaatttcaatggaacctttattattaatatatatatatgtgtgtgtgttaaatcatgagaacaaatgtcattgaatgctccactaatctaatagcatccaaaaaccagcaatgaaaatgatgattagaaggaaagtacttataaaaataatgaatggcatgaatattgataattggcacaatctgtcttgcattaagaattaatatgcatatttctatctctctctctacaattataataacacaatagaaacaaatgaagcaaaaacaccatacaaaacaatttttaaaataataataattaagaaaaagaaaagacagaaacacaagttatacgcatatgcatatgcattgtgcaaaagatcaatagagtagaattgtagggaaacatatatatatagatgagtaaattaatcaaaagaaaaagaaacgtaccttagttgatgaaatttccctcaagaaaagaagattatgtatggaatggcaagagtaaaaagtaagagagatcgaggaagaaaaaaaaaagagttgtggaagatgacaaatttatatgtgtatatatgaaggaaaataaagattgggaattaatgaatgaatattttgaaagacaaataaataataataataaggtttttcttggggggttattgtttttagtttaaaataataataataataataataataataataatgacgaattagagggatggataccgttattaacgcacaactcagaggttgtgggaagccatattcagttattcaataataagttaataccaaacatttgtttcattgaagaaagagacatttgaggagagttgtacgtttgttaatattgaccatttcaatccaattatatatatagattattatatgttattgttgtaataattaataatgttaatgtatatatgaatctgataccttaataatgtgttgttattttataatttggtagagtagtactcctttccttttattatgatgggaatattatgtatatatgttttccgatgatgttaaagatacatcatgtagttttagctgcaaattaattaagttatcaatctaatgatatagtagtcacatacagttacaacatcgaatccatttacaataatgaccttaaaattttataagtttataagtgcaaaaggttggtatctttgttgtataactttattattattaattaataagaatttaaatgtcaattaaaaaagttataacacaattactataaatttgttattaaattcggatgtgggggtaataacatcaaatggaaagtttcatactaaccaacaatttatcatgggtaaattaaatgttaaataacaagaagaaaaaattaaaagggtaaaaaaaaataagagaattaactcatgtactatttttattttttttttaaacgtacggtttggattgcttcagtaatttccatgtggactgttatacggattttagttgcaattaatttaagtttctctgttagttactataaaggtttttgcgtagaattccgtaaaaaagaaaaattattataaagtgtaaaaatagaaaaactaaaaaaaaaaatattatatcacgaaagaaagaaatattagattactctttaatatctgaaataaaaggctaattacttattatagacttgatatcttaaccaaattattgattttgatatgtgaccctctatttcatgctaacgattattgttattcacgttgtcctatagtctttatggaatatatttatataatagattagatatgcacatttttttttaattatttattgcaataatattgtcattcttaataacatcttatatgaaaaatattaatctcacacctataataactgttttatttgtcaagtactcaagtgcaacttttccttttttaatttgttttataagagagtttttatatcttaagagatatattataattaaatagatttaacttttattgactattcctttgcatctctttttgtcaaccctaattttttagaatatgatttattattagttaaagctattcgtgcatgcagctaggcataaaatgaatatgatcataaagattgtacatataacatatatatagggaccaaaatactatttgtaaagagatttgttatagttataagaaaatactagatcaatttatattttttttttcaaacttttgatagggccagccggccagggcaagcccccatctcccaaaacctagctccattatgtataaatattcgtatatataaatactacaataaataaataaataaataattagcgctataaattttaatgtctattttgcaaccaagatacgttataaatgataaaatgttaggttattaataaatgttcttgttcttgttttttgtagtttcaactttatttttaagacacattaacgtcagtttgaaaattgacgttacaacaacaattatcatccattataaattgatgtcgaaaacttatattctaattaacgatgttagtttttgaattgattgcgcttaggaatactgacacgaaaggtttttcttggtgtaaataaattagggtcggtaaatactattttggaccttgtgttttgtaaaagttactgattggatcatctgttttgttgaatgataaattggaccttgtatttaaatttctcaaaatgatacaaaatagtatcctaagctaattttttttatcaaaataaaacttgatactaatttcatctaaaggtgttataacaacaatatttatattttctgtatctgttcatcctgaaaaactaactggttataataagaaaaaattgacaaaaattgagctctagtaatattttatactatttctaaaaatatatatagggtctaatttgttatttaacaaaaaaataacctaatgtataacttttgtaaaatatagaattcaaaatgatattaacccattaaattattacttgatttttagaatattgttatatatgagacaccataaagacacattagtcattattattttttttttttaaaatcacacattattcattattgaagtaattcaataacggtatctatatattttaatttataatattatatgttactattggatatcgtaaagtataagcgcatgtttcgcactacaaaaaataattacttttagagataattttttagtcataatataaattttttgtgactaaatgtgatttttaatcacaacaaaaagatatttgtaactaaaacatgactacaagttgttactaatttagttttagtcacaacaagtattgt

SEQ ID NO: 16155 - DNA, 3011 bp, Cannabis sativa
tgtggaagaaactctcaatgtgatgacctcgcgattgaagatctatatggtgtcttgtatcgaaagtctatctgatattgaggcagtcatgtggcgtgtccagttgaaattacgacaatataagatggagatcggtgttaggaataggacctgtgtcgaaagtcttcctgacaaaggtgatggtcaggcggcgagttcctttggtgatagctgcggcataaggtagttttgctggaggggaggccacgagtatgtggtccttggtttgaggggaggattgttggggtatcaacccaagtcccacattggaagaataggcaagagttgtcttgaatataagtgttctacccactttattagtatgaggcctttcgggaaggtgctcaaaaataaaactgtgagagcttaagcccaaagcggacaatatcatactaatgtgggagtcaaagtgagatagtggcccaataaagtaaaagaacgggacccaacaaatgtacaatgagtaatatagtgtaaattaaatttaatgaacactcctagtgagaagaacatgttaaattaaaagagaaaattgcataagaatgataaactcaactaattatcatacatgtgtgactctcgttttttacaagtcgtattttttatctattgtaagggaggattattaataataaaaaaattattattaactagaaaaaatgaggtctaacatcatttgagaatatcatcctgttaatctaatctaatattatgcatattttaatttaataattatttagaaaaattattaagaacttgttgaatgagcattgttatgaaatatttgttgtccaacactatttgatgtgaaagattgttttttttttttcaatattgaattacttttattcatgtacaaaacaattaaaaattggaatttgatttcacccaaaaaggctctgaatgccatcaatgtgagaagccactatgtgggctaaactataagcaaagttattagatttttagagaggaaagaaggcaatagagacagaatattacaagactatcatcatatcaatctttctttcttaaagagatgaatacaatccaactctatgtgggaaagtctacttgatgcacaagatttatattatttaatattgagtaaataaaatatatgagattaaatagtaattgcatcttagtattttaaaatttttattagaattctaataaatattgttgaatatttgacacagagtttatattctatttgaagattaaattctattttcaaaaaataaaataaagattaatcactaaaatcacaccctaaaatagtagggtatataaaaaggctcaagtttgaagatacaatacaaagataaatgtcaaaatctcattgtctgctcatctgagtaggaaaatagaaaacttgatcattcatataatatttgtacaaaattgttacattttcttttactatttcttagtaaacttgctacagaaccaagttggaactaagttggcactacatttaatatcccatgaagatctaagacactgttgactctaatttttaagctttaatcttgttgactaaccagatatgagaggaggagaaggaatataatgatggagatccttttagcaatacttctacagggaaaatttagagttaagttcctcctacaaatatcttcttgtactccatgtgctcatatttattggtttacagtagaaagaatctgaggacaaagaatcacaaaaattgcttcattgtcaatcataaaaatttaagtaattataaagaaaatcaatgaagatggggctattagcctattaccttgtcagtaaaggcacaaaacatctctgattccatagctttatcaagttcctaaaagaaagtaaagatgttattagcatatttttttatcctaatgacaagaagtattccataattgtaatacatattactcaccttttcaggatctgaagagttatcaatatcacatatgagtttctgaatgttctcatctttcaaaacattgcaaatttcacttgatgaaactgcaaaacacaatgcaccaaaattttgtttacagttcttagcaaagcgtgcttcagatatatgtacatacatattatgactgtgaatgagtgaagctagttatgaaaccacacctaaagcctccagttgtaacctctccagcactttggttggctcggtaagtactaatggcctttctacacgcgattgaattagaaggccagcagctgatcatgtttatagaatgttaaaaaacccgatagttcaatacaaaacatattaaatccaacagaacagttgatcatgtttcttactttcctttagattttgctgagaagccactggcatagaacacgggatttctgccattgatatcagctcagtttagttattattatggaagttagaacagaaacctcaaaaattgataaggtgtctgattacaggacataataaagatacttcaatatatgaaaattaaaatccaaaaagaacagttgatcatgattcttactttccttttggttttgctgagaagccgctggcttagaacacggaatttctgccatcgttatcaactcagtttagttatgattatggatatgataataccaaaaagacaattacaagacttctattaataatcttatcagtggtaagtcctggatcagaaagctttctcttagttgacatttgacagacattaatatagaaacaatggaggttaatcaattagtcaacatgatacacattatagacctatattaatttattttactatttggaaattccatttagtccaattggtcaattttacaggctaagaaagagttatcaattaagattacagagtgagctgctaattagtattaaaaacaaataatgaaagtttacaatcttttctctctacccagcttggaatgacaagattattgtaagtttatcaatgagaaaaatgatcaaatcaattaacttgatgatt

SEQ ID NO: 16156 - DNA, 5980 bp, Cannabis sativa
tgtcatatttttagtttagcctggctaatgtttagcacgttttgtgtaaactttgatggtttttattaatcatatccttttcttgataaaaaaagtgagtattgctaattttttttattgatactatcagtgatacaaacataagttgaaccttatctaactgctattttatttattctctcctttttagagttgagtctattttcaatagcccttcacaacagattttgtgttaaacatatatatgccaattttgaaaaatgcaagacatcaagaataaaactgtaaaattactatttttttttttaacaataaaatcatttctaggtaatatttttaaaactgtaatatatatttaaccgttagttttagtatatgaatataactgtgtttcatgtgattagatctgaaaaaaatacgattaaattacataaatttgaacactactaccagccatacgtttaatgaagaaaaagcttcataattagattaacactttccgactaataatcactgaagtccacacagtattttatcatgtcagggtgaagtaaaacatctacaaccttcacaaataaaaaaataaaataatgaaggattatggagatgaaaaataataactctttctgagatgtgaggattgaattgagagaaagagaaagaataagagatgttagagattggggcagattctagggtttttgaggattgaacagttttatttgagggatgtgctctaaactatctgataaattcattctataaaaatgacagtctaactacaattgctttgccacaagtaacagcaaaaggaaaagagaaaaaaaaaacctaaatgcagccactttaacatccccgtcatttacttaacgaacccgacccaaatattcttgatgaatcccacatcactctcattacaccaattcttgtttcagcctcctcaaacgatacaccggtggatacagacgggtgtggaagcctcgtccctctcttaactttaagttccaatatgtctacaacacatgtccttagttcatctaagttctttccataccattttccatgaacctggaatacctttcctttggctatctcctctccagctgtgcccacgagaacaacatgttgaccttgttcgatctgaatggattctgtatgaccggcaacagctaacattggggaagcctcggatatctcacctgtattgctactccatgtcactacctgttgatctctagccacattgggttgggtagaagcatcttcggcaggagttccaggtgaggcactagaccttggtcccgggccaccttgcttctctgggaaagaattatcaacctctgatgatgcacgaacatccttgcctgtccgagcaagcctagcttttctgttgttcagcctgtaaatcatacaagtggaaaatgtagctttaaagttgaacaaaacttctaatatatctacaataatattcaaatttgtgatatgatacgacatcatacggttttctcaccaattttttagctgcgaacatgtaacttcagaaccctggaggacacaacacagaaactttttaggaaagaaagtgtgtaattcagaaacaaagaaaattttatttagatgaataaagtttgggttgcaacttgcaattgacatacatgataacttaatctatcacaccacaactgaattaaagatgccattcggtgcatatcaggagcatcttcaagagcattttcgatcatttccacctgtttatcattcattatagttcgcttccgttttctccgctgcttttcttcacgatgaacagttccaatctttttctcctctacatttcttccatgcccactttctttaataagaacaccaacttttggttcgttattatccattttatccacaacattttttcctctagtggagctagtatctgaaccacttgtttcaacattctgggcatctttatcaatttccgttatgcctccaaatgcactcatgctagatttacctttgtcttcccttactgtgtcaccctcttgtatatgttcgctgtatttatgttcgccatcttggtaagcagaattctctgacatttcctcctttaagttaccacttctgctaagtattggaggctctttcctcaataaaggtggagagcatacccctgcactctgagcctcctaagaggaaacaaactttacttagctcactcgattgaaaagataaccaaataccatcagaaaactcaaatttattcacgcgcaactgaaaaattactataatttaaataaacaattgcctattctaagaacatagaaatatataaaaaaaaaaaattaaaaattgaaaaccctgacaactggctagttttctaattaacagctgaatgtgaggataaatcacttcaaatctaacgtaaatttacattacaaggccacttctaattcgtctaacttaatataacccttaatgactaatatttagataatataaacactttatatattttttttaatatcatcgagtgaaaataaataaacctaacatcattcaacactcacctgattgtgctcacttagattaagttttgcaaatttatcccaagacattgactcctcacatttcctttcctgaattgatccagcataatgatttacagacatcaaacattgattgcgaaaaggacaaaagtaaatgtagaacatattttttcttttaaaataaaaacgaaaaatctacaggatgctagattttacttgaacttgattttcttcgttttcaggagaaataactgatgattgcagttggttataaaacaccctgcaacaagaattatcaattgccaaagtaagccatactgcataacccatgaagaaactaaaagatactatgaagtgatgaattttagcatgttcatgtcatatattacataaaatgcaaatgaaaacaaaatgaggcggcaaaaatgctatttgttacaaaattctcttacaagaatcaatctgtaagtagtctattatgcttctaaatcatgattgatccatagaacattttggcaacttagagtagcccacatgaaaaatggcatctactaactgaaactctagaattatttctagagtcatttataagcagagaacaatatagtaggtttaagattccaacagcagcagcatttccaatgcatgagaaagacttcttaggggtactctaaaatgttaaatttaggaggaaagattagaagcacacaaagcaacatcatagtatattacattagcttcacattgtgtattaacttaatctggggaaaaattaccccaaaccattgtgtgagtatagatgtcaggaaatcctaagaaaattgagcagaaaattctacccaaaaaatagtaaaggagaataaaatcacctcaagagctgtacatcctcatcgttcaaaaagttaggagtcaatgattctgcatgacttaacaaagaacctgcccataaaaagtgtaagaaaggaaacaaacaaatttctgtaaatttaaacaaaataatctgacagagataattacgcaaattcctgcacacagaagcagctttaggaatgtcagaagtataggaaaaacccgacaatgcattagatggatcaatttgcaagcactccatgaatttattaagaaaaaggttcctctcctgttctgtgaataaagttttaaactccaatcagtacatctagaaaaagtgtacactttagaatttgtaaaaataaaccaagtaaattttggcaaagagtcaaccttcacaaatgttgggaacaaaacaatggagatttgcaattactttgacaaataatgacgttctctgatgagcataagaagcctgaggcatactatttgatactatggttaattctaaacttgttggattttgtaggtcagtggatgaaagtacatctaaaacccatccagcagatgcaaatgaatcatattcaatagaaccatcttcttcctttagtgggagttctgaagaacaccaactggatagaaaatccccatgaggaagcgaaaatattgcagtcagcactttagtctggaggggcagagaaggcattgtcacaaatttcttcaaggcagatattcaagacaagtacatgatgcatgcaagctacatgcatgaaatttgtgcgatggatttaaagatacagactcagcaagttcaaagaccataaaaatcgaagttgaaaaagcagctttagcaaatacgtaaatagagttagaacatatgagtgataataattgcctacaaagtatattctgatataagatcgaaaatttgaatcatcagagaagacatcagctaggcgcattgcgttgagttgcaaaaatcccatcgggtaatttctgtcggcacatgtagaaagatgtctgggttctctacccagagctgccttcaatagctccagaacctataccagtaaaatggattcaatatcaagcattatttacaggaatggataaaagctagcagtgaatcgaccatgtcataatatatagtattgctgttttgttttatcatttgtggagtaagtagatgtagacataacataaatcagcttagtacaaagatctacaacattcactacaataataagggtcatcatgtatggaccaccagacatctaacctctgaagcgacagatttcgccaaatccaagctacctggtgtgctggcaacttcatccaggtaggaaatgctttcagcttcacacagagtcaccaactgcataaaagaagtcaagcctggattaatgtatattcttttgtccagagtacaaaaaagaacactcttgagccttcatacgaaataggtaaatagatcacaagactcacaattgatagcattctagctttcagcctagatacagcggcaacaactctgggaaactctataaaatgtgtagcatttaacttcaagattgcttgagccacaaacaaaacaccaccctttccacacaactcctgcattatttcgaagccaaattttaccttagcatgctttataaagtacaacaacttaatacctgaaaaaaaaagctataaggacaacagcatgcatgacatgtaccaaataacatattacctccaaaaaatgccaaaatcctccatcagggcatttttttttttttcatttttgaaacaaaactacaaatcaataatagagaaaagtacaagcagattaggaaaaaaaatcctaacaaaatcagaaggctcaaccaccttacaaaaaaaagtgagcatatgacattttttaatttactatcagggcaattttctatgatacaactaacaacaaatgtatgaaatggttcaacattgcattatatggggagttcaaaataaataatattttaccgacccaaatttagtttttagaaactttcattcctcacactaacagtatgacttcattttgcactgaaagctctcttgcatttacataaatacttaaatagaaataatagtggtaaggtacaaggaatttgctttcagaaataagtttgaccgaatcttaagaataaaaaatcctacttggataccttatttctgagaagtcgctctctaaatagcttttgctggcacagagactgaagaaactgtaatgaagcctcgcattgttggcaaagataattcactacttgttcagaagtcaagcttgaggtcgtacaagaaagagtattctgagatgatagcttgctctcaagaaacttaatggctgcacaaactgctccaaaagctgcatccataaatatgtcaacctgtcgcagataacaaaaccactgataagtgcatagatatgcatactagcaggggacaccaaaaaaagaatcagaaaggactgacaaagaataaaatacatatatatatatatgtactagatagatgttacgtgccacgtatgttaattttattttagtttttagttttttttaatatca

SEQ ID NO: 16157 - DNA, 4194 bp, Cannabis sativa
atttcattatattactattcacatcacaattacaattacgattcccattacattatattatatgaaagcaaacacacatattagcctctaaaggaaaggaaaacatagtaacctaataatcacatgcggacaagtacacggcttcaaatattgacggcagtatccaaatcctctctatctctagtttggtttaaggagaaaatataaaaaggtaatagaaaagatatattattatttgtaactgaaaatatagttttgggtatataacacctcggaaagaaaatttcaaaaatctcaaatagaaagagaaaaggaaaaaacaaagatctagttgtggtaggtcaaaccgatttctactctgcgtgtccgatctagcttttccttcttcctcaaaaaggatagggttttcctgaattttaggttttttaatcttccatatatcttctctaccttctcgcctttattctccctctcaaaggttttgcctctatctttctctgaactagggtttgaagcatttttattgcgtatcttccaaacgccgattatacatgtatatctccattctagtttatgggctttgagtacttttattttttttattaatgtttttttgtagtgcttgatttttttttttttacttttctgaattttttagttataagatttgtggtacttttgtgcatggttttgttttggtagttgaatgaataagattaaggttttgccgtaatgtgttaagatctttgattttatgagtttgtttgtgctttactgtttttctcccgctttctatattgattgattgcaatcttgtaatgttcaatcaggattcgaccgagtgaagctatcaagcataggaacaaggaaaatttcgtttgaagattcgatatttgcttttgggtgtttagtgcgttaggatttttctttgatattgttcgagcatattgttttggagaagaaggggaatttgcagtgatgagcacttcatgggcagattctgtagctaactctcaatctgagagtgcagttgctggttcatttgataacagtgccccctctcgtccttcaagatcatcatatgttccaccacatcttcgtaacagaccagcctcatccgatgcacctgctgtctcgaattctgctccattacaagccggcactggctatggtgtaccatctactgggtctcgctggaatggtggtcctcggcaggatgttgggcgccctggatatagttccggtggtggctggaacagcaatagaggcagaggggggtccgggtgggaccgtggaagggagcgtgaggtaaatccatttggaaccgaagatgatgcagcagaaccttcgtttaccgagcaagagaacacaggaatcaactttgatgcttatgaggatattccagtggagacaagtggggctaatgtgccaccacctgtgaatacttttgctgaaattgatttgggggatgcattaaataataatatccggaggtgcaagtatgtgaagccgactcctgttcagcggcatgcaattcccatttctctagctgggcgagacttaatggcgtgtgctcagaccgggtctggaaagactgctgcattttgtttcccaatcattagtggaattatgcgggagtctaatattcagaaacctcgtgggactcgtactgtttttcctcttgctcttattctctcccctacaagggagttatctagccaggtgggataccaaatatgtacttttagagaatttttctataagagacgtatttgtttcagtgtgtaatatacttgttattttcgttttgtcttccttgcagatacatgatgaagctaaaaagttttcatatcaaactggtgtgagggtggttgttgcttatggaggagcaccaataaatcaacaggttctgataacttcattttattcttctttgatgctattaattttgattggatataggataaatttgttattgtctgttattttcactagggagtttataccactgctttctttttccattactattttattgattcaagagttgataaaatggaattaaattccccattatgttatgataaaactggaatttcacactgattataattttttttattatatatatgggaacctcactgtagcttgatttgggtgactgatcaggcgatgcacctcttgttgttaattctgtttatttttccagttgcgagagcttgagaggggagttgatattcttgttgcaactcctggaagattggtagatttacttgagagagctagagtgtcacttcagatgatcaaatatttggctcttgacgaggcagatcggatgctagatatgggttttgaacctcagattagaaagattgtcgagcagatggacatgcctccacctggcatgcgtcaaacaatgctattcagtgctacatttcctaaagacatacaggtttgtctttgttttgttttagtattaaaatttatggtgttgagtactattaattcatctgtgtgactggatgatgtacttcatgtgctgttagcattcttgtatgctttttatgtttgaacaggtgttcacacactgagggtttgatcaaacacacattgatagtactactactatttgtacttctgacttgagcaattttaatcatctaactttacaatccttctactttgcttgttttgtagagaatggcatctgactttctttcaggttatatatttttggctgtcggaagagttggttcaagtactgatttaattgtacaaagagttgaatttgttcaagaagctgacaagagaagtcatctgatggaccttctccatgctcagaaggaaaatggaacccatggcaaggtaatttcagacagtttacatgtttaggtcataagatgcacagtgcttggaatttcttttgctgctaagtattagctttttatattgataattgtgccttgaatatgcagcaatcgttgacattagtttttgttgagacaaagaaaggagctgacgcattagaatattggttgactggctctgggtttcctgctacaagtattcatggggatagatctcaacaggttagttaaacttgttcctctcaaaaccaaacagttttctagttttccttggatgtgtttgtggtcatgtgtgcattgcttgataagtatagtttttagttgtttgctctgagagtataaatttcttaattttacttgacaactgtcttatttaggaaagagatagtgaatattattattgtgaaataccaacttaaaattttgctcgaggatgaatatcagtctgacatatcaaatttcaattttgtttaacttatgtaaaaagtttatggtgagtgagatcagcaacgttgatgattttcttttatggcgctagtataaacaacaatgagattggttaggttgtagtagatgacaatattaagattgttttttgtaggccatttggtgttttcagggacatttactgaaacaccttaaataagatttagggaagaattggattggtaacattgatttgatttgttttgaaagaatgggattttgggcaattgctacttgtactagagatcatttggtcggaacttggggtttttagtatttaacttgctgcaggaaaaaaaaaactcttagaaatggaagaaacacattttgaagatagccaattttcagaactagaaggatccatgaaagatccttacatttccttgtttcagatgaaaggaggatctggaaaaacttgatgaaatggaataagacgagtggatggaaccaaaaaaaaaaaaagaaaacagtatcattgttttgattagaaagtgggcagttgttagtgtgaatgcttttaacactacacaagattgcacataaaaggatgcttgttaagtttctaacacattttgatgtgctctccacccacaatgcttacagatgcttccacctaaagtataatatgaattattttatgtatcaaacttctgcaatagtggggttgactgcaatttttcacagtaaaactttatgtttaatagaagggtctctaaattagatttttgagttacattgctgggatttgatcccatgaccacctgcacacacaccccaatactctctatatggctacttgagctagcctcaagtggcgggtaaaactttatttaatcacatg

SEQ ID NO: 16158 - DNA, 7923 bp, Cannabis sativa
  modified_base (7675)..(7678): a, c, t, g, unknown or other
aacagtattaattaattctttttaagggaagtattaattaattttattgttttaatttatcctatatattttaagtaagaagaatgctaattacaacttcctattacaatctcttagtcaacttttacgtccgaaattacatgccgaaatattttttttttcaaattgattttaatagcggtattcgttatagttacagtatcatccctgtaaatttttgaaaaattccgaatagttcatagtaacgaaaacacaattcctcatattccagtttaccacgcgagtttaaaaaatttcaaacgtattttcggcactgtaaactattcatattttttcaaaattttacaggaatgatgttgtaagcataacgaacactcccgtgaaaaaaaattgaaaaaaaatattcctacatgtgtttttgagtgtggaaattaactaagagattgtaaattaacggtagcattcctctttaattagtacatatttgagctgatcatcatatgaaatattgtctaaagagaagaccaaacatgtatatctgaattacaagttaccactctcaggatataattaatgctactacatatgtgttcacccaaaaaaaacattgaagtgatgaccagaaaatagaaatttggacaaacaagtaagtataactcgaggaattcccagcaaaaaaagaaaaaacttaataacccattttttatcttaattcttgttaatttgagataaggtaaatgattcatctcaaaattaatttacaatgagagaaatagttcatttttatcttataatacataataatttattttcatatattaaactctaataattttatcaaaaaattgttgattcaaagccaaagagatggatctagattgcttatggtctttgtatacgtatgtgtcatgtgtattgtgcatgtgtatggtgatatattcatatagctatagtacatgtaataaataaatgacaatcataccgtataggcatatatttgatacctgaagtagataacatgtatagtaaaaataataaataacccacacacacaatccatagaaaaaaatgcataattttttcacagtttatgatctcttcaaatcattatgatacgatctgtactgtacatattcatcctccatgtgtctgcatctatctatctataattatatatatttattcaccccaattatatatatattcagaaagtgaaattaatcttaatgaaagcatgtacaccctgctcaactttcttcttataaaattggcacgcatgcggataaagggaaaggttgtaaaatttcttataattaaatagaaagatttattcttgctacacatcataaaataatacattcatacatgaactgtggtattcataagttaaaaatttaatgtggttcagaaagaacaagaataatattgcatatgcatgagtaaacttaggattaaaggatataacttcctttgaaacaactatacataaaaataaaagcttttctctaatttattggaaattaaatctcttttcctggctaagaatctgccctgttcatagcagaagtgtattattatgactaatctttcatacacaacttttttcttacaactatatatattatatataatattgaatgtgtgaaggttccattacattttaagtcattatcatgcattgatggtggcagtgtgttttcaatcgatcgatataattatttatatacataattacatatacatcttccttatttatatatatttataaaaatatattatgtttgtttgtattaaataaatttacaaaccaaatgttaaatgttatgataaagagctatctatgtctttttttgaataaagattcttctaacctatagacagcgatagtttcctctacttacgtgcgtacaattctacttgaaaaatgataagcagggccggtctgtttaaacctctgattactaacctatgtatatgtctggtaacataattctcgaagcttaattaatttatataatcgacttattcaattagaaaggaacgtgaaaatgaaagtcttatagctatgagaaagttcttatgtgaatctaattagtcattcttccattcagcataatttgctttactttcttatatgatttgtatataaatatcgtaatttatcgtgtgtttatgtaaatatgcaacaacatataaatatttatatgatacataaatattttttatctaatgatagaatgctcttcatgaagtacatattattatgcctatagatatgatgcaagtctaccctctttatagaacacacacaattaaagatcactttctcaaagcataatccccatttctttcaagtataccaagacatataatacaaaatatatattatctctatacatattttgtaccaaaataatatttacatccgacaatatcctgcaactcacatcaaattttttattaattagctatattgtttactacttaaatgcaacaaacattaatagtaccttcttttgtctgtaaatgtaatgattattcgtaattgttacatttcatgccaaataaacaaacttattaattaatttatttatttatttttgatgaaaaagctaagcagtattgctcaatcaaaaaacaatccaatttacaatcagaccacagagaaggccccagtcccaaccaatacaaaaaacccttgttagctatttgccattgtctaggcaaatatgcaaaagccaatctctatcaactactgctgttttacgaggcatagttccagctattctaattttacaatcagtttgaataatttgtacagtaacaaatttatttaatacgtcttattaattagtgaatagaatgttatttcaataaatatttatcttgttttacatcccactaattattaattttacatggtatatatataactggaaattggtttgtatttcaatttaggtttattcgtaaatgcctgatagttatgttggaattttaatgctttgatgtcagtggacttttgaaatcatgcatatatatggttcagaagtggatggtggatcactcaagtgtccattcaagagtcatctcttaaaaagataaattaataaggtcatcagttcactaaaacataaggttgctagtctaagcacacacagaatcgtcattcagaagtggccctttagcttttaggagaataattaatcatatacatgtaaatatcagtatatttattaagagaaaattcaaaatgaaataactatttgcctgtaaaagtaccccaaaagcattaaaaaaaaaatcagcctttaaagtattgtatgatattaataaactacttataggaagagccaaggatcaatatatagttgatttaattttttaccttcacaacaatatctatatcagaagttaaattatgactagctagtataaataagagaacactgatgatttgaatcattaattgtagttcacaagtagaaaattggtcataaaaatatccagaaaccatatagctagctagctgaataagcctagcctcccgtataaatattacatacgcaaaacacaaattaagaaaatgaaatatgtgcacaacataatatagtttgtcaaataatattctgcagttcatgacataccataatcatcatcaagagagagcaagtaattagcatagctggttgttgttgttggatgcctccctcccatgcttagctaaagaattgaaagtcttgaaactgatgctgtgtgaaatcaatatatattaaagtacaacatataattagtattatgttactatatatatatcttgcattaattagttaaaataattaatacatgcatgtacttaatcaataatataattaaatttagtaagtttgtacctcagattattactctatcaagatctaattaaacaaaacgatgaaactagctatagctaagtgttgtgaaacttacttcttgggggattgatccggtggattcagaagtagcagtggtctgcaaataattgaatatgggagatgagctccaatagcactttcccacatttaagaaagaacactcgtccgctaaattaggtagtgcagctggagtacaagtattgcggtattgttcttggtggccattatggtgccaagtcgttaatggttcctcaaattcatgataattagcttgtagtactaaaccttcgaaggagttaatattttggccactatgggttccagattcttcttccccagtttccaaactccatgacgtcctcaatccatggcttattaggtcttggttgttaccatgttggcaatgatggtcaacaacagcagctaacagtgcccttttaccccgcatgtgcttttgtttagtcctttctcttgccctctccctcgccttgtccctcgattccctcggcagcttcaatccccatcttggtctggatactatctgtctcttcttcgtctctttattaaccaaagatttagaggtatctccatgatcaactactgcaacctcgtccaagccggaaaccacttcgcagtctgagttagtccctgaattagtactagaatttgcgatcttctctaaacccgcagcaagagtagtagtagtgctcgttttcctggccagtttttttatctccagtctagcctggatgagaagccactcgacggtcttgctagccctctcgtaccccaacatgtcttgcaagtcaaagaactgacgagcaacatctagggataatctcattcttctgtgccttggtcgtttccctgcgctcatcataattttgctgtgccgatctttcttggccgtcatctttttcctcgggatcagtttttgctgatcaccatcattattatcatcatcatcaccatcaccatcaccatcaccatcaccatcgtatctggcgatgtgatttttcctcaattctgagagatcttccttctggtgattgtggtagtggtgcaggtcgttggtgagattcatgggatcttcattattattgttgttaggctcggctgacacccctacatgggcggctttgtctgtactactagtacttaagatattagtagtagtggtggtagtagtagtagtattgttcaagtgaggaagaagaaggaggccgtcatagttgttttggttattgtggaggaataggttttcatcttcaaacaaaggagaagatgggaagtagaaaaatggttgtttggaattgggggtacttgtgtttgtgttaacaacaatatcgctaagtaaacaaggcttagaagtgttaggaataagagactggtcatgagaaaaagagatggggtcattcccaatattccaagtgtttgatggaaacatttctatataaatataaaaatataaatttatgtatacttttctggggtgtcttcaaattgcaccggacaatattctagctacaggaagatcgaagcgatgtaatagggtactcgtcgaagtagctagatgatgatgttcatgatcagtggtgtgggagatttagcagcattgtatgtggtaagggccacttgaaccatctttgtcaattgatcattatttttctagtttaatttcttctttatctctgcaaaatgaaaaatcaaaaagatcaggacaatgagaaagacagccatgtgttatagtgtctgtgtgtatgttttactgtttttgtgtttggtacgcagccttgagaaagacagctgcccgcagatgaagatatatatatatatatatatatatgtgatctgtacgcgtatatatatatattgatagatatgcatgagtataaatgtatgtatattaacatctctaataattggtgcgtgagagagggaaaaagaggtatatgtgtttagaagagttttggttagtaaattatttacctcataaatgaaggtcaagaggtagataaacgaaggaatgaagtataaactcaggtggtagtcaccatataatgccctggtgttgaagctaggatgaagaagaaacacacttttatagtatggatatatatatatattaaaataataataataataaggtaagtgtctgaggagagaaaaataggtaaagctagtgaaagctggtggagagagatttattgcggacaaagagctatcttttcttaaacttttttcaaaaagttaatgggtcgtcgtgtgagactaaggaccgatattgtgggaagtgagtggataagaaaaaccacatagtatttgtgttgtatgccacttcacgtgataatcagatgggttctttgacgaataaatattttaattattatttttgtaaggaaaaaattactactatacaatactacactacaccccttgagctgagctgagctgagagtttttgttttctttcccacatgccccacagatttcaagaaaagtagacatcagtaataactactcttctctctctctctctctctctcttaataaacactcccaaatagtactgctcagctcatcacccaagagccttttgtttccatgggcactaattgcatctattaattctcaccattcattcatttacatacatcccataaacacatcttccagacagaagacaaagagttcgtgcgtcagggcatgcaggtaaacatctttcaggtctttgatttgcttaattgtgtgatacttcttatacaaatgtttgctatttatgtgtatatataaattaaatgtgttgtttatatacgtatagcgttggtatatatatgttggtgttacatttagtatgagaaagatgtggaggatgattattagaaaatcatctttttaagaaatgaatgacattttaaggtggtgtatggtattattccttaaatcccaactaagactcgaattaattagttggttgttctttaactaactcaattgtcaaatatgacagttagtatactaagttaattgacttatataaagagtactattcatcttatttcaacagacaaaaacaagaaggcttaagtaaaagaagttacaatgagaaagtaagagagatgactgagagggagagaatgagttgggattgagaaattgtattgagcaacattgtcgattatgttggctcgggttagtgagttaatgagtgttgagggattacaccatggatgactcattgtgattattttcttgtagctcctcatatttacatttttaattttctccattaataaagattagttgcagtgctttcaaactggagtatgaccaagttcacattgaacttaggattggaaaagtatagttctcgtgtgttgtgtctggaagctatctagattcatctctatgtttatgtttcttgtttgatatgtttttgctgatttggttcttgatttgtttgttttgattttacttttgtttgtttaagtgtgatcttgaatctggaattacaaagattatttcctacgtatcagagctaaaattcctacaaatcagagttgggttcttcgatcgtcaagggagattcaaagatcacttgtttctgcacaaagaactcattaagaatttaccaagggattctacaaaaacacagattgaaggaggatgtcaatggctaggttcaaactagaaaagttcgatggctcaacaaatttcgtactatggcgagaaagtttgaagggtatacttgtgcaccaaannnnggcaaaggtacttggagatgaaaagttactggctgagaagaagccagaggaaattgcagaaatggaggagatgacatactacaccatcatgtcaaataaagttagaagaaagttaattaatccaagaaagaccaaaggattgtggaacaaactagtgtcgatgtacatggcaccatcaacctcgaacaaattaatcttcttgaaagattatacaagtttagaatgaactcttctctttctttaga

SEQ ID NO: 16159 - DNA, 5701 bp, Cannabis sativa
taataataatataccttagaagggagttgaggaagcaaagcatgaagattagcaaacatgttcctcatcttcttcctcctctctctctccgtccaaatatgtatttcatggtcggaatcaccgccaccgccaccgccactgccaccgccacggttgccttcattcttgatcatcacaccagctggttgatcatcatcctcagtagtagtcgtactactcatgatccttttccctttcttattacaaacacctacattacaaccacctcgatttctcttattattattaactaacccgaatccattcggttcgggggccacaccttgctggaggccgccaccgccatcagagtttgaggctgtggcggccgcagccatcttgttattttgttcagcggattcattgcctgcgtcggcggcaggcaatgaatagttttctaagttggagaaggggtttggtaatagccatggattgttttcatcccactggaagaaagtactgctctgatcagtacccattagtagtactgataattctccttgggacatatatatatatatatatataataaatctatggctatggtgattttgagagagaaaaagagagagagagagacagatttagatgatgagaataagaagaaaggaaggcgtttataaaggtggtgaagaagaaagattatgatgaaaaagggttagggcttaggtgtggtgtggcaaaatgggagataggatattatatatatatataatatataatatatatatgtatagattcaagccaaaatacaatcataagaggatgccgttacttgcttgggctatcttccaaacaaaaaacggatgccctaataattatatcaattcaaggtgggacccatctattgtgacctgacgtcaccacttgtccctcattcctcttcctcctctttcttcaacttcatcctcttttgtaaaaatagttatcaaaaaacatttactacaaagcaacaaaatttatgattaaatgtaaaaaagtataattaattataaattaacattcttacgttgtgactaaaagtttgtgactaaaagtattagtcaaaaaattaaaatttattgtgactaaatgtgtttttaatcacaatatatacttgttataactaaaactaaattaatgataacttgtgtctaaatactaagttttagttataagtaattttttgttgtgattaaaaattacatttagtcacaaaaaatttatgttatgattactaaaaataaattctcattaaaaatagctatttttaatagtgattgttattgagcaataataatacctaacacttttaaatatatcgccttaacattgactagtgttactctctaaaaattttcatatgacataccatttctcattataaaacttttttttataataacttgtatggtcacagaaataattataaattacactgtgtgattataaacgagtattatgtgcgaccatcaattaagtgggattattttgtaaattttaatattttacattgttagttttgcaaatttcactcttcacatatgtacctttatacccttgttgtgaatggaacgctaccccatattctcccatcgccaatctatgctgctaatatcatataccaattgaaagaagataattaaaggttcataattaattaagtttaattttctcaattgtgtatgctatgtacgtataaccctaattgaaaataaagcaaatgccgcgttgtttaaccttatctgctcgttaatttcaatgtaatgatcaaacttgtttgtaacttgccctttacaaaattatatgtatacgttctgttatatttatatatataaattaatatctttcaaaatacacactagttacgttacatttatatgtaatgattaagtgtcagagaatagtactgtatttgttataactaatatatatgtatattttgttgattagtgttactttttattcaacttcatacgtacagttatcttctatatatgctttttttccttttatgttttaaaggataagtaattaaataaataaattccttgtctgagaatatatatctaccccaaataactgcctttttaatatgtaataaatgaaagttttatttttattagaaatgaaagccttttttatggaatgtatgtatatatatatatatatgttgcgtattttgacaagtcttgtataaaataaaacctctataataaattgttcaattatacagtcaaacaattctaaatgactaaattaagcatcgttaatttacaaaattaaaagtttcctatgattataccatttatggtagttgtattctaagtgactagtaaaactagctagaaggttagtatataatttctagttttaaattttaatattagcattaaatttgtatttttaatataaaaaaaattaaagatataacagtgtagtctactgttttttttatatatatataaaaaaattaaattaattatattattaaaattataattattgattattatctcataaatttagtgtaatagattattaaaagaaattattagctgttcaaaataaaatatttttattagtcttttttacaattgaaattctttgcaatatgaatagggtttctctctattctttctagggttttctttagaattcttagctgccacctgatttttttgcctgactagggctcaccaagtgtttctcgaccttacggcgtagtctggtctggtcttgttgatgtatggggagcatctcatgattcatccaacaaaaattacaaatattatattatttttattgatgacgtactttagcagatttttcctatgacagtgaagtctcaagcctttgaactctttattcaattcaaaatcttagttgaaaaatagtttaatttgcctattaaacgggtacaggctgaatgtggggtgaatttaaagtttttgacaggtttcttaaagaccaaggcatctagtttcaacaatattcttgtccccacactcatgaacggaatgggagggttgaaaggaaacataggcacatcacagaaataggcttaactcttcttgctcaatctggcctagatatgacctattggtggcatgctttccaatgtgccacacacactataaatagaatgcctacaccggtactcaactatcttagtccctttgaatgtctgtctcaataagtccctgattatggaaatttaaaggcttttggttgtgcttgctttcctcacttgaggccctaaaataatcacaagcttgacttcaagtctgaggaatgtatcttcttaggctactctcctaatcacaaaggctatctatgtgagaacaatgcctgagagaatcttcatagctctaaatgttgtgttcaatgagcatgtctatcctgctctttgagttatttcttcatcttaggtaccatctacacctttatttgtgcctactgctcaattttccacaaattttccatctattgatactaaccaattgttcactgttgtccctaatgcacctactacccctaatgttcctgatattcctgacattggttcatccgcaaatacctctaaagcctcttgttgagcctcctggtgatgagcatcactctcgtttgatgttgttaataactctggggactctccttcaagacagtctgtctcctctaatggttctccactaccttatcctatggctgaggaagttgtgtctcacttcaactcccctccaatagcatcaacatctcaagctcctcttgtgcaggctgttgttgttcctgatccatctatagcaacttctgatgcatccattgagaccaatgttgtcccgcatgcaccattgaaaactcactctatggtcacaagatatcaaagaggcatttataaaccaaaagcctacttggctaccaagcatccattgcttgagtcattgcttacaacagagccaaagtctctcaaagctgctcttaaacatccaagctcgtttgcctctatgaacaaggaatttagagctctcatttcacaaggcacctggacacttattccttatgaaccacacatgcatctcatagggaataattgggttcagtgttcgattggtatggaccttagccatttcatttcagtgggaaattaggtaacttgatgttacaaatgtagttcttaatgggacattacaagagacaatttatatgtttcaaccccaaggttttgaggacccctgtaaacctacttatgtctgcaagcttcataaagctttgtatggcctgaaacagtctccacgagcaaggaataacaaactcaagtctaccttatttgattggggatttattgcatctaaggcagacacctccttgtttatgtgtggcactggttctaatttgatcattctcttggtgtatgtcgatgatattcttatcacaggccccaatgctcatctcattcaaaacctcatcaatgatctcaactctaccttctctctcaaagaccttggctaggtacattacttcctaggtgttgagatttatagaaccagtgaaggactttacttgtctcagacaaagtatatcacaaattttttaacaagagtgaatatggaaggtgccaagagttgtgcaaatcctacttctactgcacataaactatcccttactaaaggttctccttttaaagatgtcacactttatagaaacacattgggtgcgcttcagtatttgactctcactagacccgatgtagcctatatcatcaacaaactatctcaattcattcatgctccaacacatattcagtgggaagccagcaaaagactccttcaatttttgaaaggcaccattttagatggctttcttctcaaaccagttgacagcatgactattgcagcatactttaatgcaggctgggcaagctgcatcgatgacagaagatctactggtgactatcccattttctttgggtccaatttaatctcttggtatgttaagaagcaacagtttattgctagatcctccacaaaatctgaattttgtgtcttagccaatactcttactaaaattaagtggctttgctccctgctcactgagttacaggttcaattgattactgctccaataatttgggtagataatcaaggtgcagcatccttagctgtgaattccatctttcatgctcgatgcaaacacatcgaaattgatcaacattttgtttgtgaccaaaaatactgaacaaagagctcgatatgcgatatgttcccactcaagaccaagttacagatatctttaccaagggtctttccaaagaacggttcaagtatctttgcagcaaactcaaagtggtgtccaccccttttgtttgaggggggatgatatccacagttagtttagactagttagttggagttagttttcactttgttagttgtatctcttttctaactaattctgttacacctattgtaattgtctgaactaaattgtctataaataaagtgggaaagcctccattggaggtaacgttttctgccttagcttatggctttcgtgtttgtgacagtcagtagtcccgtgatccgtaaggaaaaatactgggtaagctgtgcaatcccacatcgcctaaataaggtcaagtgggatgatctgagactgtgtaagtatgagactacacagttgaaga

SEQ ID NO: 16160 - DNA, 6408 bp, Cannabis sativa
ttgtttttcaaaaataaattttttgaaaacaaaattttgctttcattttgtgattaaaaaattaaaaaacaaaagtgttacaaaatgacaccttagttaataccttcttttgtattatatgatttgtattattattagaggagtgttaattacaacctcatattacaacctcttagtcaactttcacgcccaaaatcacatgccaatttttttcttaacggtatttgttattgttacaatattattcttgtaaatttttaaaaattcttaataatttactataccaaaaatataatttctgatattatagtttgctatgcgtgtttagaaaacttcaaacctaattttggcactgtaaactattcaaaatctttcaaaaatttacaaaaatgatgttgtgagtataacgaatatcgctataaaaaaatattttgatatgtattttcgggcacgaaaattgacgaggttgtaataaaaggttgacagtaacactcatcttattattattaaattttatatttacttttgcattattatttttatttattttttaataaaatattaagtgatcatggcatattaaattttacattaaaatttataattatatattgtagtacaataataaaagttaatgtaaaatcaccacaaaattacttcttgtgttaaataatactattacatcttccatcgtacataatctaaatagtgttaaactaaaccactagtaaaaattaaaaggtgtaaaaccatacaacaacaaatacaaaaataatatatgcactaaaatattatacttaataatataacaatattattttaaaattttgagttacattttgataatatataattatttcaaaaatactatcaagttactaggtatagtatattagtgcatattttgtgtgcaccaatcattagactaacaaaggaaaaaaaagaaaagtgcaaatctattcattgttattgtttaattatataatataggttttattggtttctgacaaaattgactttagattttctaagaatgttgggtaccttttagatttggtccattgtttatgattattttttattctatagtagtataatataataatgtctctgttgcttttatcactgaaagacaagatattggttatattttatgaactgaattgttttatttcaagtatttttactaatttagtagtttctattctttgaaaagtccaaagtccaaaccacacttttgattatttacaattaatttgggtattatttgacaatcaaatcaattagttgatgtgcttttgtgttattagtacaaacaaactcaaaattaatttacactctctgtctatctagtattttctattacattaagatgtaatcaacaccaaatataatattatatgttatataaattatatattttagagtaatgataaacacatttattatgtacaataatgtgtattaaatatttattatttattaattatctgatttagattaattatacatcaattagtgtgtattgtttaagtgtatcttaatacgatttaatattttaatacaatgtaatacaacgtactaaataaacacaaaaattttaaatttatttatacagttatattattagtttcattaagataagaattagtatagtggtaactaagttgcttcattagttcattctaatcactatattaatccttatcttaatgaaattaatatggtaaattacaaataagaatgtcaaaattatattttcttagttttatatatgtaaaagtttgatgcacataaagtggtccatgttcttatatatagaataatatttttacatttaatctatgtgagacattatagatatcaaaatcaattggtgataagtagagtagtccatattcttatatagtgtttaatacttttacatttaatccataaaagacaatgttcttcaatatacataatttttttttctgataaattttattacaccaaagttaatatttatctaattattaacattttattatagagttaaaaggttgatagttattaagtgtaatataaaatgtagtaagaaatattatatgattcattttagcttagtacacttaattataaaatccttaaataaaatatgattgtttatacatagtagtgtaaaactgtaaattatgtgtgtttgaggcaaagtgttagaacaagaaaaaagacagagttggaattgagagggcagttttatttttggatttctttcctcatttatgaattttgagagaatactatttattattggttctaaaaccaggtgggttttttgtcagtttattttgtgttgtaatgatgtatatatatatgtagtatattaaatgattgtttatggaaagggtaaacgagataaacatgaaaaaggttggcagaggagtttttcctttcttggtcagcactgaaaaaaaatcaaacacctgggagagtgagtgagtaaacaaccgggaaaacgaaaaaaggcaaaaccctttttgaactagtatataaaggggtggtctgttcattggaaaagccactcaaatttcaatccattttgtagctatgtcttctttgtctcaagaagttctcaagcacaatctaaccgatgttggcaggagactccttacaatttctggctccataactgaccttctcaaccttattgaagtaatgtcattccttttcattttgtttttcttcttttttgttgtttcttttgcttaaagattatatcttttttaatgggttttgtttgttttcatgttttcattagcagagagacttgaaattggtgctctcacacctttttttttgttcttactgttacatgggttttgttcccccccatttgttgttgttttttttttcaaatgctcttgtattctttgatttcctttggattgtccttaaattgatcatcaggatgtattgttgatattgtgtttgtttgatctaaaatctagaagaaatactcattgttctgtttattttgttttgtgtttgatatagattttgaagaatgcttttgcttgtatgtgaatccattacacctctgttttcatggtggtcaatattttacaatcaatttactttgggtgatttcagatttgtttttgaattattcaaatgatttgttcacgagtagggagttttactctcactcataagggtattttagattgacttatgtttggtttacaaagaggaataaggtatgacttgtgtatttgatttgagcaaaagtatgtttatatgtttttgatttatacaattgagattgccaaccatgttagaatatgggttgattcttaatgatttgaaaaactaattacaaatttaaatgtggtagacacatatgaagtttggaattgagatgtgatgtgattaatttttcagcttgtattttggtgtctagtattgtcttccttttagagtcatatgaacacaaagtcttcctaacacataacatttcatttttgttttgtagagagccgagaatttgttgtcgaacgtggaacaaacagagttggtatctctagaagttgtgatttcaccagcattgacagctttgatttctgatgagcttttcaagcactctgatacggatgtcaaactctcagttctaacttgcatcactgagattataaggataactgcaccggatcctccttataaggatgaacaaatgaaggtagtccttccgaatcaaaattgaaagagtattattaaagtttcaatctttatgagatctgttttgtttatatggttttacaacagaagcttatctatattatttgttttacaggagattttcaaatcaactgttgtagcttttgaatatttgtccctagaatcaggccgtcgctttaccaaggctatgcacatcttggatgttgtttgtaagatcaggtcatgcttgttgatgatggatcttggatgtgatgcattagtttatgagatgtttcgaattttctttgaacaaattaggtaaaagctttaatctttgatgcttaacgatttgagtgtagagttgaacactaatctatttgtaggttgtcctggaattgaaattgagatagatggtttgtttttatcttttcatctagggaatggtaatgattgaaaatgttagtaaattcttgatgagtacttatcaagtatgaatcttctaagtgtggagaatgttggttttcttgattttaacatattttttttgtaaatattcaattaattgatgacatgtttctgctaaatgttaaggtccaaccatccaccatctatattttcatctatggaacaaataatgacattggttttagaagaaagtgaagacattccatctgatattttcactcttcttctatctagtgttaacaagaaaaaacaggtaataaaacatgtttaagttttatgttttgcttcatgttgtgttcttttataatttgagaaacctgacctgttccttgtttcagaacatatcatctgcttgtttgaaactgggagagacggttttcactatgtgtgcttctaagctcaaaccgtacatcaaaacagctgtgacgtcgatgaagattgatgtgaatgattatgctccaatagtggctacattatgccccaaaactaacaaccataaggctgctaaggaaacagaaaaaacttcggtgtgtacatttgtttttcgcctcaagatttattatagaattgccaatttccttgtcatcactgttttgtttttcccactgaaatcttgtgttacaaattttatgtttgtttgcagcagggggccaatggtgggaatgctgaccaaaaaggtgattctttaagagcactaatgcctcctccaagatggccaacttctgataacaatggaaagcacaattcttgcaaagaattacatactgaaagagctgctgattcaagtgatgttgctgaaccaagctcaattctgaacaagagtgctgaggagccatcaaattctttgatgagtgctgtggaaggcaattccaaaggagctgattcaagtggtaccgctgaacatgaaagtgagccggtgcaaacttctcggaagaatccaaaagacattgctaaaggaaaagagccagtctcagttgaggaagacacagacactgctcccaaaaagagaggccagaagtcaaatacttcgatggatgcagaagaagccccgggagaaagagaagattcaagagatacttcaagggaagagaagaaggaaactgattttgtaatgaagtcaactaaggcagcaaaatctgaaaatgagccaacttctgctaccaaaaagcgaggacagtcatcgaattcttcttcgatgaaaccagaggaaggcgatgatcatgctgggaggtcatctcgtctaagaaacactgataatgggaagggtaatgtgacagagctagcacctcaactcgataagagtaaaaggaaaaatgtagctcaatatcaaagaagccgcggaaagggaaaaatgagtacattgaatcaggaagctgataccaagtcccaaacagatatcaaagagaaggctaaagtaattgtcaatctcaatttgaatgagaaacccgaggatactggcagcgtagaagagaatgatcaggagaactcaactaagcttgagcttgctgctgcttctgaaggccctggccagcctcccgaggaaaaacaacaagagcagtctactgtgaagtctgaggatgtcaatgtcaatgataacctatcagctctaaggactactaggaaaaggagaagggctgtgcattattccaataatgacactaatgaaggatctcttcataaggtaccaccatatttccttttacggtaatgataattactagtttacaaataaagttttatttacaaaatactattttgtagggctggggctctaggactggaactaagttttctagttcttctaaaacaactttcaagaaggaacatgtcattggaaaggaggaggtatgatataaattaacttgtgtctctagctagaaaatatgtgatgtctcagtcattctttgtatgttatcttgtttattttggctctttatgagaacttgtttcaagatttatatattattgtttcatttgttttcttattcaggcttccgaaatgcctaatctaggcgaactgcttatcggaacaaagattaaggtttggtggcccctagataaagagtgagtatttctgacttgttctgattctgtaatatattgaaaaaattgcaggagaatttagtaattatgtgggatttgttttgtaatctttttctccaggttttatgaaggcattgttaaatcttatgaccctgttaaaaagaagcatcaggtgaattcatattaatctctagtttactaaaa

SEQ ID NO: 16161 - DNA, 6741 bp, Cannabis sativa
catttaccaattcatttatgatcaataaattctaacagtggattaaagagcacagcatctaagttgagggttagacactgaatacctaaaaaaatttaacagatctgtatcttctagaaaggaatcttctatagaaatgttaagactgatattattttggaagtttcacatattgttcgacatccataatatagaaagctgcatccgtttgaatgtgttcaaaagacaggcttggaaatgtctaggaacgaaaataataaacaaatacattgaaaaagttcaaaagttagtccacattttatcttatgcgtctattcataatgcttaaatcacaacttgagatggagatatgaagctttaagtttaaaggttggctacataagttttcattttaatcaaaatgtattggaattattcttgtgcaaggctttgtttgaaacaataattttttgaaggaaaaagattacgaagcataatattttcctaaaattttaattgtaagcttttctcttttctaatctatttgtaaaagatatcattactgtaaattacattaaattaaactcactcttcctaaaccaacaagatatctatttgtctcatttcttttttcgtttgaatccaaacaagagaaagttgaataacttggatgttattttatttctctctttcaaatcaaagttctaaatagaggctgaattcctcctattccggtttctagaataaaacggtgcggtttcatgtgcctggagcagtgacgctaatgcaaaacatagagacaataatattatagaaactcgtaagaaataagtaccgtatgaacatgttggaatgttgacaccaacagcagcaagtatttcttttatttcactctcaactgttagtaggattgcctgtggacttggccaatctattccattcattggaactgatttccatataccacgagtaatttctgcagagaagtaactgataatagtggcaagagatgcaggcagaaagtcaacaaggtccctcagacctgcagacattcatgaagtcatgaattaatatattgaatcattgataaggaacagaaacaccagtaaagcaggcatccaactaacctattgtcaagttacgagaagaaagccttccatgggcacaagcagttaaaattgcctcaagaacataaggaatggcctctaatacctcccaagcaggaagcatgggcctctgcaatgtatcttctccagtacttgcaggggagccactgctagatgatccagttatagtcattttggaatataccatgtttaagatcttattagaaacttcatgaacagggctttcactagaaaggcccgaaagtgttgaagctacacatgatttgttttgacaataccaagatcgtaatttgggataggaatcaatgtaaattgccttatcagagatgcatccaatatgatccggattgctgtttgtttcatactggaaagatgcattgcggctattacgcaataacaaaagatactccagagtaagctcacctctaaatgctcttgcatgctctgttatacactgctcaatagggggtttatagaatttccacaaacgtagaagaaagagaaatgctagagaaaatatcatataaacattgggctcatcgcccttgcttgacttgtttcttgatgtaggttcgagtgatccaaaaacctcacagagtggtactaaagaagcagcaatttcagggacctgtagggtacaaaaaaaatgaatccattagaatgcccaagagttcaatccttgacatgctaatttaaaagcacaatttaatatgatttgtatcacaaatgctcacaggcatagcctagtcatactatacttcttctcacaaaaaggagttcccacgtttgaatccccctttcccaagtgtcaacagtatgatttatatcatacatggccttaatgaagaacttgagttccagaaacatacgcaccaaaagatagaaagccacagtgcggatttaaaaagcagagactaatggacctaattgtagacttattctccacaggaaaacaaaatattttgggggccaacataatgaccaagattacatttcttaccacaccatgcaaagaaagtatgtgaacagtatcgatcaaggaagcctctttaaggattccatatagcatcgacatatgatcaaccaggtgacttcttggcccactattaagaggtgttggaggagaaaggagcttgacaacaaagcgcacaacatgttcctgccaaaaagtgacaatcttttttgtttagaaaaacctcaatttgcttattacagctttttaaagaggggttggaaaagttggaattcttttccaacatacatagcatcaaccatgatggctttcataaaactatcagctgctgaataaagaacgtgcaacatccaaaaatagcgacttcagcattgagtaatacacatactacagctagtgatgcattctattagacaaatattcaggtagaaaatattatttcaagagttgactatggttttggaccatgaaatataagtgtgaacataccaataatgtgcacaactaagaaattcttatgacaatttctgcagtgccaacgatatttgcattgggaaatgatgaaaaatcggatttcaagaatctataggaaggaccaaatgatttgtacttacgacaatttatgaagaaatgtaattttaagtccagtagtatatccttgaaaaaaaaaacatattactgtttgtttgctacatataaaattaaaatgagtttaactagggagctaaaaatggtaaagcacaacaaaacaaggtctaaattgaaagtacattcgacagagatcagaaagagaaaatttgtccattcaatattttctacattagcgataactgattttgaatcacatgagagcttctatcttgcaacaaaagttattaaggtattaattcttctactgcaaccacaaccatcaaaactcaaatccaacattatataactaatttaatcaagctatataaaaatcgagcggctgacacatgctctgagagcactagactaccatgtgcataagtacaaaaacaagaattttatgatattactgttttattataccattactacctgaatgttccatccaattcttagagatgcgccacatagaatcttagaagctgctgacttctcctcctttgacccatttactgcaatatgatataacttctctatctcttgtaaacttgaaaataggtagcaagaagaaaacaaaatgagcattaagttgcttgtttacaactacattgacaattaattatattataccttgaagcaggagtagtgacaagggaactgatcaaggaactacttaatgacgctccttccataaatgttgaccaaggagagttttgattgggtgatgtatcagatggtgtgattgctgatgcaacaacataacatggccaaaaatatgctgatgcatcaattaaatttcttgcaatgcaagcctcaacaattaggtgtctcatgtttccacctgagaagcattaggatttattgaacattaatactcaaaatctcattggtgtgtagcaagatttgaagctaatcatacattttaaaacagacctgctttcataaggccctgaccatgattgccataaccaggtccagaacctttttcattttttgaattatgaacatgggtagcggctttggcagctgcaatgttagctgcattaacaactgaagcaggagggcataagagcccagaaaactgtccaagaacctgaagcgaggaaatcaatccatacttccttaaagcatgagccttctcatatgctgacatagaatttccaagagcagagggtgaatacacttgatcctcatcctccaaaaccttagcaattgccagagggacaatggacaaaaggacacaaagacgggcctcaaggtggggaactggaccttctagaggatcgcgttcctgaaattaatgaatggagcaaaagcaagtattagcttaatcttatctcttcactttccaagaaaagacaaattaagaaaaattagtctcaactcgttggacaagtcgaagggctgaaagccagagcgcaagaaaagtttcttgccatgatgcctggttaagtatttggagggttataactacttctgcgaagacacatcgaaattatatgatagtaaataggatgttcttctatctttcaaaatagtacgttatacattataatgcagtgaagcagcgaaaaaataaactcttcacaattaaagttaatacctgcaatcacatcaatagcagatttgacaagctgtttcccatccattacattttccatgtaaatatctaaaggaacccaacaagcagaaaaggcagattcaaaattaagctgagaaactggtctacatggtggtccattatcgacaagcattccaatgagctggcgcttgtctaagtggtgaacaaaatccacaactctctcaatgttagcagaaaatcttgccaacaattgcttagcagggtttaaatctgaagatgccaaatgatgggctttaaaaagctgtagactacacaggaggccattgaattttttaggcctataaaaagaaatgaaacaagggtagcaagatgtaaattaattttccagatgagcatcagaagtcattttctgcattctaactataaaactcatgactgagcagtctcactctgattagcatttcattatgattttccaactgaattcaggtagtacactagctagcttcaatcactactatactactatataatgctagctaaagacaactaagttagactatataactaaacctttacactttgtaagctgtgatgatcaattttcaattatataattttcattatgcttcgcgaattgtccttaacaatttatatagacgcagcgtgttatactgttgtttgatggaaactaccagaatatactatagcagtcggtgagaagatgaaaatacacacattctatctcttaagttcattagatatcggaattatattactatgttcttatcaatgtccctaattctgtgcacggtatgacaaagaatttctgtttaaaatttttatatcacaattagacaacggaaatagccaatgttaactgtcgtatgaaatcatgttgaaaacagcaaaagaaacttacacaaagttgaatcttaaattacaaaataaaaataaacagaaacagaaaaaaaaaaaaaaagaaaaatcatcttttcaacgaaaggcgtgcttacatattcaaatgaataagtcgaagcagaagcaaggattttttgctttctgttaattttccaagtacctccaatgccatgaaagaattcttggttctcaactcttcatgatgttcttttcttgctaaattgttactctgtttggaatctatgtccatatctttgctattagtgtttccaaatgctaaacttggtctttcaagagaactctgtagtaatccccaatcatccaatacactatcaatcaaaccaatgatgatactgaaaaagaataacacaaacacatgtccaagctccaagacacgaatatcatatatctcagagagcttaagagcacgatcaacagaatttataatcctgttaaaaagcaaagaagaaaacgtctcatgaaaatcatgcaaaatagaagaagagctaaataggaaaactgaacaaacaaaaatgggatgaaattcatgcacaaaagaaaaagaaaactttataagagagaggaatcccatcaaatttgatactaacgtttgtctggagacatctgatacgactggattgaaagaaagagcgtatcggtttaaaagttgaagataaagactataagcctccggttgagaacgtcggtgaggaattatactgcataacaaacaagtaaccatctggatcattacgaataaagcaaaacaaagccatttcatcaattgtcaacactttaactcacaatagaatgagaacaacggtaacatgatcttaaaatggaattatggaaagagaaacctggcagagagaagagagagaacttggacaggaaagaggaggccggaggacatggctccttcaagaaacttccagagagaaggagtgttgttctgaaaacaaagatgagagaccaaaacttgacctaagtccgggctgggcacctgggtcgcccacttccccatctcaatcgaccaaaccagagggctttcgttccgttcttggcaccatttgaccgtgtcaaccactcggcgctcgtactcgctccattcaattccctccattaatatttttattctaaaaataaaaattaaaaaagaagaagaagaagaaaagcagtgaaccaagctacccaagcgaaagctcaggccattaacgaaggagcaatagtagtcgtagcttgctcaacttatttcgcagttaaagaaaacatgagtagggactggggaatggtttttgtcgttctctatttttaaaactaacatctaaaatttttgtgttaaatttggaaaacattttccccattctttcaattatgttctaatgaatcggatataaaataattaattatattaatgatattttatattttattgaaattatatacaaatttattattttttattatatggtttgataaagagacgatgagctattcaaattgtttaaggatatctacatcataattta

SEQ ID NO: 16162 - DNA, 5911 bp, Cannabis sativa
agcttgatgaaagaaaggggtgttagaaagattccaggtcagagctggatcgaagttaagggtagaacccatgtgtttttagctgacgatactttgcatccagagagggacaaggtatatgaaaagcttgaggaattgtggttgcagatgttggatgaaggttgtgatccactctaaggcataggctttttacagcaaaagaagtttcactgaaaccccaaagccactcgagcactgaccaagtgccagcctcaatgaaactaaactgcctcttaccgctggctatgatcatgacaggtttgcttcttgattttgagatgctcaaatgatattttacatgcatttagtccaaatttggctaacttttgaaatattttgatgtggtgtttgtgtgtgtttttacaatgaccctaacccaattggttgctcaaagttggcttgattcatatgagttcaaaccaagttaaaacaatagaaattagatagttatctatctttgaaaatgtttcatcatcttccccctcttttcctcaggtgtttccctactttggatttcgttcaagggaaggggctctacgtttgcagcaaccatgatcacaatatgctcaattactggacaactttgttcaaagagaaaaggcactagtggcaccacctaaattgtcgtattgctattagaattattaggtatcaaatctcacataaaatattactaaccatttacaaaatatctttaggtggtgataggtactactagtgcctaataacatgcacttgttcaaaatcctaagtagagtgtaagtctactatttaattgaagtagaaataggtgttgctagtataatagtatgttaaagttgttcaaaagaagttaaagattaaaatcctttggttcattttccaatggagctagcggtgcattgccatagttaaacaaaatgaagctttacttgttttgtaaaaagtgtgtttacatgctatatttggtcaaatttagcacaaattataacataaataaattaacacatcaataaatattactttttttgtttactcaattcccactaattaatgatttttattaattaaaagatttctatttattctttttgatcaactaacattttattaatctatttaaatacttttatatatatagttctaataaaaatttaatgagtatattgactttgaaattaatttgcactttatacgttagagcaattacaaaatttgaaccaaatatgaagtaaatttagctaattttgcggagatggtcttagttcaaaagaatatggaagcatgttgtattcaatcacattgttttgggtataagcgacagaaatttcattcaaaagcaaaccagcttgatatggagcattagaactaaaaagaaaaagtaaaaatcgacctataacatttcgggtgtgcaaaattttgtaaccaaataaattaaaaccgatacattatagtcaagaactcacaactatggaaaactcattgtttatttcttcttttctcccttatctcggggggttgttgatattgtatctctacgaggccggtgcttcttccacttctttttctgtaagccaatggcccaagatggaaacacagagccggagcttttcatctcgttggctatgtttcgtaaaaaaggaatgtcctcctcagtgtataaagtaatagcttgcccacttcttcctgctcgcccagaccgaccttcatagaacaatagcaaacatggtctcagagtttagtttcattttagaagagaccaggacaagcagtttttcaataatactaatattaatttgcaaggcacaccaacaataaattaatacaaatctatatttctatatttccttactagggtctcaaacacatgctagaagagtttgaatgacataccaatcctgtgaatgtatgcagaagtagaatccggaaaatcataattgatcacgcagttgattgctttgaaatccataccccgcgcaataacatcagtggcgatcaaaacccatgttttaccagctctgaagttatcaacagcactgtctcgctgtatgccatttaataggttagcactcaacacacagtagattgtaagttcatgaaaagaataatcccaaaaacagttacttcagcacatgagcaggtccacagaaagttcacaagagatattacaagttccaaaggacctagcacatggatgtagtccaaaacattttcatacacttaggcactttcccagtaccattacataagtattaagaagagttacttcaacaatgtcaaaatgaagggcatccaaaagttaagatctctctcattttttaccaggcacccaactaaattattctagattttgtttcaatttttgtcaaattgtttaagtcagatggtgattggcgagagttctaaagtagagaaggatcctgcatgcatcactagaatattttttcctttaccgtaattaattaagtagtatatgttaaagataacaagaacttgcctgctcctgtgtcagatcagaatggatgacatccactcgaatgtcgtcaactaacagttctgcgtacagttctttagctctctccttgctctggacgaagattaacactggcggattcagactctactgacaagtaccaaggaaaaataaaaaaggatgagttggagggatattcagaaagatgctccaattgaaaatgataatgataatgatattgcacaacaaacaagcatgctagttcatttatctcaatgtagatctatatcattaatcagattcctccagtcataaccataatttatctccttgggtattattctccacttgagagagagggaggagagggagcttccccatcttagtcaaacaaaaattccccatgtggtgcatatctgcaaaaatatacctctgcaaagctttgacgaagtgctaaaagtttcccttcttcacttccagcaaaaaccaacttttgcttgacattttcagaagctgtattcctgtttaaaccaaaagatacaaatcagtttactcgtcaacatgtaacacatgtcaaactctagtttgcaataaattcatgaagcttacttcctgccaataataactcgaacagcatcatgcattattgtacgtgcaagctcctcaacaaaatcaggtaaagtagcactaaataatgaacgtactattgaaggatttgagcatgctttgactatacaatcaatctgctttaacaagccaagctcaaatagcttatcagattcatccagtacaagatattgaaccctgcatagcaccacaaaataattcatgagttcatggacaattcttaaatgctcagtattcatctaattccattgcaatgatcactaaaactgagtttctgaaacttccaaatgatataattacgaagtgggaataatagcatacacctactacgaacaatagcaaaatctaagagatcttgatatatagagatatctattattactgtcttgttgttgtttgactactgaatacagacaaattgcagcaagctaacataagttcaaacattgaaaatcatcacttgcctgcttaaattcaactttttctttcgaatagctaactttaaccgaagtggagtagatactaatatatcacaagagaacttcgataaatcagcttttcgtataagctgcttagtcattaactttatacaaaatttacttccctcagcaaactttttacactctctaattgtttgagatgccaattcacgtgtagggcaaaggataacagctccaacaccatctttagaagcaggctggttacacagaaagataaaatcagcaaaatttaagagcaaaacactgcaaacacaattcaaatcacatacaaagtaccttaagtttcataagcatgggacaaacaaaagccaaagttttgccagacccagttggagcacaagcgaagcattcccgcccctaagaaaaattatcagaacttacatcaagaagtgtacaaaaatatatggttttattcatatcatatatttagtacggtgaaattaaatattcatgggtttaattaataaaatttccttttttttttattctcattctattcatattcacaaggaaagaaataaatacaaagtgaacgaaaaaaaaaataataacaataaagaccataagatagctgaaacggaagtccatacagataacaggattggtatagcctgcctttggattggtgttggctgtttaattccaagatctgccaagttacgtaataatttcgccttacatccatatctataagagaaattaagacagattttttaggttttattattaacaacgggagattaacatcaactagaattaagaatcagcagcatatcagcttccagaaaaggcaacgaaaatcaacagcttcaagttcaagcacacaacaatgattgtcaaaagcggagtaaggaagcataacaaacacagcaaagaggagaaactcaacgccacaaaatgaaacagtgaaaacttaattctctgattttattcagcacttacaggataaaggaaaatcatggccatttggacagaactaaacaaaacaaaaatccacgaagaatacacatgaaaatttgatttccaggtcttaaaagaaaaaaaccatttgtgaattactagagggaaattgcattgaacaaagggtctctcaagggcacaaatataacaagaatatggtatgcttaactctgcgaaagacagaccttgagcttaactctgcgaaatctataagtggggatgggacagtattcccagaaacatgaatgttatgctccttcctgaaaagtgcatcccgctgtgaaaataccaaagatgttaagcagaaaccagaagcaccatcataagaacaaatttgttcaggaaaagagagagagatagctgaaagaacctcctgttgctgataaaatttctttttctcttgggaaagtttcttctcagttttctcattctcttctttcactgtagcttcaactgattttgaactcttgaaaacgctaaatccctccacagattctgttttagcattacaaagataattatcaaaactaaagctttgtctaccttttaatggcatataaggaacaataaaacaaatacaaaaccaataactaccggaaggtccagaaccaactgcctttctctttctcttcttcacacgtactttctcttcatctttttcttcttcttctgattcatctgattctctattttcgttcaagctcaaattctcaactaattcatcattttccttctttttctaaaaaaaaaacgaaaattacaacactatcaaaaaataataaataaataactttcccgagaaccgaacagaaatacccggattgtatattgctgaaacgaaactggaaaatttgaaagctaacccgaccgggaaaagaaaaagcaaaagatacccaagttaaaggaaacggtacctggaatctggaaaagtctgtggagaatttcttcttattaaaatggactccagcgaacaaaaaagaagtgcctttttccatggtggaagacgatgaatgtggtctccttctcacacctgcaccgttttatatatgattatcagaaaagcaacaaacttggagttggattcaattgcagtggaaggaaggaaggaataggtcgatgggtgaaattctgtgtttttgtaagagcggtctatgagactcgctgcttaaaccctgctctttctcccaaagaatactaaatcttattgaacgacatgtcgtttacatcaagacatttagggttaatttaaatattggtcctctcgattttacccattgaatcaattatcatttatcattttctttcatgtttaatttcaaaacaaaaaaaaaaa

SEQ ID NO: 16163 - DNA, 8068 bp, Cannabis sativa
tcgccaacagcttataagggagtgccctattctctctaatattgagcctaaacaaatcaaggtctggttccagaacagaaggtacaacctttaatactctttttttttttttaaaaaaatatttttgttcgtttaattgtgtattagtagtagaaggtaacaattcattgtttggatcttcatactttggttatggatgcgtaaataagagtttgttctagttctctgttttgaaatgatatttctttcatcgaaccttaaaatttctatgtttagtttgttctctttttcacatcgaatttttccttctttcttatttcccttaccataacgtggtcatctcgtttggtaaagatttaataattctgggttccagagtatgcattttattatatttatttttcagataggaatttttaaaatttccatctttacgtttgttcagtcaaagcggctagtttatttagttccattaattttgttgggttcgtttgttgtatatacagatgcagagagaaacaaaggaaagaagcgtcacgccttcaagctgtgaataggaagcttactgctatgaataagctattaatggaagagaatgataggttgcagaagcaggtgtcgcaattggtgtatgaaaatggctatttccgccagcatacccaaagcgtgagagacacatatgcctttatgcatttatttatttatcacaagtactcacttgtactacgtgtgggtgttgatgttatagaatgttttatttatattttaatttttaatttgcagacaacgcttgcaaccaaagatacaagttgtgaatcggtggtcacgagtggtcaacaccatttgacccctcagcacccgccgagagatgctagtcctgcagggttagtgcgcatattgttgttgggtccttttcagtcatcgtttcttgtgacaactcttgtttgtgtgtatttagcttatcgatttctggtttgtatgtttccaggcttttgtccattgcagaggaaactttagcagagtttctttcaaaggctactggaactgctgtggagtgggtccaaatgcctggaatgaaggtaccttttgcaatttttaatgcattaattaatcttaaaatattcaccaaagaaatcttaaaatataattaacgaaagctcaagcttttgaggcgtgaattcattattttatttttgggaaacgtaaacatcagcacgcctttaaacttttacagtgtcaaactccttttttttttaataaagaaaagaggtcaattataatatcaaatgtgcttagttttcttttttcattcattttacagtctttttttttctctgctggatcattgatattacagtgataacttgattaaatacttatctcgtttatatattttgatgtacaaagcctggtccggattccattggaatcgttgctatttctcatggttgcactggagtggcagcacgagcctgcggcctggtgggtctagaacctacgagggtaagttcatgtagcttcagacattcttcttctttacttctagtctcacttacgcataagataattaagagggaaaatttctgacagtctattttcattccaggtcgctgaaatcctcaaggatcggccatcgtggtttcgcgattgccgtgccgtggatgttcttaacgtgctgccaaccgcaaatggtggaaccattgagctgctttatttgcaggtaagttcaactcttcttgtcaagctatcattttttatcagaatactactagacaattaattatgttatttattgatgcagctctatgctccaactactttggcgcctgctcgcgatttctggatattgcgatatacttctgttttagaagatggcagccttgtggtaagaaattatattcagctatgatatcttgtgaagtacataagaattgacagtatttctttggatgtgcaaatgcttttatcagtttaacttagtctggttaatttgatatattgtacaggtttgtgaaagatctcttaaaaatactcaaaatggtccagccatgcctcctgtgcaacattttgttagggcagagatgctgcctagtggatacctcattcggccttgtgaagggggtggttcaatcatacacattgttgatcatatggatttggaggtgactgagttacagtacttgtagaattggacaattttcttctatgcaatctttttctgaagtaaagattgggaataccgaaatctaaactttgttttttctaaatcataattagccttggagtgtgccagaagtattgcgtccgctgtatgaatcatctactgttcttgctcaaaagacaacaatggcagtaagattttttctttggattcagaatgattcttataactctccctaagattgtttaagtatgagatattctttctgactctgttatgttatgttactgtattctttttcaggctttaaggcagctaagacagatagcccatgaggtttctcagtctagtgtcacaggctggggtaggcgtcctgctgctctaagagtcctgagccagaggctaagcaggtttggcttatttcttttatagtttttgtcacacgactcacaccatacagttatagttcccttcaattgaaatctaatcaatcttaactggcaggggttttaatgaggcacttaatggctttactgatgaggggtggtcaatgatgggaaacgatggcatggatgatgttacaatccttgttaactcatctcccgacaaactaatgggcttaaatctttcttttgagaacgaatttcctgctgtcagcaacgcagttttatgtgctaaagcatctatgctgttacaggtcaggcttcctcacagtattttttttatttattgctatgcttttccagcatatatttaaggaaaacagagggaaaaatatttgatgataagtagactatacagcaattgtctttatttgatttagtttttagtatatttcaaaactttaaatgtgttgatggtaaataaactattgagacttgataagatttttactgaggattgaactacagatacattatattaattgtatgaatatttacatggagtatattgtatatattggaaactctagtcctaccttaagcttatatattaccagacctctcatcttatagagaaagtcattttcaatccctcacccgcatcctctaccaatgtattggattttcagtattatatatgctgccacaacttaaggctagaggaaaaagataggcaagttgtgaaaagtaatcagatatgtaggctttcatctttaggaatatataattctcgcttttaagcctgttacttggtaaaagtattttcatgttatctctgaactcattgttggctaccattccatttatttttgacatttcttgtaatttattttcaactgttctcttttatttcgcagaatgtccctcctgctatccttcttaggttcctgcgagagcataggtcagaatgggctgacaataacattgatgcttactctgctgccgctgtcaaagtgggcccctgtagtttagcaggttctcgggttggtagttttggtggtcaagttatactgcctctggcacacactattgagcatgatgaggtaagttcagaaatgcttggttcattttatattatcttcttttgctacattattcgaagaccttaacatatgttgttcttttgattttgtgctgtagttcttggaggtcattaagttggaaggtgttagtcattctcctgaagatgcaatgatgcctagagaaatgttccttctgcaagtaagtttttctattaactgataaatggcatgatagtttcaattttgatattaactgcttgatggcatgatgctgtttgcttctgttttacttgtttagtaaatataagtttgcttctgttctttggagttttgaactggtattatcggcaatgtgcttacttctagtttctctactgtagtctgtagtgtttgccatgtatattactgattccattacttctagtttctctactgtagtgtgtgccatgtatattactgattctattacttctagtttctctactgtaatgtttgtcatgtatgttactgattatcctccttaattttactgcgttttcttgtttcattagctctgcagtggaatggatgagaatgctgttggctcttgtgctgaactaatttttgctccaattgatgcttctttcgctgatgatgcacctcttctgccatctgggttccgaattattcctttggattcggggaaggtcagtcttgtaatttttctctgtaagaactatttaattcattttggacaggtaataatacagttaataacattgcaggaagcctccagtccaaatcgcaccctagacctggcttctgctcttgaaattgggccaaatggagctaaagcttctagtgattattctgccaacaatggttgtgtgagatcagtgatgacgattgcttttgaatttgcatttgaaagccacatgcaagaacatgtagcctccatggctaggcagtatgtccgcagcattatctcatcagttcaaagggttgcactagcattgtcgccttcacatttggttcacaggctggtcttcgctcaccactcggtactcctgaagcacagacccttgctcgttggatctgcaacagttataggtaagtgattttatgttttacatttgcacattgcacagtgcagtagaagctcttgtactaagatccttatttctatgttaaacaggggctacttgggtgtggaactacttaaatctagtggagaggggggcgaaacaattctcaaaaccttgtggcatcactcggatgctgttatgtgttgctcaatgaaggtatgtgcataattttttaaattataatctcttctgttgcctgcacccctgcacccacccccgccaccaccatgcactgatacaggttcttgataccttaaactagacttgggtattgggatcttacactttgtagtacaactgctattacttagattccgctgttactctaacattggatttgttttttggggacttgcaaggaacaatgtgagaaatttaacaaccaggaatctaatgtagtgtaccagtaatttgtgaaagaaaaatattgtgtgcaaacatagtacttgggtttacttattgtgtgaaacaaaaaatttccttgcttatgaaatttggttttttgcatgatgtttatgcaggcatcaccagtttttaccttcgcaaaccaggcggggcttgacatgcttgaaaccaccttggttgcactgcaagatatttgtttggaaaagatttttgatgaccatgggcggaagactctctgctctgagttccctcagataatgcagcaggtcaagccctctcatttctttcttttttgaactatggtttattgacattaaaacttacatgtttattttatgcgtttccatctgtagggtttctcttgccttcaggggggaatctgcctttcgagcatgggacggccagtgtcgtatgaaagagcagtggcatggaaagtgctgaacgaggaggagaacgcacactgtatctgttttatgtttatgaactggtcttttgtgtgagatatcagaccgagtggctgaacttctatgttagcttatagggttaagaaaggatagaaaccttaatttgtcttttatgttcatttggatattttgctttagtttggagtttggatgttgagactgatatttagttccttccaacactctttatgatactctttatcttgtgatgtttcgactaagttatgttctttgcttcatcttctttactgtgtgatgcatttttgtttgactgtttgttgccatatttgataaaataacttaggattgtccgaagtcgatttctacatttatatttgtattctattatgtaaatatttgacaagtggataatatttaaatattctaaacatgattaattaagttaatgtgaaataagaaactaaaaatttttgaagtgtaaaaaagaagagtttcatttttcacttttacgcttaacgagggtataaatttttgatttttatttctttaaaagatcaccataatatgaaaagcaaaccaaaattttatgctttcttatcccacaaacccactccacctcgacttttctttctctctcttgatttctagccgtcctctttatctcgctttcactcttggttctatattccaatttccgaacagttggttttatttgaaataaatgtaaaattgtcacgtaatgtataaaagaagttttttaacccaaattttgtggtttgtggaaacaaaaattaatctaacggaattgttataatgaaaatttaacttcaaagtgtattggtgtggaagattgaggaggctaaccggccttgattcattatagcagctctaatggaagtggttttttagggtttcttcactcacgaagtgggttacagtttgacttttcaacaaaggtgttgttttatttatttattttatttatccttgtgattggatacttttggttaaatattatgtttacaatttttaggcaacattaaacataattatgaatttgagagtacatctccaattgaagttgctatggctgtagattcatttattgcttctgttgagcactgatagttatttatttatttatttattttttctgatagcttagcatgtaaatttaaaatttaataaaatgaaaatgagtcttactaacgttggtagcgtttgagatgtctttagagacgcccttatattacaatagacatggttgttggtgtattttatctactgttttagtgtactcattaattattggttttatatgagtatatatgctctcttttcgacccttctaatataaaatttaacaaaagtaatgtccatacatgatattaatgtattaatgacaataagataaaaaatttattgaaacttcaaattatgtatgtcaatcgcatacaatattttcatttattcaaactaaacaaaaaaataagaaataaagactccgtggtcagatcactaattaaagcaaaaaaaacccctttagaaaggagattaacacaactaataagccaaacatatacataaactagctggttacatatacccacaaactccatccatccaagtcattttgataataatttaaagttcaacaaggtcaaaactcatctttccacctaaaaaaggttacaagactccaaaaaaaaatggaccttaaagcatacatgacctggaaactcaggagagatcagggaatcgaatacaaaattaagtaagatatagtactggtacaataacttggacaataacctaaaaaaaacctgattcaaggtataacaaaaaggttaattatatttccaagaatataatatataaaatatgtgagactctcgatcggtgtgggagaattatatcaatactcaaacacgtacgagagacccatatagtatatatataaatatatataggtatggggctaataaaataataatggttaattaacaaaataagtactgatcgaccaattaaagacccctttttaggtagatgtgtatagatcctttgttatagccggaatacaacttgaactccgagcaatcccacctttcttattagaaggatctctaggactaatagacttagccctaatccttccatcactttggctcttcttgaacatttctctcatagcctcagcttgaaacaaaacaggataagctctcccaaacttgttgaacctaacacatgcactcatgtgtacacccaaagcctcctcaacctccttattattatttccaccaccagaacaattattactattgtcgttcctcttcttctgaagctcttccttaaccgcctccgaacaaagcccgcaaacccacttcccgaagaacttttcccttatcttctctatgtactcaggcgtacactcctcaaccatgccacaacactcgcacttggcgtcctctacctccgatatcggcgg

SEQ ID NO: 16164 - DNA, 4781 bp, Cannabis sativa
agctaaaatcaaagagttgaaaaaagaagtggagacgtgctctcgggatcactcaactcaaagattttccatgcttaaaaagaaggaaagagaccttaatgggcatcttgcaaaggaggaacttttttggaaacaacgtagtagggaaatttggttggctcatggagacagaaacacaagatactttcaccaaaaagcttcctctcggtgcaagaagaatcgaatccatggccttttcgacaaaaacctgaattggatgagtacaaaagaagaaatagagaagaccatctgtgatcacttctaggagctattttcagcaaattaccacgatggtcgatggagatacaatagcctaccttcaatgatttgtcccttcaagactcagtagacatcaaaatgatatcctgctctctgagtttacagcggcggatgttcagcttgctttatcccaaatcaatgcgctaaaagcgcctggagtggatggaatgtaagcaagatcgttaagtttcttaaacaacatgaagctcaatgcgatttgaataaataacagctcgcatattatagtatgtactataagcgagatatcttagtgtgtcttgacaaatagtaaacaaactaaagtatgagtagaggattaactattcatacgatcaatcaaaaagtatttaaagaagttttaaaaaaactgttcaaaatatttaaagtttgctcttaaaaaataaattatggcaaaatattaactgctcacatataatatggcagaatattaactgctcgtatataatacgacaatatactaattgctcatacataaagcgatcaaagtgttcaaaatacttttaattatgtgaggacatttaagttcgaaatatatcttaagctaaattgagaaaggtatttgtttacttgtgggaaaaaattcaatattcaaaagtattcataactcaaataaagaaggattagatggcacaaaaaatataattatagtaatgttggccttcaaataaagtaaataaaaattaatattacttaataagtgccacaagagacaaaacattatctcggtctaatggctattatttgaaaattgaaaccgtaagaactaagtttacatagttggagacttagaaggacctttttcttcttcttcttcttcttcttcctcaacctcgctttcttcggcatcactagcctcttccttcttggtctgctcgcaataggtatgcatctcgttggctccaatacccaagaagctcaagtccatctcaggatttacaattcaggctctacaaatagatcacttagccatcaagtttacccttgccttggcatccgattggcttcttcaagctttttgtcagcttcagcttgggccagctagttagcctcgagaagttcttggatcttgatttgagcagcctcaagctcagtcttaagggccttctcggattttacttagtttttaacatcctttttcaacctaaagatctctttttgagattcattccattggctagacaaaaccttgcgatggtcgttagatttgcaaaatttagtgctaaggtgactaacactttggaaacccttttactgagccatgaaatataaaaatgtagcctagaaaaaacgaggtcagatgaaggaatcaaagaataaggcatacaaaaattctataaagttgatactaacttactgtagaagatcaacactcctcgtcaaaaggctttaaaaatttcctttgttgatcaaattccagtcctcttacttgaaggtcttaaaatgacactaattttgggtagcatattgcgagcagacctacgagccatcaacacctacgaaaaattggcagggggcaggaaggttccaagaaaaccaccttgggttgagaccttgagaatttgacctgatggacagaccccaaggcctatccaccggagttcccaattgctggcaccgaagaagtggctgtagttttttctggctcgattgaaagcttggttgaggtagatcttttgccagcactcttcttgatcctctttgaaacttctaggtttgacccagaagtagcttccaccgaggttgtcctcttctttcctcgatcgcttggtgggactagtcagactgcatagaaggtcttcaaagcccatatttgctagacaaaaaataaaacattaagatttgtataagcaaaagtataaaggtggcgaggctaaatctcacacttataacattaccataatcatcagacgaggaggaaatgctataataattactaaattccctagatccagtaatcatataaagatcaaaagagttaaggggagacatatcctaatctaaatagctggccctatcaaagttagttccatactgtctagcgatcctaaagtgggaactgttatagcttaattggacgtaatgttcaggataccaataatcaaatctatgggcgattaggtcgacacagttctaaatgaaaaagttatattgactatccttaaattgaactaatgttgttcgatcagccctaagagcagtaggagaccatccataagcaccaaaattattacctcaggaggcctcatctttaggttcccgagtggttacattcctgaggtaatgaatgcgagcgatataatcccagtcctcttcctcctcgagcactaggacttgctgtcagtttggaaacttagaggttttgaagtcattagtgcattgatctctatcgagaagggcacatgcctttaaattattatcatgtaacaagaagtttgtcactcgcagtccataaggaagattgagtaggatctcatgtctttccttaaaatctagtgcttatgtatgattcgaaaccttgtggtcttaattggataaagatcggtggtccaaaagaagtcatccttgagctctttttattgggtaaccttacgatgatcctacgatcattagtatgggtctcgaggtagtaaaaacctcctgctccatgcttcctcgtaggacaggcctttatagaatagaaatataaaatttccaagggtgttggatactcccatttcaaaatgtggtaaagcgattctaaactggcaaggatcctgtaagagtttttgtgtgagctaaaattaaagcaatatcactggtgctgcagccttcatcttgaaccagacgttcaggtgggaaacaattgaattctccatgagccacagatcgaatgcaacatcctttctcgttcctaatgccacatgacctcagaacaacctagacataagggccgatggacctcactttggattctgttgactcagcctcgaaggtaacagtagggttctgtggattcttggatttgcgagctttttgagccatgatttcaaaatccaagtcatttggtaaaaagttaacagtgactggaagaaaaaaacattaacctcgttaaggggatattaactaaactagacgattcaagccaagttgcttcttgcaaataatggcgtctaccatcaatgacttcttgtaagaatcgcctataatggttagaagcttcctactggtcagacctaatgaggtggttcctaatttttgcatcattaatttcaagtatggtttgaggattttagatttgaggcttaaaagctatggctagaaattgaggacagtgtgattctaaggattctgggagtgtgaattatgggttaaattgggacatgattaaagagaataatgtcctaattcttggaaaaatagagcaaaaataaaacccaggactttcgaatcacataaccttaaattttctagccctagattactcaaacattcatataaagtttgaccaaataataaaacaatgcagactaaaagaacataccaagaaattaagattgaaaacataaaagaaagtcaacagagaggaatgtcccttactggtgtgatgaaagattctgggtgttgaagaacttcgcgtggaaactctgatttcagagaagctgggacttgatgattttgaaggcatttgaaaagtcccttttccttaaaaagcactttttaaggggaaattattatacttaaatttcaaccagtaataagaaactaacacgtgtatcaaggatgaaatatgaaccaactcaaactgcgcattattaaatgcacattaaaagactcgcctcaagaaatgtagttaataaaaatattcaaactcaccgccatatagacaatagcgagatgaagagtaataactattaattaatgagaccagttagataaacaggtccatctcggatacaatgaaaactgttcagaatgagtaaacaatgagcttgcagcttattgatccacatactcttgagtaagagcttgctgcttattgatccacatattcttgagtacatttaaggaatgaaagcaacttcaacattcattcacctcgctttttgacgtgtagaagtaaccacctcgctaatacctttctcaacgacaaaggagagtcatgagatgcattgtaacttaacacttaacattttctcctagaaacatggttaagaaagataacatgtactcggcaagaaccatcaaccacagtcagtataatcgtctatggataaagacaaagagcagttgaacgattgtttaagattatcccatgtgcacaaagataaaacatggggaatgtccatgtttcatgaacaactatgaatgaaaagattccaagagcataaccttcaccacatgcatctataaataggggcagaagctgttgggttttgtgtcctaaataaaacccattttaatat

SEQ ID NO: 16165 - DNA, 7409 bp, Cannabis sativa
ttttgtggttaagtgttaaaaaacgtaaagttcaggtggtttagccgccaatatccctttttttaaaataaactgtgtagtatttttcttgcaatgttttaagcatatgtgtgtgataatgtatgcaagtgaatatttcccatttgacaagaaagtctttttcaaaatgtaaagattttaacctatgaagacgttgtcacactacaccggtggtagcccttttctatggtagtgtatcctcttcataactacgtattataaaaataccaacttactcgaaagacgactttcacacactgatacaggtatctctattcttacataggagcttgaaacaatgctacaccaaggatgcaaaaacattaaccattgattgattgactcgaatatgcttaggagaaattgattatttttctctcaagaaaatacttctaaaatcacaaaaacacaagtcaatatatctttcacaacacaaaacaaaattttcaaaaagatttccaaatttctcaaactagaaataaacacatttgatcaggcaacaaaaacaaacttttgacaattaaagagaacaaatccccaaagatttttagaggatatcaaagcgaatcgaatcaagagccttagtgaaaatatcaacaatttttttaatgtatttcaatatattctaggacaaggattttattttcaactaattctcttatgaaatgatgacgaatgacaatatgtttagttcgtgaatattgcacatgattctttgaaatattgattgcacttatattatcacaaaatagttaaagtatcaagaagagatataaaacaaaaaaattgaacaacattagtgaaccttattcttgttaccatgccgtcttttgaattttcaagaattaaatcagctggatgattcaatttatctctacttgaaggtgctgacctcacttttagccaaagatagtgagtcaaataataaagcgattaagtaatataattaaaagaaagcaaaaacagtaaggtaaagtgaacaccagattttaaagaagtttggctctgtaagtatggtaatggcctactccccttgtattttattaacttaagagaaggaacaaagtgttcttccccttgaaagctcttataattaatttttgagaagtttctctcttaaatctctcttttgtcactagagtatatttctctagcaactctctcgatccctttcatagtgaggctaggtcactattcatagagactgaatgcatgagggatggtttctcttttgcttataatgcacaaaataggaaattacaatgattctataattacaatgcatgaaataggaaactagaagatgttgccattttactgtaactgaatcccaggattatagggattgtcttcgtgtctggacaatcgagagtagtctctaaactcttgtatgtcatttgtcataaacatgctcttacctggtcaaacattctccacaatcctgctcagatagctgactattacagatgttgattagtcatttattggttgctagggatattctcctctgccaagatatcagaaatatgcgacatgtgtcatctgattctattgtcacgtcaaggtgcaaaaaacatgataacatttgccccccaagtttgcgcgagaccttcctggtcgcacgtggactttactcagcctagaatcttgtccagatgggtgacgcatgtcctaggtgtcgaatgatgaatcgacgtgaccctaactaagggtctcttcaattttggctcatttaatggtaattgatagtttttcctcgaatcatggttcgatgtttgcacgtgttgacggttactccctagtaatgagtacataacatatacttttagggggaattcgaggaatatgaatttttgaaatgattaattccctttttggactacttataaataggattagaaactgttgatgatccttttagccattcttattcttgaaaaaacagagcaaaaaatttccaggagattatttccctcaaattctttgaaggattcacagaaaaacattcgacgacatcatacgagtagaacaagaagcttcaaaccagtgagtaagttcttcgtttctttcttttatacatttgcaataaaatgcatgcttaattttttggatttcttgctacgaatcttgtctgctcttgaactgttttaggttaaccatagaattcctaggtttaaaatctagaaatcttaattgtctttaaccataacatctgattatctaattgtgcttcgaattttaaccttacaatacccactttctctcgtccattaggggttttagtgaaaatcaaattccaattcgaagttttgaacttttgggttgaaaattctacttttaggtgaaatttctgcttttgattcctcaatcagacctagtcggtacattcaacctgtttttcaatcatttctctgaccaattctcactttcttgtatcctacctttcgtagatgaaccctggtgagttttggggaggcaaacaccatatcgactaggatcttctttaacttctatacggggatcatcctcatctccgtgctatcctatcttcatccagtgacgatgtttcaaactctagctttgaagactgggaaataagtagtgaacacacgccttccctggagcccaaggtgcaacatcacttctatcccgaccagattcaatgtgagggatacgatcgtttcatcggggaacttaagaaagcgtggaggtgttaccttcccactaactggacgtacatagtccacctaaacgttgtcgacaccctgcttgagggttgtccaaaccctactgctgtaggaaaacttgttgctaacttcgttatgaccaccgccaggcacacttctgataggattccatccagatgtaggatgacggcacagaccaaacaaacagtacggaaatcttcactgaccgatctgtgcattgcctatcttgccactctacctagggcagaacaagcccgtcctactactaaagaggaggatactgtaggggacattgaagtccaagaggtggaggactagggtgaggtctgtcctgctactccttttgaggcaaaacgggatgaggaagagggaatagctcgagtgctaccatttggtggctataatgatgaaggagagccaatttccgaggcgggtaatgttctagaggccggtgaggactacgttgtcgaggaatacactgaggctatccctttgaggaggagaagttcaccaggagattgatggattttcccaccatccgtggtgaccataaaaaatatgacaaatccgctcttccctccccggctagcaggctactgacccaaggaaaggttactgtgcctagtcaggagctcacatataaacatgctcatacccaactactaccatataagttcgacccagttcacccccactggccttaagtatctgtctgccctattcgtactgtacgcctcacaaggatggggtcagtcgtccctgcatgacactaactggctttttcacctgaagtcatgtcccaagcagattaagttgggctacttctatttctctcaggttgagaagaaatagttgacgggcaccacgaccacctaggtgacaaagatagggggcttcgtcgatgagtactattttgtcaaggggatggataccacctacactagtttttagcaggtaccgtcctactatctcccctcgttcacactagaacttatagagagggctcaaaaaattctccatctctctcctactaaacacaatatctctctcctagctattgacgctagctttatcaagtacaaactctatgcagctgattttataccaaaagctaaggcacgagaagacactgggtccgaataggaagctacgagtaagaagaagaagaagatgaaagcccctccataaagccaagtacttgttgagcgatctttcaggatcaaggaaaaccctaaaaggattactcgccccagtggcaggaaagggaaaggccgtactagtggaacaagaataggaggattcttcagatgatgattttctttttctacttgtttgggaaaatgctcctacccacatgcagggtattttaacttgctctcaaattttacatgcatttgcttgtattgtacttgtttttaaccttcttattttattcatatgcagatatgtctcagaaggtgcttcaagctctgaagaagaggtcaagtgatagctctggccagatacctccggccaaacgatacaaggtcgatgaggtaccacccaaggagaagagttcgattgagtcacccattgatctctccgaggaggtggtgtcagaggtggaaccattgttaaaatgaaatctaagtccaaaagtgtcaaagggggaagcacggaaggatctagactgtctaagtcctcgggtcctcctatcgtgctgaaccctaagacaagaaaggcaaagagatgcttcaattttactaggactgattactcgccgaggtgaacaatcagttgtctagaggggatgatatgtctgtggagttgctaatggacgagctactaaaggaggcaacctgagtaagtacttctcatttggttcttaattcattcttttacccatgcaagttttgacctttctttatgcaactcaacttaaagatggcctacacttatttccaagccaagtccacagccttaaggactataaccaccactaacaacttgcaaacgaaggtggatgcagccaagaaggaggtcaaggacacgagggcaaagatgggcaaggtgaacaaacgacttttggccaccaacaattgagttgaggagctgtagaaggtgattcaagacattccatctaccgctcaacttaaagtggatgttgatggcctgactaaagatttcaatgccttaaaggatgagagggaaggtgtgtagactctcctttctaagttggaagagagtgctaggtccaggcaggtagagcgagatgcgctccaaaaggaggtagacaacctggagacgaccgccctggaggttttctatgaattttggaaggcctgtccaaatggaaactttgagtacctcaattaaaacaaagatgcatatattagtttttgtgtagctcagaaagataaagaagaatccaaggcaaccaacccctatgctccgaccgaccaaagccttgatgcttcagccacaaataacccaactgacctgtacaaagagccaaggactccagtcgtataagaccttctctttttcttatatttttttattttagttcgacctatgggccttttttcaatacaataggtttgaccaagcggcctttaaacttggttatactttattttattttaagacaactagccggtcgaggagcctttagtctcggacttatcgtgcttttgttatctttctattttaaaatgagtatttttccttattttagtaatagcactgctaagttcttttttgagcttgttgtttacctttgttttatatgggtataattgccccttaagtgaccgagtagacttatgaatcttggtcacttgtattgcagaagttcatttttcatctattcaactttttgggttcaagcagaccctttgtacacatttttgtggtaaaatcgtaaagaaaaataattaacacaattagaatgttgataaatatctttattcatttattggtctgaatgattttgttaccttagtaacttatatttattgaattatgaaagatattacatgatctattcaatctttagctaacataaaacaattacatttttgaaaatgtaatttagaagtggtaatccgacctgagtaccagtcattttatctaaacctttgagcgaggtttgctcagaaagccacctacttaagagtagatgttcgagcatcatgcacttagaagaggtcatcagaccttatgcacttactagtggtattttctcaaatattcgtcgttccaataccttggtaccaaaacaagctccatgttttcgtcataccgtcctagcttgtatactctagattttgtgacttccactacttgatatggtccttcccagttaggttcgagtatgctagtcgtgctgtcttttgtgtttaaaaacactcttctaaggaacatatctcccacaaagaatttttcttgccttcacctccttgttgaagtaccgagccaccttttgctgatgagctactagctttaggtttcctgaggttcgtttgtcttcaatcttgtcaagtgatttttccaggagggcattattagcttcttgattgtaggttattctcctgcgggatagaggctctaactctacagatagcattgcttcatagccataagccatagcgaatggtgtttgcctggttgctgttttctctattgttcggtacaaccacaatacttcaagtagttcatttggccaatttcctttggcttcttcgagccattttttcatggtgtctttgaatgtcttgttgacttccttggcctaaccatttgtttggaggtgtgccactgcggagaaactttttataatcccatgtgtagcacagaaatctataaacattttgccattgtccgaaacaatcttgtgcggaagtctgaactgacatatgatgttttttaccgtaaattccaacactattttagatgtgatcagtgttaagggcttggcttctgtccactttgtgaaataatccgatgtgacaactgcatattgtactgcgcccttaccttttggcaaccatctaatcaagtctattccccatatcacaaaaggtcaagggctttgcatctctattagctcattgggcggtgcacgggggatctttaaaaatctctggcatttatcacatttatttacataggcctttgaatcttccatcatggtcggccagaaatatccttgccttagtattttctttgatagactttgttgtgctgcgtggttgccacaaaatccatcatgtacctcagacaagagtcgtgtagcctcttctttagttacacatctaattaatggcatggagaaacctcttctatacatcacacctttaactatgatataccaagcagcctttctcatcttttttttagctttgttcctattatttggaagttctccaatgttgagataagctgctatgggtatcatccagtttagtgttgtgcctatcattttgatttcttttgaacagttgatgcttggttcttctaagaattggatcgggactaggttagcattatctattactatgctactcgcgagtcgtgctaaggcatcagtaattgtattttcttctcttggaatctgcctaagggtgtaacccttaaattgttgggattttatgccctaaataaaacccattgcaatctaat

SEQ ID NO: 16166 - DNA, 7091 bp, Cannabis sativa
  modified_base (5412)..(5414): a, c, t, g, unknown or other
catgttaaaatcttagggtgattaagtcatgctaagtgtaattactagattaatacttttggaattagttatgagagagtttaaagctatttgtatactctaattatacgtaaaaattatcggactcaagaaaaataaaagacgtggatatatgttatatataagttaagctattgtgactactctcaaattatcacattttttttatattctaaaacaatttaaaaatgttaaacaacctgattactataaacatgagccacaagttttagtgttagatacaaatgaggataattcatttactcttttcggaaggcaaatgaatgattctaactagatataatgaaccatgaaatggaatataggtacgtattctgattctttttgggaacttctataagatccatctgaattagtcagatctattagatgaaaatagatcttcaaaaggaaaaggaaaaacagtccaaccatagcactcaagaaaattaaggaaataacataattataaagtgagcaaattaagataaattctgttgagaacaatttaagaaagataaaaaaaatgccactaaggtctatgtttagagaaatactattcaaaagttgaccaacaacaacaataaaaggtctactttgcattcacttaaaatgattactataagctctacaaaagtgtttacatttatagtttggggatgtattactaattattcaatggttgatgagataaattaagataaaaattcatcaaaatctatcttttgagtaccgttaccaattaacatgatgtacatcctaatccacgaacaaaacaagactatattgctgttatattgtgccttctattaatatagttactccatattttataatgttaccaatctaattctcattaaggtagttacttcatattttataatcttaccaatctaattttaaacatgcattttaaagaaaattgaagtttgaaaagacaatttataattgatgtgggacaatgttcttaattttataactttcttcctcatcaacttcaactatactaaaatattatcacctattattatattaaaagacactttaatctagaatatcatgtagcatatatttatatagatataggtgatcatcacgagatattactaaagctagctagtggtggtgattaaaaagctaacttggtgagaagggcaagacaactaaaagtaaaaaagcttcccaactcactaagttccatatccataccatgcacacatgaatccacctaatgcattaaattaactagcctcccaaaaaatgactataaaatatgttggccttaagatatagtttttcaaaatcaccacaattaagctataggtatgaggatgatgaagatgaggttcactaaagaaactataataataaaaccatcatcatcagttgtagtattgatgatttggttttggctcagtggtttgggttgttcacagccacagcaacagcagagtcaagtgccctgttttttcatttttggtgactctttggtagacaatggaaataacaatggtattatttctcttgccagagccaattaccaaccctatggtattgacttcccacaaggctcaactggtcgtttcaccaacggccgtacatttgtcgatgttctaggtacgtacctataataaattaatcctaatctatttatatatatagcattgttaattgttattggacacaatgttgtctagtagctctagccatgttttcttgcaattggttaacgatattctctaaaattatgttaaattatataaaattcgatatttaattagaccaaacatctaatgtagtgattgtctatgtaccaaatcgtgctttctaaactttgatataagtactaaatcgtgtcacctgaactcagggtcgatcctgagttgtattaaattattaaaataaatggcatttttaaaaattactaaaaaaaaaatatgtgtatttttagaagaactgtttctttatttgggctcttgatttgtctagcccatcttaatctaaagttggttctgcctgaactttgatatggactaaattgtgttctacgaacttccgtttatatcaagtgaagcgtgttggtaaaattaattagaattaaacaaaaatcaaacaatctcaagagaaaatttttaatagaataaaaagttcaaagtcaatattttgtacatatcaaaattttgagaaacaactctaattagcctattgattaaagggcactacttaatattattggatgttaaatatctattatatattgttgaagttggattgtgacattaataattttaatttatgataaattttcagctcaactattcgggtttcgaacttatataccaccttatgctagaaccagaggccgtgcactacttagaggagcgaattatgcatctggtgcatctggaattcgagatgagaccggaaataatctggtacacacatatatattatatagtaattataaatgtgtatgttatttatttatgaatttaataaaaatttattgtatgtatatatacagggaggtcactcgtctatgaacgaccaagtatccaattttggtgaaacagtagaacaaatgagaaggtttttcagaggagataccaatgcactaaacacttatctcagcaaatgtatattttattctgggttgggaagtaacgattatcttaacaattatttcatgactgattactactcaactagctcacaatacacaccaagagcttatgcttcagcacttattcaagactacacacgtcaactcactgtaagtactagtattaattttaattttaattttaattttaattaattaataactcaccatattttcttttcattatatgattatgtatagcaattgtatcgattgggggctcgaaagatgattgttacatcagtgggccagattggttgcataccatatgagttagctagattcgatggtaacaacagccgatgtaatgaagatatcaataaggctatacaaattttcaacacacagattataagactggtcaaccgtttcaacagtcaattcccaggagccaaatttgtgtacatggatttttatcagagcaccgttgatctataccggaaagcaagatcctacggtatatattatattgtcactaactactaaatcgtgtcactgtctctatacatgagaattgaaaagacaaaaaaatcacattcattctggttaattaatatacataattatacacaggttttgaggagttagacaagggttgttgtggagttggaagaaacaatgggcaaattacttgtttgccacttcaacagccatgtgaagatcgtagcaagtatttgttttgggatgcttttcatccaactgaagctgtcaacattatattaggcaaagctgcttatggttccaaaacgcagtcgtatacatatcccataaatatccaacagttggtttcactttgattaatatataattaatattcatacaatataattaattaattttcattttacttttcctaatgttccagagataagaataagaagctctttattcttcttcttaatgtaataaaagcacattgatataaattaataataataataatctcagaacaatattaattgtctttgatcgagattgatcaagcaaatgtttctacgtacatatatagtacaaatacaattatatattattgaaatgaaatacatcataacagataaattttccaatacataattatttaattaattagtagtagttggaattttaagattagcaagttgttgaatgttgataggataaatattacggttatctccattgaaagctttttttcccatgatgatgtttactgctgaagttgggtgaaatgcatcccagaaaatatattcttgtctgtttggacatggtgtttgtaatggcagacatgtaatttggcctctgttccttccaatcccacagcaaccacgatttataacactaaaacctatataagtcaaaagagtttaattaattaatagtactatataataaaatatgttattaaattaattaatatattaccataagatgtggaattagcgaggagatcttggaacatatgtgcagtgtcaacatatatgaatttagatcctggtaaattggtattaagattattaatcataatcttcacatttgcattaaaaggcatcacaagttgattcacttcagttgagcaacttccacttgggctttgggccaagatacttggtatgcagcccattagccctagcccaacgataactacttttcgagctccaaggttatatagtctctgttgtaaaaattattacattaattaattttactgtgactggtcagtgggtagctacaaaatttaaatgaaaaataaaagagggtagtagagaagagaagttacttactgtgagttgttgagaatattgttgaactaagagatcagcaaattgttgggcgttgtactgatttcgggtcgggtaattgggcatgagataattattaagatagtcgttgctgcccattccaacaaagaagatacagctggcaagggactgtgccacgtcaacagcccctagattatttgttatttgatctaatgtaatctcgaaattccttatctgttgattaaagggtatgcgacccacctgaaagtttatcatttttaaaaaaacattatcattaattattacagaaaaactaaaggtatcttaagactagtttactagtgtgtgtgtctatatatatagttgtctcatagtaataagtaataacctaataatgtagtgttaagaatagaaatattcttattgaataattttaattaaataaataatataaaaaattattaagacggcatccaggtccttaggttagacaaatttccttttaaaattatatatttttttactaattttaaaaaatattacattttactcggcttaattaaaatattttatttcgtatgacccactaaatttcagttgaagtcttacaaaatttcggcctgttacgtcgagaattccagctgctgctgaagcgtagttgactccatgaagtgcttgatctccattagtagaagagaaaggaggaatcagaggaagtcctagcatttccgctgcattataaattattattaatatctatttcattagtaccatttacttaatatataatctcatttactgaaatcattatctactcaatctaatatagatctttgctagatttaagagttaccctttaagaagatttagtagtacactatagtttttttgaaggaaagtagtacactatagttaagtaaaggcaatattataattcagagagagaagaaaaaaaaaatatatttatatatnnntatatatatatgtatataatgtacctatttggtcaacaatggtatagccattggagaaacgaccagtaggtccacccttgaaatcaataccataaggtaagtaattggccttagcaaaagataaaggaaggttgttgttgttgccattgtcaatgagagaatctccaaatatgaacatggctggaaccatttcactactactactactcatcatcccattatcaccatcatcactactattccctataataagttgccctgaaacaccacctgatcttaataacatcatcaaaatcaaaacaaaatagtactgcttagccgccatagtttagttttgataaatctaatataacaaaaacgcagagcagagaacagagtgtttttaaaaacaacaacaaatataggttggttttgctagttcaacttataagcttttaataggctaaggaaatatgtaattaattaaggtgtggtagttgtacatattataaatgcttccatctgttcttatctgctgctgtaaatatacatactgacatcacattttcattttctttttctattacttaataaaattaaattaataataaaaataaaataaaaatttcctttacaaatctctccattttttataatattcattttttcttactaatattctcttgtggttgagaaaggcacacaccaccatctaaaaatgtcatatcattattatcaatgcaattgaatatcaaactctaaaattataactacttctcagttctttataaatatatacatgtataaattttcacttaatatatgtaacatataaatatttaaattttcacttaaaaatatgtatattaaaattaattacacataatttaaatataaaaattaatagtataactttatataggcatataaaaaaaatccatttagtgtgatcgggtcggagctctaatccgacggatcacttctgatccaaaataatcggatgcttgttgaatctcgggtcacatccgctccacctcgcctaatttttttcggatcggatctgatctgatccagtttaatttattttttaaaaaacaaaactaaattcaagactcggactcggattgagacctgcacccagacccgggacccagaccaggattggactcgcctgggacccaaactcggatccgaacctaagacatgggacccggacccaaacacccagacccgactgctcggacttggacccagggcccggacccttcacccgacatgagactcaggaccaaactcgaactcgggacccaagatcctaatctgagacccaggactcatatctagacccaaactcgggaccgaactcgaactcgggacccaagatcctaacttgggacccaggactcgggcccggaatcggacctagacacatacccgtatccagactcgggacccaagacccgaacctggaccagaagaattattgggtttgttgatctcttgtaatgtggttaattaatgaatactcactttcaccataaaataaataaataaaaataataacatataatattaataaaacattctgcaacatatatatataaatatatatatagggcaagactatggtaggacctaacaaaagttccctaccggtagggaactttttttaaccattgattttagatcgtgtggtta

SEQ ID NO: 16167 - DNA, 6335 bp, Cannabis sativa
  modified_base (2507)..(2521): a, c, t, g, unknown or other
agtcacaaagaactgacaaacttggctcacaacatcactcttcactatttcccagtatttttggaaaaaaacctggtgtcataccatcaggacaaagagatttatcaggatgcatattaaacagagcacttctaacttcttcttccaaaaccggcttaagtaaagacaaattttgatccacggtgatcgaaggagtaatctcctcaaccacagttgagtaatcgatgacatttgaagtaaataacttagtgaaataatcaaccataacattgggcaactcatcctcccaagtaacccaattacccacatcattcataagtcgagttattgtattgtgtttctttctagaagtagctttagcatgaaaatacttactgttactatcaccttcttgaagccacagctgtttagaacgttggcgccagaacacttctcgttgattcatagcttcactaagattcagttcagcctcccgaaacttctgaacggatataacatcccgccccttcttccaatactggatctcccgcttacaatggctaatttgttttttgaaattgcctgtatactcacgcccccacgcttgaagagattccccacaatacgagattttcttcataacatgctgacttgcacacaactcccaactatccttaacaacctggcgacacagcggttcacgcaaccaggcattttcaaatcgaaactgacgaaatggcaccgtaacagaacgcactgtcggttcaagaagcagctggcaatgatcagagacagaaacttctaaattatgaagctgagccatacgaaacctttggaaccagttggaacaaacaagggctcgatcaagacgaacttcaacccatgaatcagtgcctctcccacgctcccaagtataaggatacccgattaactccatatcaacaagatcacagtcagacaaagcttggttgaaaccatccaccagtatctgtggatatctattacctcctcttttatctgcatgactagtagtattatttaagtcgccaataatacaccaaggaagagaagattctgactttaacaatctcaataaatcccatgttttataccggacagctctattaggttctccataaatacccgttaaacgccaaggagaagaagctacttccgaaatctgaagatcaatgtgatgaaaagagtatccaaacagctgcacatcatcattattacgccaaagcatggccaccccaccactatgtcctctcgcatcaaccgaatacaatccatcaaaccccaccgcaacccgtagcctttccaacctgtccttccgacaaagagtctcacacaaaaataaataattgggtttcttctggataataagattcacaagaaattgataagtccatgggttcccaagcccacgacaattccagctaagaatactcataatggacggtgggcctagatcccagcacccaccagaggccccttttttgagcccaattcttgattaacttcatctacatgaacatccaaactactattacccttctcaactagatccttacacaacccaatagcatgttggcccacacctcgttggcccgatggcactccatcccttgtgcgcctttttttaaaatccaacaacatgatatcatcattcgaatcatcaatatcagcatcattatcatgtatctcattcccactattgtcaacaccgacatggtatcccatactttccatagcattagaagaattagattgagtagaattcccccccccccttatgcaggactgaagtgccacaaaatcctccaacaccctcctcccttcttggctgctgctgtaacagtaccgaatcagtcgccctatcaccatggaatcggccgacaaacatctcgtccgtctcattcccatcacgcaaccactgcgagcccaccaggttgtttctccgtcgtggttgagccctcatccaagcaccataaggctttatgagcatcttggctggtgtatcaaaatgcttaggacaaaatctctcagaatgccctattacactgcagataaaacaaaacgtagggagatattcatacttgaattctacccagaacccatcctctagtgcagtccgacggagcttcttgcattgtttcaaaggaacagtgatgtccaatgtaacctgaacacgcatataatctctccacacattctgaaagttcttaggatcggacataacatatgtaccaaaaaaattacccaacttttccaccacactccctgtcacaccacgcaaacaacaaaccagaaaaccaccccaggacaactacctccagccaaaaaaccaccccgaaacaaacacccctggaccgatcgcacctgtcaaaccgaaccaacaaaaccaccacaccagaccccacggcaagaccagcaagagacaccaaccgcaccccgagcaaacccacgagaagaccaacccaaacttgctgaaattagacacaaaaatcaacccagaaaaataacannnnnnnnnnnnnnnacacacacaccatgtcacaacagacaagacatacaccgaagaagacaactccggccgataagaacccacgacagaaggaatcgtagaagaacgacgcctgtgagaagaactccgcacacctgtgagaagcagctaaatcatttagggaccgccaccggccgacgacgtaccgacgccgagggttgcttcagtccaagaatgacttcagtcgcagtcgcacccaagaaatcgtaagccgtgagtttcttcagtcgcagtcgcaattgtacgcctagggtttcttcagtttcttcagtcgccgagcaaaagcatttattattttatataaatgaaaattattattccttcaaaaaaaatgaaaattattattatcatattaaaattaattttgctttattattattttataacttaggtttaaatctaaatattaaataaaaaattatctttttttaatcataaaatgaagaaaacaagttagtaaagaaaattaaattaactattaaaatatatttgtgaattttttcaaatttaatttttaaaataaaatttacatatattttttttaaaatagaacgtatatatatttcaacaaaaatatatgtattttgttttgtttactttaataatttttaaataatatatttaaggagacactcaaaaaaaaaataataatatatttaaggagaatcatcggttatctatcttttttttaaaaaaaaaatatatatttttttatatttatatttatttatttattttactttaactctgttctattatttttctttttacggtaatactagttttagggttttatcttctctaaccttccacctgaagatcgtatttttttcttctctaacattccatatgagagataattggagatcatattactctgccatcagagacaaccatcggaaaagtaccattgatgatcactattggagacttccaactgagactaccattagagaccaccatcatctgagactaccattagagatcaccatcggagaccaccattgggaaccaccatcaaaaactgctattgaagtgctttctccatctctgaatccctaactaaaactcatattgcaaccctaactaaaactcatattgcaaccctaactaaaactcaaatcgcaacctacttccttactctgtctttctcttcactggtgagttttcttatttccttttctttggtgagattatatactttgagagtacaaacccaaactaaaactcaaataacaaccctaaatcaccattgaatcactcatcaccactagtcttcgtccactgcattccagtccactttccctagtttcgttgttaatgatttctcaaatcaaaattcaagttttactcaaattgtaactcaaatcacaatcctaaatcaccataactcattcgtcgtgctagtctccgttcatggtgttcaagaccactaggcctcacacgatattgttgccatctgcttaatgtattctctaaaatcgaaatccaaattaaaatacaaatcacaaccatctagaccctagtcccagccatttaatttttatgtcaatcaattcgcaatcatctaattttctctttactgtgtgaaatcccaatcgtgaaccctttctttttaacactgtaattttgtaaacaataaatttgaaccatatttttgcacaaataattcacggtaaaccgtatatattaaaaaagccctttttcaaaatgttaaataatgaaatccttaaggaattcagtcattattatctcttgtgaagaatacaattatgtcgtaccattactaagagtaacttcaatatagcaccaaaatgtatacaagtcgtgctataacctctcccgcccaacaccaaatatccctccatcttatcatgtgagctacaattaaggttgtctttagcttttatggagcctaaagaaaaattttataaataggtcttttatttgagaaataaaataaaaatcaaataagtttttaaatcatttttttttttgcaaaaaactttttttggggacttatgggctaatttaaaaagaaaaagagactgagagacctattgggctgaggggccttgggcagtggccccagctgtcctaccctaaagagaaccatgacagtgcacaacatatatgtttgtttacagaggtcaattcctatgtatcagaactaaaattttctacaaatcagagcccagttcttcgatcatcaagggagattcaaagatcacttgcttccgcaccaagaactcatcaagaattcaacaaggaattttacaagaacacagattgaaggagaatgtcgatggcaaggttcgagctagagaagttcgatggatcaacggattttgcactatggcgagagagtttgaagggtatacttgtgcaccaaaaggtggcaaaggtactcggggatgaaaaattactggctgagaagaaacaagaggaaattgcagagatggaggagatggcatactacaccatcatcgtgtacctgtccaatggagttagaagaaaactaattcaagaaaagaccatagaaggattgtggaacaaactagagcagttgtacatggcaccatcaatctcgagcaagattaatcttcttgaaagattatacgggtttagaatgaattctttctttccttagatgataatattgataaatttaataaaataattgttggtttagctaacattgatcataaggtagacgaagaaagtcaagcaattatattgctgagatcattaccaatgacatatcaagaggttaaagcaccaatcaaatatggaagggatgtgatctcgttggagggtgttcatgtagcattaaaatcaaaagactttgaattacaactcgagaaggagactaggaaagaagaagcctatcttgcaagaggaagaagtccaaagagaggatcatcaaggaacaaccagtcaccatcaagattgaagttgaagattaaagacaattgacaatgttatcaatgtggaaagattggccacattaaaagattatgcactcaattgaagacgcaatctggtttcaaatccaactatgatgacaaaagatgcaacagaaaccagaaccagtactcaaaatctaatgatcacggaaatcaaagaaaggactcggcagctgtggctgagagcaatggagatggaagttcttatggggaattattttctatttcaaaaaataataacagcaaagagtggatccttgattcaggatgcacttatcatatgtgtcccaacttaaaatctttctttgattatcaagaaactaataatggtggtagagtactaatgggtaatgatgtttcttcagggatgttggaattggtaaggtggctataaggcaattcaatggtgaagtgaaaattttgcataatgtgaggcagattccagaattgaggaggaatctgatatcattgggaaccttggaagatgaaggttatggctataagttcttgaatgggagcctaaggatcacaaaaggttcaatgcttgtaatgaaaggaaagagagtacatgggctatatgtactcgagcatgaaactgtacctgtgggtgaggcagatacagtaaaaggcttagaaagtgatatgcagctatggcatcaaaggctcagacatatgagtgaacaaggcatgagggaattgcacataaagggagtcattgaaatgcttcagacatgtgcattaccattctgtgagacttatgtttatggcaagcaacacaagatcaagtttacaacaacgactcacaacacaaagggagtcctaga

SEQ ID NO: 16168 - DNA, 7328 bp, Cannabis sativa
ctctaataaaatgtaattctacaccaatcttattatcaatactttaagtgccaaataagtgtatcagtccatgattaattcaagtatttattttttttcaaaaaaaattaaaatctaatatcaattataaaatttaaaataatttttttgccgcacttggcacatctatacttcattccacttctatcattctttctcagagagacgaagtcgctttattattccttcttttcagttctaaatatactatatatgtgtcaaatgatgagagtgaagttatgaaaaagaaaaattgcaaaagtttgaaaattattgatcattattggttattgatcttgaatatataaattattgaaatgtttgaaagttactaattgttatcggttattgatcttaaatatgtgttattgaaaaaatttaaagttaataattgtattggttattgatcttgaatatgtattattgaaaatatgaaagctattaattattattggttatggatcttgaacatgtgttcctcataaatttagcaatcgatgttattgattattagtaatcattgattttgactatgtatcgttaacaaagttactacaatttactggttattgatttcgaatatattgataaaatatacatatatgaagttgttgattattttcaagttgtctctaaaacatgtaacttgaagatatgcagattaaatgggagtttagataatatgtataaaccatgaattctcatattctattatattgcattattctcggacttagtgattaattattcaaaaatttattttcgaaggggtagaagtttattttttaaaaaaagaaataaaattttattataaatattataattaaatggcttaactgttaaaaaaattataatagagacttattaatattaattgctaaaaagaatcttattaaatatttaaattaaaattaattgtttaaaaaaataattaattatagtttatttaattctaaaaaaatttacatgtaactgctaatataggtcaacaaaaatataaccatcatagttataataaaaatatacccattttaaatagtcactcgtatatatattttcgtgtggacctatcattactcatattataatacttatatatgaagcatgctaggtagagaatattgtgctaaagttgcggcctaaatttagtatagaaagatataaagcctatatacgcaaatgagtgccaacacattgtgctactgcaaaatcagagtcaagaaagctacaaacctataaaaacaaagagacctaagctttttggtcctctttaaaatactgaatgaaccaaaattgatgccaacaaacaaggttgtctagcaccaaccatgtatagattatgcttatatagctttaactacctcatgaaattccttttgaattgctttattcaattttaggcaaatgtgtcaataatctacttattattgttaggaaagttaaaagaggtgtcgcttgaaagtatgtcgactaattaaaatcctggaaggaaactatacagatttctttcacttattatgattgaatagattacatgtgaatttctaaataaaaaatccacttattgataaatataaagaaaaatttacataataacagtcttgtaacttatgacaaatagtctttgctaatgacaaacaacatatactctaattaaggaatggtatattatatgtaataacttagcacttactacaagttaatggaaactaaaattcaaacccttttttaatatacccttttgaagaaatgggttatggaataaattaaagctaaagataagattcgaattaagatgtgatatatatgaaaacagtcaattgtgaaatgactgtcatagatacttatgccaagcagaagcctcatacttgtgtaagctttgtcaaaatcatttcagggaagagaatttgctgattttgatggaaacttgctgaaatataattatggtcttgtatgaccttgattgatagaggctaaagggcctcgtgggccagcctagaacaaggttctccaacaaaatgaatggattatttgttatatgttgataaattgttctatgacacactagtgaatattaaatgtttgtagctgaaaaatggagatttattaagaaaaagtatactcttagctcatttaataaaataattaaaaagaaaaaggtatactcttaagttaacatgaagaaagattgaaggaagaacatatgataatgagaactggaaaacagtaatagcattcaggaagaagcaaaaatgaaaattgaaaaggttttaatctaattacaagagatatatctcaattacaacacaggcaaatcgtgagcaatgttccaattgatggttagctctctaaatgtaagggtctaaagagaaaaaggaaaatgctgtagcatattccttttccattgtcccaaatctcaaaacacccaaaagaaattatacaagcttgaaatactctcttcacacaacccattaaaccaagaagtgactaatctcgattcccaattctcaagttccaatatttgtttcatttgatgtatttgagccagtcaagagaagggatttttgactgactttttcatcttttttgctgctttccagtattccttggtgagtctcttatgcttttggattgagtgtatgtgatctgctgagttccatcagatttcttcttgcgtctcccttgctgagataaacgggagtgataagataagatagcaaggtcattgagatcaagcaatggagtaagaaccttcacaacttcatccatgctaggtcgcgatttagggtccctactgaggcagttgtaagctaactgagagaccttctgtacccctttaagggagtaatttagctccaaccgaggatccactagttggtaaagctttctcttttcagccaagtatggacgagcccatgccactaggttctgttccccactaggacgtttcttgtccattgatcttcttcctgttaaaatctcaagtagcactactccaaagctataaacatcacttttagatgtcaagtgtcctgacaaacaggaagagaggtcccattttatacaactagttagatctaagatttttaatgtaaggtaagcattggaatgttgagtaggaattccaataagatgatagtgagaattgtaatctgtaacaacataatgacaggttccacatagatggtttgtgcattgactttcaatgttatctctttaactagctagctaactatttaaaactggattcaacgttagctaataaggattactcataatgcagatttattatagatcaaaattgaattcaagtgctagctcttccaaaagggtaagggactagtcaaaactactactctctattaaaatataggagaatggtcccaatgaaccatggaccggctgcaatgattttcgtacctgtcataacatattctggagcagcataaccgtatgtcccaaccactctcgtggaaacatgtgttttgtctccttgtggcccagctttagctaaaccgaaatctgaaagctttgcattgtattcctataaaaggaaaccccattgtgtttaatgattcattaaagccaagaaatttatggtaataatgatgaaatgaacaaagttactatattttctactagttaataagcttatgagcacatactgaatcgagcaatatgttggatgtcttaaaatctctgtaaatgactggttctggaccattgtggaggaaggccaatccttttgctgctccaagtgctattttaatcctattgcaccatggaagaggtatattcccttcaaaatttgggaatatcaacatttattttagaaaacaatggagtactagtaggcaaacactaacaagcatcatagtatatatacatgaattgggaagataaggagaagagaacagtgaattaatggagttttcgggtcgttgcatataatgtgaaaagaattattatcttcagaaatccaaactgccacacttaatgaacaaaaaagtaggaaaaactgtttttacttaatgaacaaaatatatctaatagaaagggacaagagaaaaagaagtcaagatattaggtacactcacttctaaaaagatgattttcaagactcccacgagtcatgaattcataaacaagcagtcgttgatcatcttcaatgcaatacccaataagcttaaccagattgggatggtgaagctgtccaaggaagtcaacttcagcctgcatcaaagaaagtattacaattcacatgttagcataatatgttttctttagtgcctcatggacagtccctttcagtatcaatcctactaacccaagtcagatatattcttactaaccacccattctctgtgaccttgtagaccatctggctttaagctcttaacagctactgtaactcccgagccaggtttcgccggtgccgtcccattttcctctatccatcctttgaagacaaatccaaatccaccctcaccaagtatgctatccggcctaaagttcccggttgcagattttagctcttggaaagagaattgaagcaactggcaattggatttctcatctgagggtggtggggtgggattatcagaagatagatgagcttcattaggtgggcatagctctcggttgcttgcgtttaggtaacgtgtctcagtggctgcaaatgagaataatctttcttagagtaaagaaaagttgttaaatcagatttcctttcatgtatccagaaaacataatagagtctaatcacttactggttcctgacattttaagaagaaaataaaaatcataaaactgtttgcaacaaaagaagaagaagaagaaggagagatttttcaaaccaagctaaaacataaaaaaaaaaataaataaataaatcatcattgtcaattattaagaacaagataaagctgaaacagctactgagaggcatatagcattagaaaacaataaagtttttttaactttaagaatcatcagatgacagaattgcattttctgatgcttagagcactgaaactggtattggtaagagaaaccacaaattgcccagcttgagatctgtccttgaaattacaagaagtccagtgagtcagttatgaagatatgattgcagaccttttttccttgaaaacaaaggaatactgagccagaaggaatcacaatggattgaggatcacaacatcataaaagttgattaactttgattgaaaatttagaaacaaaagaaaaggatttattaacatttttctcagagtgtagcaaaaaaaaaaaaaaaacatttttctgagagaaagaaagcagaagaaacacatggtacctactttaccataaaccatataactcagatcaaccttattgatttaaagtctttatatgaaaactaaaagcaagaaattctgacccagattgagagcatccacaaacataacaaattgacatagatatagatatagatacatatatatatatacctgcatcgtaaacaaggctagtacgaggaatagtgttaggagagtctttggaagtagaagtgttgcaggcaccagtaacgctgcgtctaaggacagaccagcaaccgcacttggcagccataggtgtatcgagttgcagggattcatgggaagtggccataaaagtagttgagtagtaaagtaaagagaggtgaaaagagagagagatcacccatggttaagagttaaggctaagagggtaaagaagaagagaagagaagagaagagaaaggaatttttgttgggtggtggtgctgggtattggtgttgctgctgctgttggagattgcaggcatcatcatcgccatcatcgcagtgtgtacaaaaagaacttttttcccaccaccttttgtgtggggatgcttttctttctctctctttctctctccaatcacctcttttagactctactcaaaatttactaaaaacaaaagtaaatatttaaccctttctttttcttcttaatttattcaattaaattaggatattttgatcactcctcaccatttgtggcgaagctggtaaccacttctcagagatgttgctgttttataaaaataagagactcaaaaactcttcatttctgtgtgagctggaaatgagaaatgcaaagttgtaaattttacttctctgactttatagatctttgttattgtgaaaaactagatagatggtcaaaacagaatcagaattagaatcgaataagcagatgccagcgcactagtccttttgtcaatctatgtgctaggtacttactctcgaactcctgtgatctcattttcgatacttctaaggcttctaaactttaggatgagttctctcaccttgtttttgaccattttgaattcaatagtttcattagatttgacatttgagtaattgaaggcagcatttcaagttgattgtcaacctgagcaatgggccccatttctaagggctcgagtttgtcatttttctccgagttttcttgaatcttcattacttacgatgatggaaaaaattctcggaacaatttttgatgaaatggatcagaaacaacccaggttgacaatatatcaacctaggtgatgggcctagtcccaagtatcaacctgggtgccaggtcccagttttgtcccttcagaaactctatttggtcctcaaaaatagttgaatctcaatattttctaaaaatagagaagatgctcgaaaggattcttgaaaaactctatttaaaatagcccaggttgacaaaatgtcaacatgggcacaaggctaaccctaagggtcatcctgggaactatgccctattttttgtacccagtttgtgttattttttcttcgaaaggacctattttcccattttgatgaagacaatgaatatgctaaattcgaatctctaatctgatacttggaatgcgcccagattgacagattgtcaacttgggcgctgggtgcttggggccctgggtgctaaaaaataaacttgctccgattctaattttgatgcctcatatgtgtccgtgatatgtctagtttacgtcccaatataatttttgacccttttgcactaagacgatcccaaaaactaaaaccctagttggatatgtcaacttgggtgctggatgaaaccctaggttcccaagttggctttcgggttgcaggttttgtgtaattttaactcctatgacttggattaggttgttccacgtcttcatggtatagaataataaaagatactgaattagattcaagctattaaagtctaagcttccatcccgg

SEQ ID NO: 16169 - DNA, 4837 bp, Cannabis sativa
tatatgggatccgatacttagttggaccaatagcgatattgacacataggagggtgctagacaccactggtgccctttaacatttctcattttttaataactttaaaaatgtcatttattttttttaaaaaaaggcccaattttttttttatagggctcaattttactcagggcctgccctgatatatatgtataacggtcgattttaattttttcggtcagtttattatctaaaaaaactaaccgttcaatgacggttttaaccgttagtgattttttcgttttcggttccatcagttttgattctaacaatatttgataggtcggtttgaacgatttttctaattttctaaattttatactcaaccctaactttacttcatagatttaaaaactcaatttttgtggaagcaaaacaaaagtactatactccataaatttgcatgtatattctctaaaagtaatcatggaagtttagcagaaaaaactacacttgcaacctcatccaataaagactattaaaagccccccaccaactaaatcaaaaccctcaaaattcattcacattatcacatatacacatttatatagaaatatcctagagcattggggacttagtcattggtaattgtaccttttatacagagccgtaccaaaaggtttattactgaaccattaatggcgaaaaagatgtcttcaatatcttaataatcaagaaaaagagaaaataaataaataataaattgaaaaaggcaaaaacaaaatagccctttttatttttttttatgtgttgagagacattgttgataagagctgtcaaagagtattactataattatatattcctcaaccattggcactttttaatcccattactttatgctataaccatacaacgatgtactacatatctagtagaacttactgtatcctatatgcaaagtggaccatataaaattcataagtccaccatgaaaatactcaagaaataacctttttttatttatttattttgggattttgaggaaaagaaaaaaaaacttgtttttttatttatattgtttttttagaggagataaaataataagttttgtaccccaaagtctaccacgacatagtggcatcttttccccacaaaagaagatttgtacagattccatggacagcagacaataccctttttcacacgttagaacaaagaactaaacttaacaattttagatcttctagatgaactcctaaaatctctcaaatatccctgccatgccagctttaaagtttttattaaaattataaaaaaaaaaaaggaaagaaaccataaaagctgtactagatagtgacaaatttgtcaatgccattggtcatgtaaatatatcaacagataatgatgatgctttatttattatatcctttaacttaggtacaaaaccattttatttctttctctttccttttgtctaaacatggaccaagaaaaaaaaaatacaagaaaagacccaaataatatttatatattcttttctaatacgcaaaaaataaaacttcattaaaaataatacattacatatataatattatctatgcaaaaataattggatcagttagttgggtagttttgaagcttttgataggctgtgacttctttaatttctcttgtagattgccattttaagatacatacttgttggttgcaaaaataaaaaccatattaaatattagaaggaaaattttgcagagaataaacgataataaatatgtttatgtatattgaacattagagaagtcaaatgttttaaagcatatgttattaaagtcacgtgagattttttatgtaatgcattaagtcttgaatataaaacacgtacacaaatatatatgttgaagctaccaagtatatcttcttagctatatatataatttgatttcgttttgaatccttactaattagtcttaattaaacctaattagttatcatgtcatattttaaccaaaaagaatataaaggaaagaaaaacactaattacaactcattcctttttctcttggttctttaaaggccaatattaataccaccatacaatacaagaaggatattaattacttcacaaaaagaaaaaagaaaatatatatctaagtgttgtagcagcagcagcatagccgccatccagtcaaagccacaagtttgacccaaaattacatttttaataattttttgaaagaaaaaaatataaaagaagtaaagaaatttgtaataataaggacaaaaacatttccacggtcaaagctcttaagctccacacgagagcttcttagaaatatcccccaatacaaagagaaagacctttggtttttttgggccaatacgtgactaaccttcttttcttttcatagtttcatttcttattcttattcattttcatattttcaacttatatagatattctcactctctctctctctctatctctatatatctctttctctctccctctctgtctctctgataccgaaactcaaagctttgatttttattttagcttctgatggcttcctcttctgggagcttagatacctctgcaaattcattttccaactttactttttcctctcatccatttatgaccacctccttttccgacctgttgtcctccggtaccgatgaggaacccatcaacgacgccgccggagaagaaggccgacgtgggttgtcggatcgaatcgccgagcgtactgggtggggtgtccctaagttcaagtctcttccacctccttcacttcccatatctccaccttctgtttctccttcttcttactttgctatcccacctgggttaagcccagctgagcttctcgactcccctgttcttcttaactcatccaacgtaagtagattccaattgggttttctcagtattaagatcagttttcttttaatttgatcaacccaagttttgaaatcgatcctaataaagtttgttgttttggtttttttcaatacagattctgccgtctccaactactggaaggtttgcatctcaggtttctagttggaagaacagttatggggataaccagcaaagtgtcaaacaagaacagaaaagctactccgatttctctttccaaactcaaacaaagcctcccacttcatcatcttccatgtttcaatcttcaaacacttctgctcagactgtaagttattggggtttttctttctttttttttaatctcataattcctctgctcttgatgtttgccttttccattttcatgaattcaactaactttttttttttaacaggcatggactaatagcttccaagaacaaaccaagcaacgagatgagtattcatcaggaaagagtacggccaataataatgttcaaacaaacggtggtgggtttcagtcagattacagtaataataatcatcctcagcagcaggctcaggccttgagccgaagatcagatgatggttataattggaggaaatatggtcaaaaacaagttaaaggaagtgaaaatccgaggagttattacaagtgcacataccccaattgtccaactaagaaaaaggtcgaaagatctttagatgggcagattactgagatagtttacaagggtagccataaccatcctaagcctcaggctacaaggaggtcatcttctgcagcagcagcaccaccagcttcttcagctttaatccaatcttcgaatttatcaaactctgaaatcccagatcaatcttatgtctcacaaggcaatggccaaatggattcagctgccacgcctgagaattcttctatatcaattggggatgaagattttgagcaaagttctcagaagaccaaatcagggggagatgaatttgatgaagatgaacctgatgccaaaagatggtaagtttttgtggttaatttgaagttttggattcattttgcagcatttttgtttttctagtgaaattattttctgggatttgcttggtttagtcctgtcctattttgtactgatttgtttgtttatttattcttaattttaggaaaagagaagctgaaaatgaaggtatttcagctcctggtagtagaacagtgagagaaccaagagttgtagttcaaacaactagtgatattgatatactagatgatggttacagatggagaaaatatgggcagaaagttgtcaaaggaaaccccaatcctaggtaaacctcaacttttctttttatatatttactcttacaaaacttggaaatataatatagtagtttattcttaaagttcccatattgttatcatgatgtatcattacaactattattgcagtactggtttttctccattgtgtctctgactttcacaccctacctttgttcttatcatcatccactcttatctttttaaatggggaccatttccattggaataaacacattattgatcttttttggtctttttttcttttatatacacaaagtggtagcttgagctaagctatattctttctaaaaagtgcaaggactttgcctcttgttttagtacttataaactcatcaagattcacttcataagaatttgtgttacaactttcaacatatatatagtctctcacaccttttcctttgttattttattaggagctactacaagtgcacaaatccaggatgtccagtgagaaagcacgtggagcgagcttcccatgatcttagagcagtgatcaccacctacgaaggaaagcacaaccacgatgtccccgccgctcgtggcagtggcggccactcaatcaacaggcctttaccaagtaacaacaacaacaatgctgtggctgccattaggccatcgg

SEQ ID NO: 16170 - DNA, 5074 bp, Cannabis sativa
aaatattttaaaatatttttttaatatttatattattaatattaggtggatcaataaaaatttaccgcgtgtacacttgtgtacactgtgatagtctattttagcactcaactgactaaaatggacgaaaggagtacaaagcaaaacgattgtgaaggttagagaatttatctataattttttcaatttaaaagtttaactgtggcaaactttaaagttcagaaagtttagcatcaaattactcttttttttttaatatttattgtcatagatagttttatgtgagaacacatcacttttaattggtaaaattaattacacattttaagttaaaagtgtgtataatttgagtgtatgtaacaatcattgtagcattttcaaaaattagtattctacggaataatatttcagactcatacgctaaataaaaaaataataataatacaaatttgtagcagttaaattctatcaattatcgtttcatttgtacttaatactctaattttaaattttagcgataaaattctcgaaactatggttatgctttcttagtttattttctttgagagagagggagagatatgccttagaagacactacaatccaataagcaataaactcacaaaatggacctataactaaaaatatcattcataattggcctcagccaaaatatatttagtgaactactaaagcaatagagaaagctaacatcataaaaaccattacaagaactaatagtatcttataggacatgaccaaaagatgaataaaaggaacaatgagattcaaaatgaattttataaaacccaaataccgtgacttcatcatataataatcacactattacattacgtaacaaaataaataaagcacaatatttctatacttgataaatagataaaatggacaacaacaaagctcaagaataattatattgatctttcaatacgttttagttctttggagacttgaatcattagtggtctatcttctctaatagcttcaatacatctcaagcccaatttgagaaaatcttcaagttgttgcacttgctcttccctaacattttctatgcccctaaactcttcccgaatttcagtgtcaacaatttcattgaactttccggctagctccaaccaaatctttaacagaatcacaaatattatcaacgaatataaaaatttcggcaatgagaagaacaagtagaaacactccaaattataaacatcactcttttcgttaacattcccttctataacactccaaaagtgatttatgctacaattttttcaaactgaaaagataaaatatttatgccccaactaccctgagaaattataatataaaagttgaatgtatgatgcagatattaagaaaacttataacaattaaaaatttgtgatgaaaataaaacaaattgcaatcaaaactcaaaattatatatttctttatttattattttgtttttcaaggaaaactaaaagtatattattttttcgtatatgcacttaaaattgctacaatagaatacatttcttttcttcataaggacccaaaaaaaaaaaaaaaaacaaaactaaatttaaaacaagctatccatatatatacttactagatatgtagcatttcaagtaggggtgtgcataaatcatctaattcaatgataattgatcgattcaattgtaaccgactgccaaacattgaatatccaattgtgatcagatcagattagatgttatttttgaatatccaattagatcggatcggatgttggatggagtgtccaaaaatctaatacatccaacatccaatcgaagtaattagtattttcatttaatttggatgagtaataagattttatattgttatacgtaaaatatatatgtatatatcaaaattaacattaaaattttactcttttttttttttggattggatggatccaatctaatccaatacatactagacctaaaatattagatgaatccgatctgatccaaaatatactaagtctataatattgaataaactcaaattaaaacaataaatatgtataaaatacatcgaagggatatttacgatccaatccaacatgttggatcaattggatgactgaaattaattggatcggattagattggatggtaaaatctaacatccaatatgtaattagattgaatcaggataggcctaaaaatattggatgtggtctaatgttcacctctaaattttcaagtttcaattacaccatatatcaacttctttaaaatacatcactaaaaatctacttttttactaatattttcacatattcctatataaaaagtaaattaaaatcccaaacaactaataaaatatatttaaaacaataagtaatgttctataaatgtaaagcatgcataataaattttataaagagcatctgatatatataatatatttttaatttacttctttaaatattatagagatcttctattttaaaacatctgatgtgagtgctcttagagttgtatttcagttcaaaaaaatgctaataaagctactcgtggtttttgcgatctcacaaacatgtattaaagttttttttttttagtgaaatatattttagagttggatagagaaattcttaatcaatagaggaatattataattatttgtgttcgataagatactaaaatagatgattgattcattctatattaaaaataatcgcaagaaattttttaattaataaatttttatttctcaataatatcatacaatcaagacaattagttaaatttcataaaaattcatttatatcttttttttttttattttttttttattacagacttcaattcttaaataatccacgtgacttcttctattgtaaacaaaggcacttcttcatatactatcttattattataagtgattgtttatgataatttacattatcacattgttttattttttaatttttaataaaaaaatcactactctactctagaccttttctcaaaaaaaataaaaaagaataaaaacccctaatatgccacgtcacatgattaactgacgtggcaatttataacttctaatcagcacaaataaataaataattcacaccttattcttaattaataaaaaaaaatcagatgattacattagtgtgacgtaatttggtcttttgagattttatttatttatttatatttattttttccaattccctatatattcgaaccaaatattaaaaataaaaattaaaaatttctaaaaaaacattcttacttctcacccacaaaaaaaaaaaaaaaaaatctgaaaaatattttccaaatccacgaaccgccatatctaagatcagttcttaatttgggtttatttttttccttaatcagaaaattgggtttttcataggattatttattgttcttgtggttcaatggagaaggagcaatcgagtgaggttttactgttgtgattattattggtatttgttgaatggggatttgaaatgaaagctcaaagcttcaacaatgttcgactctgtactattgaatattgattgacctagtgttgtagagaggaggagtgttggaatttttgctttttggtcatgacgaagcgcgtttacgaagcctggaaaggaagtaatgtaagcctcttgcatttcttttttgttaatttataatttgggatcttgtgcatgggtttagattttgttgggttagttagaattttagtgggttttggttgattctttgacttgtttttgttgtagccatgaactaggttttgagtattttgacttaggtttttaggttttttggtataggcattggagtgaacagaacagaagtgattaggagttaggtttttgttttgggttgtttgtttagtgactttatgatgatcattatgtttggtttagtatttgagtgttgtctttaaaaggggttcttagtaatggcccttttttaaagagttttgtttttgcttacgttttcaatgttttcttagctagtgaactagtgtactgtttctggttgttcttttgattaaatttctcgtttattttctttattggttgcttttagtctcttttaggtcacagttttgatgtcctaatagttcaaaaattgcatggacaatggttttgtttgttatgcttttatcataaatagaaatggaaatatgtgttggctaagctgaaagatccagtagaaaaaaataaaaaaaaaataaaaggagcacttgaaatttatagaagaaaaaaaatcttgtgtggtaattgcaatgctcaactcatgcgtgatagagtttggtttggtgagtgattttggggaatataccttaattggaggttgtctgtagtgtaagttatttatcgggttgtgtttagttttacttgcatagacctggaatcatttctttagatttcacacgcatttttatgaaacctatttgggatttccatttcatgttgtgttgtttgggtccctaatcaatttagtctctcatatgcctttttttcttttttggccactgccgttggtcattctctacttctataatgcctgtttgctgaagtgtctatagatttcaggtgtgtggactaaaaataaatatggaaaaattactctattgtgaatgaatgtggaagcagatttcttgcctttcgaaaaagtatgcaattaatcatgatggatggattttaatgtggttttgatgtttgtggcaattcatttcctaaggacctttgacatttttcaatttgttaaatgggatgggaggctcagtttagttttgggtagattagagggcttgtaggagactttcattttagttatcttcactgtccaatacaaaaaggcatccattttgtcttttaaactcaatgcaatgttattctttctggaattttaatttgtacagaacttatacgatatagaaactgcggaatttattatttagttgtctgcactggaatttttttttcttatattgattctcaaccttgaaaagggtttagatgtgttttgttcttgttaggtttactttaaatcctttttttttttttttt

SEQ ID NO: 16171 - DNA, 4747 bp, Cannabis sativa
ataattttcttgtgacaattatgaaattaaaggataagatttatggtgattaacgaaaacatgcgcttgttaaattatttggctggcattataggagcacaatgccacctattccataaggattcgggacaatcctctaatttttcaaagatccatttacatctttctagatttaaggaccaacatactgccatttgattttatctataaacaagtcaatgcactgccttgaagctttaccaatacttgaattgagaggggaaactgaatgaagaaatgattcttcgtctctgatttcgcttgagatgcaccaagcgagaataaaaccgtaaaaatatattatcctttgccttttgccacacctattgagtatttgacttccctatagccaactacttgttgaaaagctgtgccttaggcggactataagtcagaaattgtgtggtttggtgagtttgtgtggcatgggatctgggatttgaaccccagctaggactaagggctacttgataaagtaacaattgaaccccagttaggcttatatttctgaaaaaaaaaaaaaaagattcatatgagcctcacaactcggtatctctgaacttgtagcttccatattcgttttccctctgaactaccacacaatctcaccaaactagctaagtatttagtagagttatttgacccatcttcttataatctggatttatttatttattttaatttttagccctggcagttcgaccatgagacctccagtgaccccaagattttgagtctaggggaggatttgaaccttggaagggaacaatgcctaccagcactttccaacattcttccttaccactagaccaacccttggggctctataatctggctttgtgaacaagtgcaaattccaatttgtcactcaagtcactgttccttcctcaagtataaaatgaagatataggactgttgtgagcattttaaaattttttaaacagaagggattctctatttgatacaattgcttgaaaataatgtaactgaaatttttgaaaaaaaatgctttcttttgttttcaatgtaaaacacgcagttttgagtcattgtctaacaatcatttatgtgattttcttcaggtctcttactatttcagaaagccatgtgctaatgatattgtgatattcaaaagtccgcctgctcttcaagaagtgggctacactgacgatgatgtcttcattaaaagaattgttgctaaggaaggagatattgtagaggtaggtacagtggtctaaagaactctatgaattcttatctccatctcttgttagcattgcttgtgttttcgttaaatgatagttttctttagcttagatgaatgtcatgttgtatttgtcaattgtgtaaaatatgaaaaggtacaaaaatgtgagccattacagagaatctttaacccgtttgattatatttttgtttgcatgttcatgcattaagcatatatgttgacctacgtctctttcacttttctcttccaatatatttgctttgacagtttttggtaactagaatctaactgtagggaactgtctggtttcaggttcgtaatgggaagctaatcgttaatggagtagaaagaaatgagaagttcatccttgaatcaccttcttacaacatgtcacctgtagtgcgtatcatatttctttattgatttattctatttttctatttctccaaagaaatttctgaaacatagacataatgatttggaacaaactgaccaagaagtattaacaatacagcgtgtaccagaaaattcagtcttcgtgatgggcgacaaccgcaataacagctatgattcacacgtttggtaatgcatcttaaactcatacctttatgaggtcacattatggaagaatcttaaatttgtttcgcgtttctttcttcgctttctgattttcaacaaatattgtaatgatttaggggtcctctaccagccaagaatatactaggaagatcgatatttcgctattggcctccaaagagaattggtggcacagttctggagactggttgtgctgtggataagcaggagagtgctccagcagctcagtgattattttcattataacatgtaattttaccattgtttgaaaactgaaaaagtctacttgatgaaatataaagtcaacccttgaaagtgcatttaaaaagcatttctttctaagttacacaaataaataacaattcgagtcttgaccattagcttgcttaaattttgtctttgttttaaccatgactttaattatggagactgtattaacttattactacaaagattgagacaaaaatcttctcattacagatgaccaaaaaagaagaacaactctctctctctagtgtcaataaatatcaatgaattttacctcaaaacaatttcaactactatgagggggagcacataactctagtaagaagaaacagctacttagtcctccattgagaactgctgctatagatgtaattcactcaaacatacaagaatcatgcttaaacttgattggcttcgatttatgagagtcaatattaagagaacaagttatgcgtcttcggtgcgatgactttaccaactttcccaccacatgaccctttgatcgtacttcgaacaccagagtcatcggaacttcgctgtcgttgtctgacactgctaagctacctcctgcgccgtacagaggcacctttattccttgaagattcacagacaccgtccggtggctcttccttggctggtaatacttcttcaactacaaatacaatccataaccataagttacatccaataagacaaccactcaaggaaaatctttaagtgtaagtgattattaatataacttaacacatgagactggcaatttatgttgtgttcaatgctgaaattaagtaggtttctttttcgttgaaaatataggagtttagttagttagaggagaaaagtagtgttatgaattacctggcctttagcaactgcaatctccgaatacataaggattataggagaggaggtcacatgaatgccgaaaaatgtagcaggattatacacactcattcttactgaacagttcattgtcagcaactttgttgggactccagtcatgtctgatccctccccaaagtagaaattatgcacagtcaatgactgcaatcataaaagttgttaaaaaaatactcaatctttctcacacactcacaccacccttttgacttatttgtatgtactatgaagtttattataatcaaagatccgagaccaaaaggtgaacttcaaatacaccattaaataaaggcatgggctattataaatttataatccaattaatagtataataatattttaataaagcttattaccttgagagagatccgagccttataaggcctggcagctccccataaaattaagcaaaaaacagagaatatgagaataaagccaagcaaagcaatcagaatctgacaccgtctggccactcctttgtccccataaaactcatcgtagtttccttcttcctcaatcacatcacactccggccaacctttctcgtttctcttccggctaactttccggccagaagacgaccggaagttcccggaaaatcgactagccgaggaagtcctcgagtggcgaccgtaagaaggatgtgaaggactctccattggactgttaaaggccggcgttgcttgcatcgaagacgatttatctccatcgtgggagtccctcgatggactctgaacgtagtaaaccggtcgttttggtgatctcggcgacgaagggtctagactcgtgacgtccgagtctgattttgcgtgaatcatattgtttcgttgttttttttcgaaattgggattgaaagttattattgactacccacttaagcgttactaaagcttgttcagaattcaggttcaaaaacgacccatgaaaacggaagaaaatcgaaactggggaattgacaaagaagatcgagaacgtgattggtcagtccatagcagcgactgagaaaatggaaaaagaaagcgtttttttttttttgcaggggaaggaaaagcagagcactaaccaaagagcttggtttcaattcatgcttagtagaagatagagagagagagagtgattgtcagttgtcagaggacacaaagcttaggctcggaagaatccgaagctgtagattcgggagccaagtgtcggtaggaatcagtttgagccttccgttatgttagtacatgtttttatattcgtgtttgacgaggctcgttgtcgttggtggttgtaaaacggtgtcgttttggtttgatatttctttaggtgaaatggtttactttacttgccgacgagagagtgtcccggtctgtctatgatactgtatcatcgttaagtgattttaattactttcagaaaactgtccttgtccgagtgggaaaagaaaagtggtaaaattattattaaaagagaacctaacttcatttattattttgtgaagataagagtaagatggttattaacaaaataataccttttttaagtacatgctataagacaccattagagctaatttgaactagataagacaagacaacatctcaatatattgcatgttacaaagtcttcattttattccaacctcttgaccccagaaaagggtcatttttgcctttttttttttttttggtttttttcaaaaaaacaaaaaaaaaaaaaaaaaaaattaaaaaa

SEQ ID NO: 16172 - DNA, 4709 bp, Cannabis sativa
ggagaattcatatatgatatcttttctgtttctttggctagacgctataggtgctattttggggttttgtctactcttgtcagtggagatctatgcacgacgttgtgggttgtggttaagttcatcttctcggttggtggggccctacgcgtggttatgtgggtcaacaaaataggtggcatttggtggtacggaggtcgactactggttatggggctattgtcgaatcttttggagggccttacgctcaaatccactagatttgtcaacgccaacagtgacaataacccctatgttggttaccgtcaattctctgtggatttggcctccaattgtggttggagactcatatccaagcctcttatgatacttgaaccgggacccttaaaggttgcattttttggggcttcacctaagcctcttatggtaagtgtcgtcctcatcagagaagaagaaggtgcccaatatcttgtgtattatgtcagcaaaagattagttgatattgaaagtccgtacccctaattgaaaagttaacttattgccttctgctcgcctcaagaaagttacgaccataatcccatcaaagtatacaccaaccagccatttcagcaagttttgcaaaagctagaagcatctggtcaacttctaaaatgggcaactgagctaggacagtatgagatcacctaccaaccaaggatagtaataaaaggccaagctccggcagactttgtggctgaatgcacgaacaatcaatattcaaaaatcaaagatattgctgagctagaaaagaggcaagagtaagagcagaagaaaaacccagaaaagaagcaagatcaaggccctatctggaaattacatgtagatgggttatttatcgagcaactctttagtgtagggattgctttagtaacctttgaaggtcagaaactccatggtgccatataatttagattcccggcctctaacaatgaagcagaatacgatgcacttactgttggactcaaattggcctaggaagtacaagccgaacacctggatatttgcagtgactcgcaactggtaatcaatcacgtgttcggagagtacatggtacgaggtgaaaaaatggaagcttactttagcaaaatcaaatatctactgacacaattcaaaagatataccataagacagatcccaaataagagaatgcaacaactgactcctgactcgcctagcaagcaactcagtagtagacaaggcaaaccttgtccccatacgttacctcaaagagccaagcattaactacctagaggaggttaatatggtagacaccgactcttcatggatgactccaattgcgacctacctcgaaataggggcacttcccatgatagaaaaatgaacttgaaagacgatgagaaaagttgtacggtacttaattctagacagagtaatgtataggcgtgggttttatttacccctcctgatgtgtgtcaataaagatgaagttgcacggctcctcacaaatgtccatgaaggattctatggaaaccatgctgggggcagagtctgtccaagaagatactaaggcaagaatatttttggccgaccatgataaaagactcccacgcatatgtaaagaggtgtgacaaatgacaaaggtttgcaaaaataccttgggcactgcctaatgagctaacccaaatgcaaagcccttggtcattcgcaatatggggcgttgatctgaccagccaattgccaaaaggaaaaggtggagttcaatatgcagttgtcattgttgattgcgtcactaagtggataaaggccgagccattagccaccataacttcaaaaaaaaaggtcctagattttgttgtaaaaaacaccatttgtcgatatggacttcctcaaaagatcgtatcaaataatggaacccaatttgacagttagatgttcattgaattttgtgccaagcacgtcatagtcaagagttttgctgcactatctcatccccaggaaaacaggccagttaaagcaatgaacaagaccctgaaagatacattgaaaaagtgtctggaaaatgcagaaagaaattagcccgaagaactcatacagaactgctgaaaggacagccaccggtcaaaatcgttttgcaatggcttacagctacgaagcaatgttgcccgccaaagttcaaccaccatcccatcgaatgagaacctacgagcaagccaccaaccacaatctccttgtagaatccttacaccaagttgaggaaagatgggaccaagaaaatcagattctacaagcctaccagcaaaaggttgccagttacttcaacaaacaagtacgggaaagaaaattctttgaaggagatctagtgctaagaagggtgttccctaacacaagagatagtgcagcaggggtactcagcccgagctgggaaggactgtaaagtgatccaagtcacaaagtctggagcttacaactggctcgatacgacgaccaaatgtagctcgtctcagtacctagatactggaacggagaacacttgaagaagtactaccaatagacgtcattcttaaatggcgtcttctagatgggcattcgtccaaaagctttaaatcatgtaaatgctaaggtccgacgactacatatttttgcataataattaaataaatataagttactcatgtaacgacacattccgaccaattattagttaagcatgattatttatcattcatatgtcatttattactataatatgtcttgcaaataattagtgattagtattcacgaattgcctaacatgtatacaataagatgttggaaaatctttaaccaatttttactattcaagtatgttaaattaatgcaaaattaacatcctaatatggaaatcctaaaacaaaaaattaaacacataaatgattaagaaaaccttacaacggttgtaactgaattaattgactccttccgttcagttctctcactcttaatattattttttgttgtaaagtgtgatcaagaacctgcatgagtgcttggaccttggcatgagtagcttataactttaatagtttaattgatttgctaatttaattaattaaattaagaactaattaattaatcaaactaaataaactatatttattgcggtattttcgatgactactcatcgggagtgtgcctcacaacttctttttcatataccatcaaaaatccatgtggtgctaagagaatttatgatggacaatagttctaaatatgttttttttccaagtttcacctaaattactaatgcaattttaaaattaattactctttgaaaactaataaacataaatcaatataaacaatcaatataagcatcaaaataaagaattagaaagaatacttatttataaatatagggttccattaaattcacgaattaaaggtattttaaaaagtgaagaaaaaaagatgaaactaatataataatctctcttcaatattcaattttcaagtttcgtgtttttcactccaaaaaagtgttttttacatttagaattgttctgatacgaatctttaagtaaaattaatgaatatttaataagccttataaaattacttatatagatttgattcgttacattatgctgatatgtaacgcttgttatccaatatatttgttttgatttaaccttctacggtaaaatttacaattttttttgtacgaactccaaataagatgattcaaagatttaaaaaacttaaaaagtaatctaaaacttctatttctatttgtgctttctacattctgatgagaacacgtaaaccatgtgagaatttacatagtcactagtttgatgtgtgtgtgaaggaatggaacaagagttcaatttattgtttcatgaaaacaaaatgtaatacaaaagcaaatatataatattagattattagattatttctagtggaaaaagtaaaaaattgtgttttatttggaaaaataaataattataatatatttgtattaatttttagtattatactttaatacaaaattgtgaaagagatatttgtagaaaaaccctcttaacatttgtaattgttacacatataaccctaataaaaaaaaagtggcgacaaaagtactttattttatgattttgttgcagtcgtactattttatggctgttaagtgccaattaaactcgttaagtgccagttcataaacacgtgacgacatatttctttagcttatttaatatgtggtctaataatatgtcgccacacgtttctaggttgacacttaacggccaaaaaaagtacaactgcaataaaatcgtaagataagatacttttgccgtcactttttttttattagtgtcatatgcgtaacaattgtaaatattaagagagtttcgctgcaaatatcctattgtaaaactatatacgagatttaatatttaattaaaaaatataataataataataataattttaatataaaaaaatctattatttaatgctagaattaaatataattataaaataataaatttattataatacaaattttgcatcataattagagacggttaatgtacgggggatgcaattcccgcctccatctccgctacctatttataccactatccctgccccatccccatctaataaccaacggattcggggtaggggaatacccatcgggtatccattaaggcaaaataaaaaaaaaa

SEQ ID NO: 16173 - DNA, 3460 bp, Cannabis sativa
ctgttgatattcccgccatgcacgtggtgatgaacggtggtgattctgcctacgtggcacttcttccatcgggcttcgctattgtccctgatgggccgggctctcgtgggcccaatttggggtcgacgcctaacggtgggtgtagtaataataataataataatggtggtagcggaagcaatggtaacggcggtggtgatgggtcccacagagcgagtgggtctctcttaactgtggcgtttcagatcctggtcaacagcttaccgacggcaaagctcacggttgagtcggtggaaaccgtcaacaacctaatatcgtgtacggttcagaaaatcaaggctgctcttcagtgcgagagttgataccgtgtcacgtgagatctcacgtgattggacctccactcgtctatataatatatatattttttcttaatttaattaattaacattgacttgtgtgtatggtagtaggggtggggagggttgatatttagctggggagttgggtattttgtgtgtttttggagtgattgaattagactcatttcggtgagttttttgagtttggtggttgttgagtcaagaacgaaccccccgttgtgactcatccttgcatggtggtaagaataactacgtatacgaatgaccgaatacttaattgagtttcaaatcaattactcggtgcaataacgagttttcttaacacaaggcaagggtggtggttcgggtattgactctggtcaaccctggtgttggctcaagtagcatttaacaaggttgaaaatatttcccatgataaaggaaaaaaaaaatatatgcattcttgatttaatttttattacttgatgaattccctttttaatattatttttattccatctgttcatatattaagttctgatacatcatatatttatttcctctcaatcttggtgttttcatgtacatgaatttgtataataattaattaatcttaaaattaaataatggatatttgaataaataatgttttgaaaggaaaaataaaaaataattgaagaaggcatcaatactaaaaaaaaactacaactctcgtactataaatataaggttgtaattttttaaaatagatcggcgattggaatagacgtgccgtcaggagaaggtatgtttggaagagtcgatggtataatgatgatattggtttgctgtcgatgagtgtgtatgacaatgtaaatgggtcattaatgaaggaggcagaagctgttgggagaaagcgttgcaatcaataaatgctggttttttggcttcgcctgatcaaatatttatcttttgatggcatccccttccgtttcatgctacaaaccattcatgccatgacacgtgtctggctacgttatctgagttcacagtaacggtgttttgctatataatgtacctatcacaggttagcttaacctaaggatttgtcacggtttggagtttggtaggggcacaacctaaagtatataatatgttacatctgtttgcatctatttattcaactattcatctccattccacgagaatctctcttcaattattcttatcagattattacacaagtttttttttttgtttttcctttctaattaactgaataagaaaaatacaaaaataattgaaacttctaattcgatgttttataatatcatttatcatattttttttcatgtgattttaatttttgttattattaattataatgaataataaaattttgatacacagcatatgcggtttggtttaatttctacgtaaagtcaaaatgtatttttaatcaaatttatagtgtgaggaaatatacaaataataaatatatgagtgtcctaagagatatgtataatataccagaatcagtacttctggaataattatgagattcataattaatattgtggttttgaatttgtgacatttgagtactttcttttgactattcatcaatttttacaaacttggcagtaatcttgtgtattaaagctgcaggaccctccttgagaacacaacgtacgtatattcagaacgagaataattaacatgataatgcaaattattatcaacaaaatctaattattaatatttacaactatttgttatatactatgaagaggagaaagtcactttgtaaagaaaaaaaaacaaaagacgatcgagcacttggaaagtgagaaacaaaaatgatgaaataggcatagaaacaaacaaaaccccgttattctaaatattcctaataacaccaagatatagatagctatggctagaccatacatatgcacctctctctctctctaactctttcttttctctctcatacatgcaaccaaatgtacacgtgaggattcacaggaaatctcccagtatatatatatatataatatatatatatgtttataatatctttgggtgtggacgaaggtaataaagtcaagacagtgaaaggctatccgaaagtgggaaggggatttggccctcacaactttaggtatataggacattattcatttggactttttcctttctttgcaatatcgccccccacaccaccaccttcttataaccttagccactttgctaacaaaacaaaatgcccttccttctctcactccaattcattcaccataataataattatatccttcttcatataataattcttttaaatcattcaccataataattatatcgttcttcatatatataataattcttttaattattctctctcttatgtagtgcctgtcaactgccacgtgacagtatatttatgtagtatgttagtttactcgagtttgatagatattaatggatatttttggtgtatgtgtgtactgctttgggttgtatttagatttagtatgtacgcatatagcaagacacaatatattgtcacgtattcaattatatattttattctttatttaataacgaataacccgaagaaagaaaggcagaaagttggggaaataagataatagtcatactaagtatatttatagtgggtttggtgtgttttagtgtaatcataattactattattttttttattattttgtaaaattaatttatatttgacaaatttaaataatatcattgtaagtgttacaaatcagtccttatgatttactaccaatattcctaattaatattagtgcggaccattagaaatttgacatgtttatatttctttataattaggtagtccaccttgagagcaggtagtccaccttgacatgctctcagtgtcacaaatcagataattcatatggttgtttggaaggttttatctaaaaaattaatttgtggagttaattgtaacaaatgtataatatttcatgtagtattgctattaatattcctatatgatgtattacaattttaaatttaaatctattttatgaaatgagtaaaaagatttgttcatatgttattggagaattctc

SEQ ID NO: 16174 - DNA, 6570 bp, Cannabis sativa
caagaaatgcaggaacaagaacctgttgaactagtagtgcaacaaccagtttcatctcaccccattgtgacccgtgccaaggctgggatctttaaacctaaagtctaccttggtaaaaccaaatggaacccgagccttggtgtacctagttgcaatgaggaggctctcaaatctaaagaatggaatgatgcctttgtttcttacttcaccatttaacctatctcttcaatgggttaagtccaaaatataatgcctttgtttctccaatcttcaccgaatctaaaaaacccctaatagaagagattaatcattattgcttagctatgatgcatgtttagacaagcaaaatacaaccactactctttgctccctacaagttattttaaattccttaacacccaaaatccattcctataaacgcacccaaacctcctaatacattttttaaccccttgcaaaactgaccttcttaccctcgtgctccacctcaatcttgacctactactctgaactggagtcaccaaccttctctagcaccacctcaccgttggcccccttatagacctgaattccaaattttcttcaaactaagccacacaacaccctatttctatcatcacaaaaatcttctgttcattcctccacaaccaccttacaaacagtttgatgcctatctcacacatcaaacgtctttacctgccttctctcctattttctcttcataccaaccgcaaccctcaccatctgccacatccctaagcccttatacttcctcttcaattcatgaccctaagtggtgatggatttgggtgcctcccaccactacactcccgattttaaccttttgagagcttcccatccatatcatggaggcgataaaataactattgttaatggtatgttttctcctatctctaatgtagattatcgaactttacttggtaatgattctttcctcacattgtgtcaagtttaccgttctccttccttttcaaaaaaatttctcagtttctctaagctctgtcaagataatgatgcttatgtccagttttatccttattgtttctatctcatacactaagtcagccactaactccttctcactgatcttcttgattaagggatctattatgtttctccatcctccttgtagccttcatcttcaacatcctctgtctagcttctactatcttccaaaaccaatgttcacttgtggcatttcctcttaggtcatcccgctagtgaaaccgtgtgttaatgttgcttcgtggtgtaatttttctttttcaaaaaaatattactatagtattgttggtttgtcttgtcaatttgtaaattcacaccgtcttgcttctcctaattttgtatctcatgctcaattttcttttgaactaatacattgttatcttaggggtccttccccggttactacaatttctggtgtttgttattttgaattgttcattgatgattcttctcgttttacttggttttatttattcaaaaaaaaagatgaagtattccaaacttttcttacttttaaacccatgattttcactcaatttaacggtaaattaaatgaacccgctcatactagggtggggagttttgttccgtttcaactttcgtccactctcatggcattcttcatgatatttctttccctcaaactccacaacaaaatggtcgtgttcaaagcaaaaatcttcatatttttgacacaggtctcacccttttagttcataattccatgccccttaacttctggctatatgctttctccatagcaatttatcttataaatcgttttcccacttgtgtccttaagtctcatagcccatttcaggttttgtatgacgaacttccctcttatactcatttttcatatttttggctgagtgttttcctttcttgcgccccttaatgcccataaacttgatcttctcttccccatgcgtcatcctcagccacatcatcaaaaccaagagttaattgtgtcttcactcattcacatgtcgcatttacattactcttcatgttatttttaatgaaaatatgtttcattttgcctcctcatcttctatttccccacccattaattttccccacactataattaattcattgccttttccttctctaaactttactaccactgtcaaatctccctctttgtcccctactccaatccctaatacttctattcactctccattgttagctacttcttccactcctcacacagtctcctctttcaaatctccatcttctaacaacactatgcctccttcaaactattcctcctctattcctttagtagtagagttacatggtcaactaccattgttaacttacatcctatggttactcatgctaaagtggacattcataagcccttgttattttatagtgtggctgcaggtaccccgattgtaccctcctcttttgaagaggcttccattgatccagtattattgcatgctatggataatgattttgttgctttacgttcccaacgtacttggacattggttctccttcttcctagctccaaagtcattggctacaaataggtatactgtattaaacttagttttgatggtttggtagatcgctgcaaggcttgctttgttactaaagggtttcatcagactctgggttttgatttccatgagactttaagtcatgtcatcaaacacactactatacgattggtgttatctttagttatctcttttcactgtcccatccaacagattgatattcaaaatgattttctccacaaagacttgattgagatagtttacttgatactaccccaaggctttgttgatcccaaattccctcaccatgtgtgtaagttgtcaaagtcactttatggtttaaactaatctccataggcatggcttttcaagcttagtactgctcttctagaatgaggttttcatgcttcaaaagctaatacatccatgtttatttagaagtcaggttgcaccatgttgatcctcttggtttatatcgatgatatcaccgtcttgggctcttcttctaccattattcagtccttgttgtgctacttgcattccaaatttgtggtcaaggatctaggctccttacatttttttcttggcatccaaatcctccgctttccatccagactcgacatgtctcagattaaatacatacgagacttattaaccaaaatagatctgttggattccaaactagtcaatacacctctatctctcactcccctctccctccatgatggttctcccctaatagattccattgaatattgcaggtgtcctccaatactatacctttacccatcccgatattaccttccccattaacaaactttgtcacttcatgcactctcctactaccactcatcttgaaactactaagagagtcttgtgctatctcaaagggttagtccacctatgcttattgatttgattagacaatactttcaaccttaatttgctttactggtgcggattggacgtcttgccctgatcaccggaaaagcattaatgcttactgcatttttcttggtttgaatctaatcttgtgatccttttcaaaatagaaagtcttctcccactaaagcatcgaatctgaataacgagctcttgccaatggtgcctccaacccgattctccatgctcgaaccaaacacgttgaaattcactaccttttatttgtgaacttgttcaacgacaatccctgtctcttgccttcactcccttctctgatcaacgtgtagactgtttgaccaatgttttggtcatctctcgttttcaggagcttcataccaaactcactatcctccccgacccaatgagtttgaggggggatgttaaacagtaattgcatttgttaactaagtttgttatgcttgttgtattccctttactttacagttgtatttttcattttagggtcctctgttttgtcttctatataagacctctgtactgtattggccttcttgaggaaatacaatacacattctcattttccctgacaagaatgaacaacaattaatttgaaaattatttatagttagttagtgctaagttattgatctatgtaacttgagcaaaaaataagctgacatgccaagggtgaaagtttatgttgtattagcaaattgtaaccatatttcaacaactattttaagtaatttattttatagtatgatttatatatagtacctttaaatccttaacaatgggagttttaagtcctgaaattgctttttttgcgttatataaaatatttacttcaccacttttaagatccttgagtgtgacacttctgcatcaagagtaaatataatataaattatttttaataattacattaagggttttttttttatatagttcaaaataatttttttttttttttttgcatttttacggaatttcacatataaatttctattgcaactaacagagaaatctaaatcacaaccaaaattcatataacaacccacataaaaatcaccggagaaacaataatttaatatcccttaaaaatggaagttatttttgttgttaatcttgcaagtcttgtttatatcacaactttttttacttatatttttgaatctcaagtgtcttttcattttaagcggctgacaacaagcctcttaagatcccattactcaatttaaaatccaacaatagacatttaagaaaatatcacttgtagtctagtaactaaagattggtgagcaaaatggatactatttttagtatatatggtgtttgcatagaaatatatttacgaatattgaaccaggatacttagctaactaaaactaatttttagatggaacttataaatgttgacaattaagataggaaaaaaataaaaaaaaattataattttcaataatataaccctaaatataaccctactataactagatttatatatatatatatatatatgaaaatttgttcatatattttcacaatctataagaaattttagtatcttcgataaatgaataaattgtggcgtcatttttttatatgaagaagacataagattaatgacaaggaatcattcataaattttcaagataacctaaataatttagggtgctaaaaaaaatcaaacagcttgatacacatgcgcttgttttgatatttagggtgctataatggagtggttcggccggaaatagctgaggctattggattccgagagactttgagttggattaaaaatcaagggtggaatcaagttgtactggagacagattgtttgatcgttgtgcaagttttgcggaactgttttgaaatgctttctttgttgggtttgattatcaaggattgtaaataattgcttgcagaactaaaaaaatatttctttttattttattaagcgttcagcaaacgtagtggctcatgcttttgcaagagcttctagtttatatcctgaatgtaattttagtatgaggaatttcccaactaagctgctatcatgtttggtaacagaatttgaagtataataaaacttatgaatattcattaaaaaaaaaaaaaaatctttaattacccataatttcttaaaatttattttaggtctcctatattatattatatttgtcatgtgaaaaatatatataaacagagttgcaacttgaccatataccaaaaatactataaataataatcactactattttatacagtgataccctatatattgagttaattacgtacctatcccagtggccattgatatcaaaaaggggctcattcttggaagaggaatgaaagatctttcctataatagatttaggagttcctcttagtcctacaaatgatcttcctccaatagttaactctgcttccagaccagtttcaaggcatctcacttggtaagtaccaccccacccaactccaggtggaaataacttcaataaaaaatttggagagttcattacataagtctctttatgattcataagtttcaactctctttttcctctcgtctcagcttctatcaaagtacctgttttcataaatgtttgttggcaaagtgtttaattatttaaacaaactatatataattcaatttttactaatatacaaatttttataattaatatatataaatttatattaagcaaactaatgttatttcattgtgtggttgtcctcggcatgttgttaatgttatatttttcacttttcttttatagggtgctcatgttatttttgatgatttttttttaggttgtttgtttaattatttaggcagaatgtttgactaacttgtagcattggattggactttcatgaatggtcttttctttacactttgttgaatcatgttgtttagtggttgttaatgcgttttcaaaattacttttctttcctcaatgaacttagttttttgttagaggatttaacaagtttgatgtccaattttcttggagtgtccataatccaagtacgtcaaatggccaatgaagttgcatatggattagctattagaatattttatttatggaaattattttctaattaaggaaatgatttt

SEQ ID NO: 16175 - DNA, 6887 bp, Cannabis sativa
attataaattttaccatttaaacctgaaatagatagaaaacaaccataattctgcgcaaaataaatataatcaattaacatataccgctaaaatactttttataaatgcacctaaaaccaccctatcaccttcaaactatgaccattgtattttgttccttgaagttttactaccaccacaacgtgccccttttaatgataaaactttgaagagcaaatagtgatcatatttcgagggagaagatagttaatattttgatagaagtctaacaaaatctgacagaagttccgtaaattattaatattaaaagtagaaagagaatatttaatagggacacaatttcattagtgataaagtttgagaaacaaaatacctaaagaaaataaaataaatcatatatcggtgtatatatcaagtagtaaaggtcatggaatactttaattttgtggttattattggtgttttgtcaacttaggatattcatggctctatttgaccaattagtcctaaggctatatagctttgctttttgtgcctttgctttaccaagcatgaatgtctcttcgactatatttgtatatatattatgctttatttttcttctccatcctattaatttcaacacccttccaaatcacacatcatttttatctacaaccccctttgacagctgatatatattgctttatttgcaattatcatctcatatcaaaatcattattttacatttcatttttgaatataagtacatctaatctaacctattcctttacgtatgtaatatttcaacttaaaattgcttccataaatgcttgtatattaggtacaattatggtctcatctcaaacattcttaatgtagttgtacttcattctagtacaaattagttatacatatgaataatgtctaaatatgttaataaactaggataacccaattgcctatatctagatatatggtacaaataaagattgtatttttatttgtcttggaatgaaagactggtttttgaagcccaagaagggtctctcaagagtggtggctataatcactagcaagtgaccattggagctttgaaataggtaatcaattcaacaacactccttagttaacggaatcagagttttataaaattgaaaaatcccttgttatccccaagaattttgtcccttaaacagctttgataaacacccttattttttttaaccccatattcttttatttgtgtagggatgtagactaatccaccgtccaaaagccaaaagaaaacttcataagccatttttttaatagggtaagatttggaaatggctgctcagatcagtagcagtaatactaataagctctatttgaaagcttttgtcctattcatatggcttagtagtgtctccacaattggtcagagccaacttaataacaacaacacttcatctaaagatgtctctggctttcactgcagtactagtaaaaatgtgtcattgaacagatgtgagacatttgccattctcagaaccaattctcacttctcttctctttcaaatttaagctattatttgggtcttaatcggtttgtggttgctcaagctaatggcatttctccagagactgagtttctccccaaagaccagcctttattgataccaatcaactgtcaatgcagccttggattttttcaagctcagttggccaaaattactgtcaaaggtgaaacctttactgggatttctgattctttagaaggcttgacaacttgtaaagccatcaaagataagaacccaaatgtctcatctttggatcttggtgagaaagttttgaacttgctaattccactcccttgtgcttgtccttcttctgaacttagtccaataccaacacctctttatcttcttacttatccaattactaaaggtgatacagtttctaacttagccattaagttcaatacaactaaagaagctattatctctgcaaataacagatcatttggagctgttaaagaaagcttaacaccctttacatctttaattgtcccggttactagtaagcctgttctaggctcacttgtcaaaccccgccaaccgaatttgagcttttcgggttctagtatcccagtcattagtccacacaagaagaaatcaaagatgaggaaagttggactgtatattgctcttactgctatctttgtaggtgttagtgtagcagttgcagcagctttcttagtattccaaatgaagaagaaacagagtttatcatgcaaagaatcaggtgatgtagagcttcaacagctaagtttaagtgtaagaactataagtgacaacaaggtttcttttgaaggatctattcaggaccctcttgatggccaaaccgttacaagtacaacaccccgaaaggcgcttgtggagacttacacagttgaggagctgaagaaagcaacagaggattttaattcaagcaaccatattgaaggtgctgtttaccatggcaggctaagtgggaagaatttggctgtaaagcgcattagacaagaactcatctccaaaatcgagtttaatctcttcaatgaagcaattcatcaccatcccaacataataaagttgttagggacatgtttgactgaagatggtcctgattcatttctggtttttgagtatgctaaaaatggttccttgaaagattggcttcatggtggattagctatgaaaaaccagttcatttcctcttgctattgtttcttgacatggagccaaagattgaagatttgtctagatgtggccatggctttacattatatgcatcacataatggaacccttttatgtccacagaaacatcaagagcagaaacattttcttagacgaagaattcaacgcgaaagttgggaatttcggtatggtgaagtgtgtacaagacaacacatcagaccctcaaatatgttcatccaatcctgcaacttggagccttggctatttagctcctgagtacattcaccaaggagtagtctctccaagtatggatattttcgcatatggggtagttttgcttgagattttatcaggcaaaacaccaatttctaggcctaatgagaagggagcaagtagtgttttactttcagagaaaattaagtccatattagagtcagaagatgcagatgagctaagggaatggatggacagcgctttaggcgaaaactactctttcgatgcagctgttacattggctaatttggctagagcttgcattgaagaagattatgctttgagaccaacagctgaggaagttgttgagaaattgtcaagattagttgatgaggcaccagaaggagagtgtattttgatgagtgagagttcttcaaaacctctggttgaagcagctgctgcagacaacatgtgaataaaatccaaacagaacagaacatgttatgaatggtcattttctaatgtttatttaggcttgtggtagtaactggtaattttcatgtattgtacaaacttagttaagaatatgagttgcatataataagaaataggttttaattatgtattctctgtttttgtgaaataatatttgtactactttttaactttggccttgaccatttcagtcaaaagacttagtcaaaagacttttttttttttttttttaattataggttacaatttaagctagcataaaatatgttgttgatcttcaattttataagtctattgtatatttttatgagtgatttgctacatcttctatctgttatgttataattatttaattctaacataaattaatttaaataattactgtgaaacttataagaaaaaattaaaatatttaaattttatttttgtaaaattatttagattttttttttcaaaaattacaaataattttaaataactacaatatacaagattatgaaaataaaattacactattttttttttcaaaataattaaacaaataaaaaaaatatacttttatatgtaaaaacgctatttttaatggtttactataaattttttcctatctaatatccgctatccaataataggaatagcccaccaataagatttcatattatttatgataagattaacaaaagcattataacatatattgatgtgttgcgttatgatagactagcagttttttatattatttattaaattaaattatgtaaactttgatattgttttgaaccaaaaatcatataccatctcttaattggcactataaattttcccttaatatttctttacccatcaccaatataagaagatggattgcactacttgaaataaaataaagtacccaccactccatggtaccaagcaaaaaaccaccaccactagatgatttttcagttaaagacttgttaggttaccattaagaatatcgatctaggaaacttattatagaatataataatatatattatataataaaccaagtctagaatctagatgtatgagcagcacagaactttagatatagctgccagaactattggagtttttctttttttagggctgcaaatgataaaaatggttaatatatgatattaattcattattatggtaatccaacaacaccaaatatgacttttttggttgttgaagagccaatagtacagagatgtcagatatatgcaacataagaacaattaaaagggctttttcactaaaaggacctgaatacacaatatgaaaaggccaactcacttgagaccttttcattatgtggtcgtcaaagtaggaatacaaatacattaatttatatttattattattgacttgtgtgattagaattagaataagcaaatagtgggtttgtgattaattattattagccatattaacatgactactaaatttatattcaaccatattattatacatataaattttggcctcattccttgaccgtttttgcctcttcatgactactaattttttaataatatttttaatcatgatagatattgttcaaaaaataaaagggaccaaaattaaagtttgagttgagtcgcgaactaggtcgctcttcttaaaacgttcgtggcactgctcagaacagtgcaagtagtctcgttgtccgctagataaaatagcctagtccaaacactgtattagagctctattgcacgatagaaaaccgtcaaaatactacatccaatataatcgtactaatgctcagaatacatttgtaatataatcgtataaaactgtatataatttttttctaagagaaaaatgatgtccttctcctgttggttctcatgcattatataggaacacacataatgaagtagcaggaagaaaattattttttctcatgtgagaatcatgtgaacgatcgttattgaaaacacaaataaaaaattatctttgcttactaattaattaaatatacgtttacaaatagttttaattaattaaataacaaataataatttcataaatagtttttttttaaaaaaaaataaaataataccacacccgtcagcttaactcgagctaactcgagctaggtacctcttgggctccaacccatatggcaaagttatacattatatatatatatttctaataaagtattcatatcctataaaactccatacactcagtcatacaattcacttttcatagaatttttttgtaaatttcactgaagttacaacattttggatattacattctagtgaaaataaaatacacatagaagatatgtcttattgtacccttttatcttcgacccaaaattctattgggggcaaagccgaaagcattgagacgagtctttagattttttatcttcgagttttttaatttttcaaaacaaaaaatcaaggataaatgttatattaatggttccataatttaagtatttttggacttttacattgtcactctttacaagcttatttctaataaaagcttggattataaccaattatgaaattttcttgggaagcaagaaactaggataattaaatgttcttaatgatagctaattaatgatttaattttcttggcaagcaagaaactaggataatttgctaaaataatataaaaatttgaaattagtaaaattattgtggttatgttaaaacaaataaataaataaaacattagctacgcttgtagcttagcgtaaatttataattagtttgaatgatttttttaatgtgtggctcattgaaattttaaactcttgagttagtaagcggcataaacttaatgatttttttagcggcataagtactaaatatttataaaattgtaattctcttccagttttatcagtacagattctgattatatcttaaacaagacacatataagaacaaaattctagattatttggttagaatgaaaatatgtagtatcaattacttggtaatgttttgttctattttattacttggtaatgttattattttagttatatttcaattttttttacatttgtaatgatgatgtttttatggagtataaaatttaaggataaacaaaaaggtaatatttaatttttatgtatttttttttatatatttttcacttaatattaaaaattaggggtgtaattggataaacaattaaaaaataatttaatttaattactaattcaattagatattttgaagtctaattagattaaatcagatgataatttttcaaatctaattactaattggattggagtgcggataaatatgacagcttataattttttgtaagtagaggagatgaaaatttaaacgaacgaagacataaaaaatatattattattaataatgaatattaattctaatataataaaaatgaatgaattattacatcatatgcattacgtacttaattactactaatataatcacaacatcataaccttaa

SEQ ID NO: 16176 - DNA, 4805 bp, Cannabis sativa
  modified_base (1656)..(1658): a, c, t, g, unknown or other
  modified_base (1941)..(1943): a, c, t, g, unknown or other
  modified_base (4746)..(4752): a, c, t, g, unknown or other
cacactactgacggaaggtatttttaccgccaaaaatacgacttaggtacttatctgttactcagcataaaacttaggtatttatgccgcaaattactcaatattaaacaacatttgggaaatatgaaaatattgcgtggagtattgatatccaatcaatgtacttggctggtcaaaaggagtcattcaattatacccgaagagcaattgctatatcctggtcggagcatccgaccgagaggattgcaaataccaagtccggattagcattaattgtcaaatccctgaaaactagatcattttggatgcatagaatagtgagacttaattaacctttattgtatattctgtaattaatgtgagttactcatttgtaactttataaatagtgggtcattctaactatggattggaccgaattctaccctttcacaagagcttttacgctgcaaaaacactatctataattcttgcaaaaagagtatcaataaactcgcttgaccaggttcttgtgatcttgatatatctcaaagaaataccaagtaagaggagtagatcattactaaatttgggaccgaacctctataaatattgtgttgtttattgcttttgttaattattatttatcaagcatttttcattactattttattgagttagcgtcgttgactaaaaacgagatcaacataaattattatatttatataataagaattttattctattattcattaacgtaaaaaaaaagtaaaaggtatttaatttgcatcaatttatcaattattatccaccacttcactcattttacgataaaattaaataaaatgtaatgaaaggactgcgttactgtaaaagttatattttgaagggtattatatattaataagtcgtatattataggagcacgacttgataatgtaaaaaatttaggggcaaagatgttaattattctaaaatgaaatttttgtataagtggtatgagaattttctccaaaaagctttccaaggcagattgtgagttgcttgttgacaaaatgactagtagaattcaaatgtggagcagcaaaaacttgtcttatacgggtaggattattctcatcaactcagttctcctcactatcaatgcttattggtcacaaatagtgattcttcctaaagcaactgtctacaaaattaatcaaatttgtcatggttatctttgagggggttaatttgtctaatgtttcgaggtatgttttgtggaatgaaatatgtaaggataagaatgaatgtggattagacttcaaggatattggtttatggaatctttctgctataagtaaacatgtttagacaatatctaataagaaggataatctttgagttaagtggattaacttttgttaacgtagatttttgttaactaattaataagccttttccgtaataaattaagcacaaaaattatgagaaatttgataagaataataatagtaataatgacaccaagttttttacgtggttttgcagttaactctgcatagtccatgagtctatcttattcaagatatttttggatacagaacacagtattacaatcagtgatctttttttctcaaagatttttcgtccctttttctgtataacctgcccctgcccctatttataggaatatannntggcagttatttacatttaaatttgaaatacataactgttttcacgaaacgtgggctttaaccatgttccattttaacacgtgtagagctaaaaatctgcataaccgtttgttattcttatctttaaggtagtggacactgacgtgggataggagcatctcgctagaggcatctcgctttgtacatagatgaatgacttggtttattcatatgctttccagcaatagcatgagcaccagtgtactgagcaaccttaagaaatgctctttgaccataaggcctnnnagactggacaatcatgtcctccatgctcccaagctattacacttagttatataatatggattatacgctaagtgtttcaacaatcgattcgtctcatcaatacttccttacatattgcgtggtagatgtctcgctatgcattgtccgtagttcccttaggattatgcttttggaggcagtatggtttcttgtcaatacacgaattgatagtttgtgtatccttgtctcacctaagactatacagtcaacgcgttatgaatatactctattaactctatatttaatgatatttccattttgcatttaatgacataatcgttattatatatggcggttcatattccatttgttcgacacgtgtcactctctaaagtacagctaaattttgggtataacaattaccccttaaaaagttttttcttaataaaaagtactttttaaatgattataaagggtattttggtcttaactcaatttgaaaaattgcaggcttttaaatttggcggttcatggtttcaaggcacatcattagcattaataagccatcttttccaattctcccttattcctatccattggatattttgttcttttaatctaacagagatcaatctcaaagtataaaactgaacaggaaccctttttccaccatttctgctttttcaaaaaaaattgagctttttttggaaaaaattattctgatttcttgaagccttgcatgccctccttgtcattgacatatttcttgcgagtctactcggatatacagttcaacctcaggaatccacaggagtcatcaggccattcattccgtcctcggttgcagagcttttcattgtgtgacaactcgatttcgaatggtaagtgatccatcatctttcctctgatctttttcattttcctgggttatgatccttatgatgttaattacatctttgtcactccatttggttttagcgattttgatttaaattttctgggtaatttttaggatttatgcagagtaaaaatttaagtttatcatatttgtaagtctctggtttaataaatttcatctaggaattgggattattttttttttgtagaaatgtcccaatctggttctgaagtttattctcgagagtccttagaaacagaatatcctaaggaattagccctcccgtacaaacccaaaattttcaaacctcattccaaactggagataaacaatgcaaaaattagagaccatttaataaaaaccaatcaggacgaagttactagtcgctataggcgtatcctagaagaaataactgaggataaacgtcgttacttgtgagatgaagcctggcctgaaccccatatttttcttctattgctttggctaaacccttatttttacctagagtcacaattgctttttcaccaggtgacctggactttgaaattatgtcttccaagccccgtaagtcaaagactccccaagatctcaatgtcactttcgaggccgagctcattgaatcaagaataagggctataggggactatgttggtggtattttaaggacttatggcgtcatcaaaagcgagggtgtcgtgttaaatctgttgcacctggtgaattcagatgttatccactagagcgacttacccgcgaggaatgtagggggacagtgatgaaaccagtggcgaagctagtactagtagctcgactgggataggcgcttagagcctcgagcatatcagggctggagcgattctccccctgagagagtactttaaagagttcatcaaccatcttggaatagctccattccaattggttctaatttcctgcagaatccttgcaagtttaaaggtttcgtataagattctaggatgggagtgtcccactcccctggaaattgtttatctttattctgttaaggcagttccggtgaggaaacattgtgcaagaggtttttactaacttggaactcatacaaatgattgtaggataattgtaggattaccaaacaaaaccgcctttaaggaagatttcttctggacaagtggcctttcccccatcaacacaactgctttttgaataatacgtaagtaaatgtttatcttaaacttggttttaattactccatgttcataattttggcctcgctgacttatcttattttactttgttgacagcggtctcgaaaagaccaactccaactcctgagatggctgagcgacgtagacttttgctgggtcttcctttcagtcttcaatcgatcgagtttcttctgacgaagccgatctgaggtccattggccttctcgctaaaaacgagtatacttgtgattacaagtttcccaagtatacatcgtgggagaaggttctagatttagttgacgaggaaagtcaagattatatggcttgggttcattatgtccataatgcagcccctcgggaagctgaagaagatgcatcctgaggtaatcaatgtggatggtcccccactgttcttagggcaagacgcatttcgttagtaactttcaacgatagtcaatataacttctacatttggaacccattccttatagattgtattacccataagtttgatagttggtatatacatttccatgttcaacttagttgcactagttcttactatgggattgccaagcagtatgggactaacttagatagagcgagccatccaaattcagattgggatttagatctaaataacccctatgacatattcatgatcacaggatctagagagattagtgaatacttgtaatgatcgctctagtaatgttgattagtaaaggcaattagcacnnnnnnntattattttattattatttgtaaattaattttaaatgtggacaccaatattta

SEQ ID NO: 16177 - DNA, 3113 bp, Cannabis sativa
ttaaatcctcccacgaaatcactctcaccaataattatccgccatccaatcacacgtggcaattccaaaagtttcagtacacctcaccgcacagaacaaaaacccacaacggcgacttcttaaatagcaaaaaaaaaaaaaaaacattgccgctatcccaaaattcataactaccagtcaaagtgatcatcgcttaatcagatatcttcgccgatatttttgtcaggtacgatcaacaacccagaaagttatcatctttaatccgattatcctttcacgaatcgtgattaattatttttaattttagttacatataatcaattgtgaatatccaagtttcgatttttcggctggccaaacgccgattcagctaggttttctttaaaaaacaaatctttgttgaagttctatatattgatttttgtatatgttttattagagatttttggggttgtatgtgttttgttgaggtttctttgtaataaagatgaatactttatatgtgattgaacttgtattgttatgaatttatctgggaatattgaatttagggttattcattctagtttataagtatgggtttgaaattaaagattgtgttggaaagtcgcttaaaatagttttcaggtgtaattgttggttttattggtaacacaaaggataaataagaatttatcgataaattatatgtgtgtgtggttaagtaggtaatttcaaattggaatgagaacagaattataaaatgatgtgatatttttgaatttctttgtggtttgtaatttcattgtgtatcagtgtcaatctgtcatttttatttacaactatagtttaatacttgttttgaaatgttttccaatggctgttgttacttcaggcacaatggatgtgagagttgggttcttagttgtctttctgctaagttcgaactggggttgtgatgctagacaattgtcgaaaccagatttattggaaggtatataactggttttgttattagtttttgataacattgctccactggatttattcacatgcccaattcctagttacacatgttctgtacttttgttattgttttcatgaatagcttctcagcttgtatttttattgagaattgctaaaaggcaccaatagtgcttagcactttccttggtgtcaaactgttattggtgtaattaagtagcgggtctcatataacttaagaaaattacttttaggaaatatcgctaaccaatcgtaaggtgacaactttatagaaggtgttcaccactggtgcccaatagcaatgttcatttttatttggttggttatcaataattgtgctatgaacttagtatgttgatcgtattacattgaaactgagcacaatcaatagtggtcagtactatgctcaataatcttaccagatgtcctacaattagtttctttgacatgctatgactcactatattttgtattaaggcactaggttggtctagtggtaagggaggggatgggaaatgggggagttgggatctctagatattgaggctcgcagggcttcaattacgcaccgagtatgacaatgatcacgatagtttgtatcgtcatagtaaattcttagcagtatccacgagcttcaaacttcctgagattttgtaaagttcaatgagaacacccaatttcaaattcttgtttgtaatgtgagttttgggatatcgaaataaataaaggcaatagttttcttctattccttacatgtggttagacatgccctaggggttcctttacattctcgagtagtataataataattgtgtgcatatctagtttctagttataatttgaaagtcttaaggtgctatgagggaagctaattggttcatgttgctacgaaaataatactcacttatagcttataccttcttgttccagaaattcaggcttcggaaaatgttgggaaggacgagaatgtctgcacattgtgtgaggagtatgctacccaagctcttgaataccttgaacaaaataagacccagattgaaatccttgaaattctacatgaatcctgctcgaagatgcacgcgttcaaaccaaaggcacagaactttttactctaattcatagtttttcagaaactgcataaaatgaaaatatcttgataataaaatgattgtaacaagattgatggttaagaagctttaatgatcatctatccatgtttcctgttgatattcaatgagctatgagcttagattttgtggtgtgaagtttcatgaaaattttagcttgtcttaaatttctctttcttatttgacattcttatttctttttgtacagtgtattgctttggtaaactattacgctcctcttttcttcctggagatttcctcgatacaacctgtagagttctgccgaaaggtcaacctatgtcaacaaattgttgcaatatcttcacaacttcgtgaagatagctgtgggttatgccaccgtgcagtttcagacgtactagctaagttgaaagaccccgatacacaggtttgtatttgtattatttggctgataagaaattcattactggtttgtattttttgttgtgtactactaatgattgggagatgcaatttgagcatattatttacaattggagatgcaactaagaacttctttaaccttgattcgataaataattgcatgattaataataggataacaaggcttgttcaggttattatgacccatggtcacatttgcgctatacttgcatagttcaaagcttaaacggacaataattgacactgaacaaaactttgatagtgttcctgagttgaaaattaaactagaatactgaaatactgttgtaattgatgcttaggcgtctaaaattgctcaaaggtcgaagatatagcctctaaattatcacaaggaaattatgctgcaatgaaaattttgccatgtatttgtttctctttaagttacactgtgaatagtattgaaatgttatgcaatgatgaaaagttggaggctgatatatcctatggtaatacatggagatcaaaattgaaaataactagtgttgcgaggatggaaagttaatagagacgggatttgacatgtaggtgttgttcggttcc

SEQ ID NO: 16178 - DNA, 4978 bp, Cannabis sativa
  modified_base (4457)..(4466): a, c, t, g, unknown or other
tcagcctccacagttcgccaggtcaagttggaccgagagagcgagcttcgaatcgaagttggatacgactcctccctcaggctccgacttctaaacggcacggctgagatattcggcaccgaactcccacctgaaatctggctcactttccctcccaggctcaaatttgctgtatttttctgtattcaaagcattttcacttttttttcttctccttgtggattttgaatttttggatgtttattctgtgaaaggttttcacttggtatggagccacaattgaaatggatggtagtactgaaactgactacactgcagatgaggtattatttatcttcttcttcttaattttctaatttcattatggattatttactagtttgtacaatagtcactgtaattgcttgattttgcccagacccctatgattagctacgtgaatgtccatgccatattggatggtcgaagaaaccgtgctaaagcttcgtcctctgatggttccagtacggttcaggtacttcattttaatggtgtttattcgttacatcaaatcagagttatatttatatgttgagcatttctatttcgcaccttaaagtggtcacatcataccgatgtgacacccaataattggttagtggtttcttgtattatttatttaatcaaaatttatggaatccgatattgaaatgcacccataacaatattttctttaccattttcctttatatatgttatctacaaaagagttagtatttctcttgtgtaattctattctattgtattaggcaaataacaagtatttgctatattcaatgctcaaatgggttatgtgattcagttgaaactcttattgtgttctttagtgtttgcacattttcatttcaacctctcctgttccttcatggtccactaccaggggcctcgggtcattgttgtgggacctacagattctgggaagagtacattgtcaagaatgcttcttagttgggcagctaaacagggttggaaacctacttttgtggacttggatattggtcaaggatccataactctaccgggatgtattgctgctactcctattgaaatgcctattgacccagttgaagggattcctcttgagatgcctttggtttacttctatggacacaccactcccaggtaacaattgatcaggtgatatgctatatactaaatgcaatatcaacttatgaaattctccaagctgtactgattactagaaattcccctttcgtaatttggattaaggttgttagattttattaagaactatttatttccagtaacaatgtagaactatacaaaatccttgtgagggagctttctcaactgcttgagagacaatttgcgggtaatgttgaatctcgagctgctggcatggtgatcaataccatgggttggatagaaggaataggatatgaggtatgcaagtttcagaattatgggttttatacttcttcgacctttttttatttatttttgccgaggtttatattttttgaacttgtttctttctacagttgcttcttcatgcaatcgacacatttaatatcaacgttgtattggttctgggtcaggtagatgcccttgtttatatatttatgtgtccagttattatttcaatactatttatataatttgtccatacctttttatggtagatattgatacataaataaactgttatgaacttgtgaaaaatttctgagcaacaatactgtttatttgcttgcatcatgttttaataaggtgtgttgtgcaattgaaattttcataacctaaagcaagttagatttagagaaagaatttaatcattaataggtatgttatctggaaaattgatgttttcaaataggcacacgatattaatttttctaatttgtaaggaaaactttgtttcgaattctgtctgaggagctacagaattctcaaccgcaagtgttatcttattgctgttaattgaggcctaagtgctactattgtatctgaattatttaaggatttgagactggttagcatttttacaaaattataagaatttccttttccattcaggaaaaactttgcagtatgctcagagatgttctgaaaaacaagcctgatgtggatgttgtaaaacttcaaagatccggaggagttgtatcgaggaatgtcaaatatcgtcaaaaggctaggagtttgaggataagggtaattacctgttttgtggtcaatgttgttctatataacacaatttgatacattctcttaaattcctggactagtttggggttctcttttaattgacaaggctaatgttgttttttttctctaggaatatttttatggacggataaacgatctctccccgcattctaatattgcgagttttagtgatttattggtctatcgaattggtgggggacctcaggcaccccggtcagccctgccaattggtgcagagcctgcagcagatcctacaagattagtccctgtgaatatcaaccaggatttgctccatctagttcttgctgtttcatttgcgaaagagcctgaggaaattctttcaaggtcccttaccccttccattcttcaatagattaccattagaatactgattaccaatcactcatttgcttattatttatttatttttattgcagtaacgttgccgggtttatatacattactgacattgacattcagaggttagaattttgagtttcaatagtttctacagacacctataaactgagtctatcttggttttgactagtttatcaacatctgacattgcaggaagaagatcacatatcttgcaccagctgctggtgatctcccgagcaaatatctgattgtgggaaccttgacatggatcgaaacatagtggtaaggatgtcgaattcttgacttgctcctcataatcatagttgataaagtttgatcatgaatagctctctactgttgtacattacttctcctaattttctcaaggagtggaagagataagtttatcaaatgcctctgacattaaatctcatgttatactctgagtctttgtttagtgtagtgatgtctttagcacataaagtttagtttagtggaatcttttatatttctgtatagcaagctcttgactttatttgttctaatggtgaagattgaagaaggtaggtaatatctcattcaacacttccttaattagttgattatttatacttaattatgaagagggttaattaattcggtattattgttagaacaaatatctgcatatgacgggaacattgttatcttttggtatacaaagtgacaaagcagtaatatcattgttggttggttggttggccttgccggctggaaaaaaattatgataaaaaaaaatatatatattattatgtttgctatttgtttttgtaaagtgaggctgatataaaagttggtctttttttttgtttttgtttttgatgaattgaattaaccccatgtttggtatggtggaaaaatggaaagaaaagaaacttaagagagaaaagtggagagattgtaaaaatgagtgtgtttagtgtgagagaaaaatacagtcatgggggccatgcgataggttacattcgcgctgaaacaagcttggtgtggccaaaagaatttatcgtatagtaatggttagtgatatttgcaatagcgatatgacagcgagaaaagtgttaaggcgtttaatagtatttcttaaatgaatgtggataaaaatgtgtaaattattaatttctaacgctaataattattaaaattaaaattatataaacaaaataataaatttcaaagcaaattttctcatttttttgaccaaacaatatagaagaagataattttcctttattttcttcaaaattattccatcccttttagtttatttccttctcaccaagtaaaagttttttagttggttagtgttttattttttttgtttattttaatgcttagataagtttagtcaatgtagatgtggaaattttgagtgaaattaaatataatggggtggaagtaactaaaaacttagaaaggatgtttgtttagtcaattacaaattattgaggcactgaattagggtgaatgaaacttgagggtgtttcttttctcactttacagcgttacacaccattttttgataccaattaggttgttgttgttatcatccttttgaaataaaaattaaaaaagaggaaaacagtgcaatggatttgaaaaaaggggtgcattgaaaagactccaacattgtgaacaaactatttacaaataggattggagtcatctttgcactaaactttttaattttttttttctcacttttggcctataattatttttttatatattttttttaagtaatttgcggtttaaatatataaatttaattctcagttataaataaatgtttaagtttaatttttagcggtaannnnnnnnnngttataattttaaaacttctgtaggtacttgactgttaagaaaatgacacgtagataatgatttaacatttgatgatcacgtacctatagaattctagttttataacttaagtattattaccgtcaaaaattaaatttagatttttatttgcaactgagagttaaatttagttatttatctcgtaaattactctatttatttttattattctagtctagatgattattatgaagattcaatcatttttttgtgattgtttttacaaaatttggactaaaaaggagaacgtgaaccatgcctttaaaagttaacatcttcatcaatgtgaatttggggtgttaaaaaccttgaagtgactcaaaattgtattttattaaataaagatcccttttattaattttttccaccttatgcataaattaatttagttaattattcttgaaaaggtgagcaaacgataacaaagtttatgactaaagtagtgaggtgcataatcgtgttaataagtagc

SEQ ID NO: 16179 - DNA, 5719 bp, Cannabis sativa
atggagaagagttgaacttgagtagtcagttcaaatccgcacttgcttccccaatgaagattattttgaaggaaatagtcacttcaacaccacaagtgactgcgctggaagtggtcgctcgagagatgactttgtcatctttaagagaaattccctgagtaaccagtttgagttattttgtattatttatttttattcattatgttatagaaccagatctatttttatttatatctgagacatctacttgtggtgatttttccagtgacttttccggcgactgtgatttttcggtgactttttcggcgccggtgacttttccgacgaaatttattattgttttgcaaatatgaaatttccacatttttttacaaaaatattacgtaaaaaagcccatataaatgtaaaataataataataaaaactcataacccatgatattatttatttatgctataaaaaaagtactcttataatttttccatatattgtgtaatttatacttggtgaaataagcttagcccatttagctactgttattttttttcatttgcgtcagtttaaagttgacgttaataactgttcttaacaccttttttaaatggtcacttaattttattaatgtcggtactaaaaaaaatcatcgatgtttggacccagaggaataccttttttagtagtgaattacaccaaattaataccgaatcaatgctacctcaataaactgatctaaaaataaaccagatgcaatcaaatggaacatttataattattgtatagtttgaaaccaaaacaaatagtaataaataagtgagcaaaacttgtatcatggttagttggaatattgttaatttgagctatggttagtgatcctatcaaatgcataggaacatggtgtaatgtgcatacgcatgtaattatacttattttctcaaacatatatatttaattatagatctcattgaaatatttataatgcttaccataaatagtgtagttaaaaaaaaaagtacatgaatctcggaactatatttgtggaaaatggtcaaacacacaccataattagaagaaagcttatatacgtgtaaataccttttcaacgattgaccacaaatatcatttgtttgattttctactctttgatgatctgtttatcgtttacacttttgtaaaaagttgatgatgatcaggtccccaataaccgcagcaaattattattaatttaaaccaagaattacatttaatttgaagtaattagaacttgatcgatacatggaaaatgaaacctcatcatcatcatcaatatacggcctttgggatgatgttgcacgatttagcaaatacttctatgaaagaacatacaaaagatttcaagagaaaaggcttcagcagtcttcctggggccttcgtttgccatgaacttaaacaccctactcacccttttggtgttttctataataatggtggaaactatttaacttactccttctctttaatgttgttagaaataagttttgtcctcatatccactcgaattattcactttcttctcaagcctcttaaacaacctaagattgttgctcaggtccttgtaagtacgtagaaataaactaatttatttactttttttttttttgggtgaaagatgtattaatatttgcacatttgtgtttttaagggtggcatgctaatagggccgagcttcttgggacgaaacaagaagtttggggaatttttgttcccgaaaaatgcagactttatggtgaaaaatattggagtaatgggatacatgctatttctctttgtgtctggagtgaagatggatttggctctggtctccagaacaggaaagaaacacatagggattgcattagcctctgtgggaattcctttaatactgctcctcatgacagcattgatgttacaagattccatggctaaagaattggctaacccatcatcaataggcgcggttgtttggtcaatggccataacagccttcccagatctctaccctctccttgaagagctcaaacttgtgagttcagatttgggccggatggccctttctacttccatcataatagatgccattggggtcaatgcagtcataggctttgaggcccacaaacaagccatggatgagagccaaaatgcaggctggtacatactctctatggtcatggttttgggcctcatattatgcatcaagagaacaatgcaatacattgttgccaaactccaaactgagaaagctgtggaccagactattatagtgttcatcatcttaagtgctctcttcatgggctttatgactgacttgtttggtctggctgtagctaatggcccaatgtggtttgggttcatgattccagatggcccaccactcggatccaccattgttgaccgtacacaaacgattgtgtctgatattctgatgccgttttcttttacatttataggaatgtacactgatgtgttccaccctaactttgtgtggtccacgttgaaaccgttggtgatcattattattgttggttatgtttctaaaattttgtccacatttctaacttctctttatttcaaaatgtctctaagagacagccttgccttgagccttactcttagcgtgaggggtcaagtgttgtatttgttattcattcactatatggacaaacaggtatacatttcatcatcatctcaatatatatttattgcattattataattgaaatctcattattttgctctccacagcttctagtacaaccatatttcagcttgatggtggtcctatcaacaataatgacggccatatccacaccactaataactctcctgtatgacccatcaaagccatacatggtgaacaagaggagaaccattcaacacacacccataaacacagagctaaagatacttctcgtcattcacaaccaggacacagtgagcagcctaatcaaccttctcaaagcctccaacccaacttccaccaaccctttctccatcacagccctatgcctaatggagctctcaggccgagctaatccagtcttcatcgaccaccaaaagcagagagaggtaccatcccaatacgcgaattgcttaaacattcacaatgctctccagtacttccaagagagtcgattacaaagcgttaagctccaaaccttcaccattgtcacccctaaacgaaccatgtaccaagacatttgcgagcaagctattatacataaatctactctcatcattttaccttacagcaacgacagtttagactccgagcacaggttaggtgttcggagtgtgaactcgttcgtgctttccaatgcgccttgttccattgggatttttgttgataaaatcaacctcagaaaccctgttgttgatgcctcgttcgggcacgcaccgcaccattttgcggtcctgttcctgggcggggcagacgctagagaggccttgacctatgctgataggatgcttgggaacccgggaataatgctaacagtggtgaggttcttgtcatttaatggcaatggtgatgacgagatggagaagaagctagatgatggaatggtgacatggttttgggtaaagaatgaggagaatgagaggttgatttatagagaagtgatagtaaggaatggagctgaaactattgcggctattaaggccataaacgacgggtcgtttgatctgtggattgtggggaggcaacatggggttaatcctgtacttcttgaaggattgtcgaattggacagagaatttgcttgaattggggatcattggagattatgttgggactattgattttggaggttcagcttcggttttggtaattcaacaacaaattcttagaaggcatagaaataacttttgtttatattagttgaacgttttgcatgtcatgagcctattagatgtacatgtgttccttaaatatgaaagtatatcttgcattattagcctttgtctaataaaaactatggaggtaggtcaatgatagattaaatatgaaatacgaagaaaaaatataaagaaagaatgatagtttagggcactaccattctgttacttgtaaacaacaatacactgtaaggctaagattaaatctagcttatttcactactacgaaaaaagcttttcgcttcggtatttaagtaaaatataaagaatttacttcggttagtgtacctgacgttataaccgtagacgcaaatagtgattttttttgcttcaattatgaagcgacgctaattaattatttgattcggttatgaactgaagcaaaaaattagtgcattgaagctaattgttttatgcttcgatcataaactgaagcaaaaaaaattttgaaaaaaaataaaaaaaaaatctggtaattataatcagattaatgtcacacgaattttttctgtttcacacacatttttagtattgcataaacaaatccaacatctcaaacttacaacaatctcaaattttttcagagatcgaaaagcacaccaccacacaccacgaatccaccaccaccgcaccaccaccaccctaccaccgctaacctgaaaaaaaggtaatataatataaaagaacaacaaatatgatacttttaattctaatccaaacaaagaaaaacaccttaaagaaaaaaaaattaaaaaaacccaaactttgtatgagttttacatcgagactaatggggtggttgtgcggtggctctcgtctaagcggctggtgatgtgcatctcggtggtctctgatgatggacaattcggctaggcaaatatggtggtgcggctgccatggtgagactgggtgagatatatatctatatagagagagagggggttgtgcgtctgtgtttgtgatatttaggttaaatatatattttaagttacggttttttaattgggcccaaagtcgatatacaaaaattaaatcattttgcttcggtggataatagtcgcaaagtttataacctctgtttacaactgaagccaaagaaatttgcatcttttttccaccgaagcaaaatgtaaaggacaattttttatttttttacttttttccttagtttctcttttagtgtcattgtagtagctgacgctaattgttttcttttagcttccgttatccactaaagcataaaatctatgcctattctttgcctcggtcaaccattttggtgagacgccttgatcgacgtaaattgtacattttgtagtagtgtttattttgaaaaaaaaaaaatcattcctaacttatatttatttgaaaaacttatattctcaaataaaatttcgaggttgtgcggggttatggtttttgaccattttacccctagtcttaaaaatgcttaagttgtaagttaagggacattttagtctttttgttaaatggagagttaggtggctgcctagacatgtgacccctagcaactaattattcagcaaggttaactcaattaaccttagtttcattttaggaaaatatagagaaaataaggaattaagaaaaaccaagagaaactctttctctttttccctttctcttcgagcagcaccaaaccaaggaagaaccagctgatttcttgttgttttctagaaattcagtagggattcaagggttagaaatacgtagggtttggtggctgttagggttagaaatacttagggtttgatttttatgatcaatttaggttgattaaaggttctagt

SEQ ID NO: 16180 - DNA, 9467 bp, Cannabis sativa
  modified_base (5880)..(5880): a, c, t, g, unknown or other
  modified_base (7848)..(7852): a, c, t, g, unknown or other
tttaatccaatccaatccgcacaagtgcggatatccgtactttgcggattgaattagattggatcgtgcggattggattggatcggatactttgtgaacacccctagtttttactgttaacaaaaaataataaatacataaaataaaataagttaaagaaattagttattatccaatccatataaaacatggaatctttatgcaaccctttttttaagaaaaaaaaaataatatcaaaagatattttgttggctagttagctctatgtcttattttcatcataaatatctccccctcttttgtttctattactatttaataactaataattgacaacaaatattactccaaaagttaagtaacattaatcaaaatagatgtaacaattaaatccttcaactgagttgctctttttttatttaattattttttgctacatagaagttgaccatgaccatgtcctataaaaaaaattatgtctcctaaactaaattctaaacatggacttacatgaagagaaggtttgttttgtttatatgggtccaaactccaaacataactaaagaaaatcaatatgtttcatccttatcaattagcattttagtcaaaagatttaatgggaaagtgattgagactaaatatgtttagtcatgaatagtgcaatttgtagtgaacctatacattgattgcaacattagatgactcatttttatatataaaggtatttttatatatttgtattgatgaatcttataccctcaccttatcttctcccgacaaataaaatatctccaaaattcaatcataatggatttcttgagaaaaaagggtccatttttttgtaccactagattttagttccttcctacttaatgtgacaatgagagaaaatttgtcaagtgggtattctaatagaatagaatagaatagtattttcattttgattttatggtgagttgtgtatagttgtataatatacaagtttaagttacaaatatttaatgggtccacttaatccttaattaattatctaaattgttcagggtcaagttaatcaatcataccatgttgctcttctgacatattagaaattgtctaataatttttggagtactagtgctttgacattagttggaaaagggttaaaaataagtatcaactggtgttataatataacatcagttttgctattgtcttttctttttttccttgtacttattttcattcaatttttattaacttgtttgaacactcaactaaataattggttatgttgaaattactatttttttatctaaagaaaaatatgaaaagtatagaccttaaggattgataaagagaataatatgtatgattattgtataatccaatattatcttaacataaataaggtaatgtaaagaaaattagttgggtccacactccactccaacaatccaaggtctacctaaattaaatatgagacatagacaatgaaaagaaaattctataatgagtactatagccgatctgcttatataaatatcaagctattaagaagaaacccagatattttatttcttaaatatttattgattcaattttaattatttttataaatggattttacaaattgtttgattcgttattaatctataacatgtctttagacaaatttaatactttttttaaaaaaaattataacacattgaaaccaatttattgtcttaaattacctaagtccgtttgtgaaaactttcttctcataattactatagaatcaatcattttacatgaattaaaattaaaatatatgaatatgctgtcgaaataaatatatgaaaaaaattgtaaatagaaatatttttagttgatccattttattgcaaaaatagaaatatgtttttttttttttcttttgaaaaggaaatatataattaatattcaaatgttaaattcaaattaaatagaagagtggaaggaaaaggagttttatgcaatcatttgatttttattttatttgaaattaattatataaatttttataagtgtctatcctttctgttctctttaccctccattttcgttctacttcactttccctatctttcgtcggatttgatcgccggaactgttatcgtctgatcagttcgccggcattccggcgatcagactctgatgactctctgtgcggactcactcactgtcaaatttcttggcaattcgttctccaattcgaatttgaatacagtacctatcttctacagaacaagatctcggttctcagatctactttcgatttcgattttcagtatctgatactgaaattagcgatgttagctatgtcattcgtactctggagctaacaattactagtttggcttgactctaatttgatctgtagctctcgtaacttcgactcctaggtttttagtgttacgttttagggtttgtggtataaaggaggagaagaaatgttcaggaaaattattaagggagggcatcggaagccatccaagtcagaatccaatgatgcttcaatgtatggatatggaccgccaacgggtccgaatcgcacatctggatcggtcactacgatgaatgtgattgtgaaccactcgtctagggctgggccgacccaaccaggtcctaattcggttggggctgcaggagcagtggtggttgttgcgcctccgggaacggtggagcctcttgccttgttccgggatgttccagtgtctgatcgccatagcttgtttatacgaaagttacaggtatgttgttttcaattcgatttttcggatactctgaaatcggttagagagaaggagatcaagcgtcagagtcttatggatttggttgactttatacaatccgggtcgggtaagatcaccgagagttgtcaagaagagatgattagaatggtctcggtcaacattttccggtgcttgcctccggcatcacacgaaaatacgggtcaagagggtgttgagcccgacgaggatgagccctatttagatccatcatggccacatttgcagctcgtgtacgagttgcttcttagatatgttgtgtcttctgatactgatacaaaggttgccaagaagtatattgaccattcatttgtgctaaagctacttgatttgtttgattctgaggatccaagagagcgtgaatacttgaagatgattcttcatcgaatatatggcaagtttatggttcatcgaccctttattaggaaggctattaataacattttctatcggtttatatacgagacagagaggcacagtggaattgccgagctgttggagattcttggaagtattattaatgggtttgcattgccaatgaaagaggagcataagttgtttctggttcgagctcttataccacttcataagcctaagccgattgctatatatcatcagcagctctcttactgcattacccagttcgtggaaaaggatttcaaacttgcggatactgtcataaggggtctgttgaagtattggccagtgactaattgtcagaaagaagttctttttcttggagaacttgaagaagtgcttgaggctacacaatccgcagaatttcagcgttgtatggttccccttttccgacagattgcccgttgcctaacaagctttcattttcaggtttgagacattcccctcaaaaaaagaaaaaatcaatctcattctatctttgctaagcattgagatttattttcccaaattagaaactatgcatgggatacggttccattttgttaaattagcaaaatttttatgatttcctatgaattggttcacataaccaatttatgagagacaaggggcttttggtagttctttgtgtgtttgcttaattggtttatgtttctttccttgtggcgattttcttggtgtgttgtgtgtttttgtttcttcaattgatgtctttcactggagccctttgtttttgtttcttttcggttttaaagttattctcaccgaccttttacgttactgctaatgcagttctcatgtgggtgatactcagccaaatgggatactgtaattttgtatcaatgggaaagtgggaaacaacaaccttggtttagattttacttaattcttttttcgttttaaaacaggaatagtggaccatatatatgcccataacattataatattcaaattgaaggaaatctctttgtttgatttcattttggttggctttgttggtatgaacttgacatatttctttcaaattgtcagttagcttcttggcgctaattcagtagtgttgacatatgaataagttatttgatagaagctttatctataaatattctcttggctatgaaaattgttgtgcatcataacaacagctatgtatacatatatatctgtctgtcgatgctcatgtttgtttattcctgtctgaaaccaatttcggtgcatgcattccaggtggccgaacgagccctgttcttatggaataatgagcatattgtgagcttaattggtcagaatcgacatattatattgccaattattttcgaggcattagagaagaatatccagagtcactggaaccaagctgttcacgggctgactgtgaatgttaagaaaatgtttatggaaatggatatggagctgtttgaagagtgtcaaataaagcatgctgagaaagaagccaaggccagagaaatgcaagagcaaagggagacgacgtggaagaaattagctgatgtggcagaacaaaaaacggaagatgatatgtagttttttacagtttgactccaaatttactttggtgggtattcttttttttttttttgtatctcctccactccgaacaattgaaaaattcggagtaagcagccataaaatgtaatttataatgtacgaaaatttgttagaaacaagctgcagattaagaatgattttgtgaaaaataatattttttgtatttttcaactcttttttgagtccagtggaaaggaaatcaatcttacattttaacaataggtgtatgattagaatgtcttgtttgtcattatgtgtgctatttaaagtttgaaaactgacttgatacgtgtttgtttaaattcaatactttagattcatttttagtaaggttgaaatctgaatatctgatgaactaaagcaacacaattccagaaatatgaacaagtaattttactaggtttaatcgagtttttagtgtaacatgttgaacaagatggcacgatataggttaggtgatgcccatgagatgctcaagtggtggtcaagtagtggtgcatgctggtggaatgttgatacttagtttgtacaacaatgatattttcataaatatctttattattattcggatcggaataggacttggtattcgccatttatttgagtttaggaatacaatggagaaatcatatttgaagaacttagagaattggtatacgttgatgaccatttgtctacagagcaaaaattatatatgttcctcatagcatgctaaaaccctataatgctccttaaggtgggagaacctagtattagctctccacaccccatggtaccttggtgataagtgagctactactagttagtggagatagtatggcgagcatatgaggaccacgagaggactcatatgtcttcatgagctagagtactcatggacattattgggccaacccagtagtgcttctagagatatcaccaaaggttagttggtacgtttccatcagcttgtcggtctgccgcttgcatagaatgtggcctaaatctttaggggacattgtggtgcaccttggccacgagtctctacacgagatgacacagatagtaattcgtggtcatatgtgcatggaacggatgtaccatacgagagagagagagagagagngagagagagagagagagaaaccttcaatatagccatgcaattctcacaaattgtttcgctagttttagcagctgaaacaagatcaggaataaaactttgccatcttgctggccaatcatgcttcaaaatctgaatattaaacataaaggaagcacattgatatgacatgaaatttgacaattaaaatcattagatagcagcaagcgatttgacaatatttaccagattaggattggatataaatcttctacaaagacgaaaaaaggaaagaccagaaaaatcaccaataaacacaaagccttgctgtcaatagcatttggcttgcactaagaagctcaaaagaagaagacttgcctgaaccaatatgatattcaacttgttgacatacagcctctctaatcgaaaagaagtctcattgcttgaaagctatgcaacaaaaatcaaaggtcaaaacaacgtaatacaagcatagctagctgaaagacatagccaacaattttaacatcccatttattaaagtccaccataaaaactgcacctgtacaataacatccgatatataatttttcattccatcacgttgctcaaccggcaatgcattccatctatacttgataacaccttctaacacctgcatggagacaggaagataccaattatgcaaccactcaggacaatcaaattttacatcagccacttcccaatgaattattagggatgtcctgtacatatagctgatattaaaagttttatatataaaacaaaaagcaaccaacctgcaaggcaaagaacttggtattcaggttctttgcattttgtagaatgtgcacgacttggagccacatatcaggattattttgcaactctcgcaatatctgatctgcagcagtcctctgtttacccaaaaaaaaaaacaaaataagttcgaggaataagtatacatgggctggactcttagcatatgcatatggcatatggcataagtaacacatgctatatcatgcaaaagaatattcatcgatattcatcactttaaagcgcataaatttcaaattccctataataattaaaaaaaaagtgttggagaaatgaaaacggcaatgtacttctaccaatacacttacgaacgttgaaagtactattcatagaattcatagataatcagaaaaacccaaatgtttacacaccaacccttcgtcaaaattctcaaaaagcatgaaagagtcaggttactcatagtcacagcttaaattaaacgccattgatcgtcaaacacctcaccaaaaacataacaagaaaccagtaaaccctaccgtatccaaaacaaacgtatctaacaacacaaagaaccaaccgaaagtcactaaaccctaaatcaccatcatgcatcccaaacaagcgaaacacatcaacgttaaaccctagccacaaacacgaacaaaccaatcgcaatgacacacaacaacaacactaaacccagcgattacacaaagtgtagcacagttaagagtccgtccgaagagttgaatttcatcgccaaattcaaaaatcaagaaagaagtataataaattggttacctcttctttagatccggtaccatagaaggcttgaacggtagcatcaagtacagcaacgtcaatgggttgactcaaatccctaagcttctcggccgccatgttggagagagctagggagtgagatgataataataataaaccctagaaatggagcaaacgtcgtaaaatcacagtagaacggagaaggaggagaaagaaggagcgagtaaaccctaggagagagagagagagaaagagagaagaagaagagagaagagaatggttatttataagagggaaaattttgtaaagactgcttaaaaagaaagcagagtttaatatatttatataacaaagaaaagaagggaagaaagaagagtgtgaactgagagagtgagtgagagagagagnnnnngagagagagagagaaactatatatggctttgttttgtttggctctttatacttctcttctctcttaattttttttttaaaaaaaataaaattaaaatggttataataataaattattggaaagttcaactcttttcaggtgtatcgatgtactcttatctaattgggtatttaaaaaaaaatatttcaaattttttttgtggttgtataagataggtcgtgcgggagaaaatagtacacaagacacggtgtatactcttttacctttaagtcaggagtttgatacttgtttaattcttttaattttatatagaataaattaaaaaaaaaatagtgtagttgtggtgaatcaaatgagagtgagtaatgacaaggataattaactcaagcaattcggttgtcaccactagggtagtacataaatttttgtaaaccgtctaatttgaacaactcgtccaaaccaaatcgagataaccagacgaaaaatacaaactgaaaaactcgacgaaaatataatcagctcaatctttatattgggcgagttgaaaataatatcaatctgcccaatcaacccgaacttatactatgatattatattggtattattaaattttttgtattaaaaaaaagaaatgatttatcttttcggggcctgagttggatggggctctaggcgcgtgcttacactgcctacctttaaaactggttctacgtatatattacagttatttatgatattttacaaaattttgagaaattaagaaaaatttaaaactggccctacgtatatattacagttataatttgattttatcaaatataagttaactatataaataatgaaaaaataataatgcttttgattaaaatactactataaaaattagcaaaaaaattagggagagtccctatccattctattatagaaagacattctttgtgtaattagttagagctaattttttcaagtgtctcgatattttagctaaagagtatgtttagagattgtggttagaaatgctcttagaaaatgtcttaagtttgaatcttcatgccttaatattagataaaaaaaaaatctcaaaaaatattaagattgttagtctatatttggatgttggattttagtgagaaaaataaagtagagaaaatgtaagaaaaaaaaagtgtgcacaacttgatatggaaaatttgattgtattgagtgtttttgtatacaatttttctttccatacctaatgtgagaatttaatgttttttattttctacttttttttcgttatatttttcatacttttttatttttttactattaaaatctaacttccaaacatagccttagattttaagaatttttgttcacttttattaatagaagtctgacgttgatgaaagtttaaggagtacaatttatagtacatattaaaatttgtagggcttgatatagtagatatcgaaagtctagagacatgatttggtaaacgtgcaatcgtctcattagtaaatttgaacaaaattgaacaaaaatttttgaatccaacaatctcaatagttaaaaaaaaaaatttaaacaatctaaaaagtttgggatgtgatttgttacatgtcaaaatttg

SEQ ID NO: 16181 - DNA, 13766 bp, Cannabis sativa
  modified_base (8510)..(8516): a, c, t, g, unknown or other
atcccggcctacctcataaaaattgcgattccttgtgcgtgtttagaaggcacaggtcgtgacatgctcttgcagtgtcacgttccgcctgctttaattgatgagtgttagggttcaagccctattgaaaatctatataaaagaccacttttgcacttttcaaagtgacaattattagggatgaactggaagtgagaagcggctctagaaactttcatcaattattattcgaagagttctttcttttcctttgtttgcttatgttcttaatcaattgttgtcaattatttacaatgaatatgggtagttagactttcaattagggttattaatagagaatgtttgacactttattttagttcaacgtgactcaattttttcctaatttaatttgtgtatctattttgattcgtacctaatttctttaaattgcatggccatcaattaactgtttatgatatcaatacgaaatttgagaagtgagtattgattaagctatagtgaaatagacatagattttgatataggacaagagtacctatatgatttgtgtagcatttaggatttttatgcttaatatctcctatgtcctagcccgaatataagtttctttagtaaatccgttatcacgtgaaaattaaaatttgagaattgaattatactaaaccatataaaatagattcaattgaaattaatcaccctaagctttaatcattgttaaattgtaccttaatttatttttattttctttttcaataaattttaaactctttttcataattattattatcgccaaatagaatttaagaatttaattgtttggtaattaactatagtccttgtgggatcaatttcacttttgtgagtttattacttataaacaatacgtgcacttgcatactaaaattttcataacaccattataaaaatctccacatttcatcttaaacttaattagtgatgaatggagttgtaaatgtttgtacacctgctctttgacacattatactacaaacactatatttttagggataaccttataaaggtaaacataaagattgtaacatcgttacatgcattaggggtgtacatcgatcgacttaatcgggttattgtgtatttttaccaactcagtataattactaggttgcaaatatctaattgtaacccgtctaataaaatttacaaaccgctcaacccgaataaatttaattacactaaatatgatgatttatctatttaaaatacgagataaatcatcatagataagaaggaataccataaaaaacttataaactcatatataaatttcacttctatataatcaaaatcagtttcctgatgattaagtttcttaataaaaaaaaccagtttcttgatgaagaaaccaatttctttataaatgatttttagtgagtttcgctctgactgatcgtcaccgggtgggtagaaaacttaaaaactcatttataaattgttagaatttagaatgaaagtgactaaggtgcatgtggttctaactcaaaactaattggctatgggaggagtaacacattcatcttatatatggtaatacaacatcctcacttttgggcttggaaagtgtgagtatattaacgaacgacctttaagagaacacagagttgaacatgacatttgaaagaatcacacaaggtgaaatcaagaaatttgtagattttgaaacatgtcaaagaccctaatactgaaatctggcacacattgaccgaaatgtcctaaatggaggctaaaggagagacaacataagttttaagtttggctcgtctttttagaacgacgacactttaggctcacaatagatgacaagtagttccttttatggctcacctttttggatcagtaatattttgggctcacaacggatcgctaacagctctaatacaatgttagaattcattatgaaagtgactaaagtgcatgaggttccatctcaaaaccaattaactatgaaagaagtagtccattcatcttatatatgataatataaattcacttatatacataattaaaactagttttttaataaaaaaaaaataattttttttgatgaaaaaaaatcaatttttggatgaatggtctttagttagtaatttatctaaatatgagttttaaaatttaatttagatatacattgcataacaaatacattaaaataatttaaaagcaaaaaatacaataaaaaataatcaaacttaaaagctacttaagaaaaaaaaaattaaaactcattaagtgtaaatttaatttttaatatggaaaacactaacatggtacatttttttttgaaatacactaacatgatacattggtgcacccttttaaccatagaaatacttttttatttttttatttaagcgtttatatattacaatcatgttttatctgggactcgaacccaaaacttccaccacacacgtgccacttgagctagcctcaagtggtcatagaaacaccctttaatttattaccatttgtactaacaaaactacttatcttttataatctaaagaacaacaaaccattaaatttaatctcttgtatccatttcttctttcatctatgaggtcaggtccgtcacttttttgaatattgatgtttcacaaccaccagttttaattatgatttcactttttagttgataattacctattttcaccaaagaaagaaaaattgcttagcttattcttcaaacaaaacgacatgtcgtttttattctaaactacagctagtgaattatagtgcagttattataggaaggaaggagggtacatagtagtagtacatagtacacactacacagtacacgaatgcatacatgaaatgaaagggaatcccagtttctgagtcttcacattaacgagaaaacacgactccacagacgataattgcccaaaccaagtggaatccgattccacgtagagacaattcattggttaatccgagatataagttaaacaaaatgaagatcatggaaactaaaataaggctcacatgcggtcagaactatttttcagcagcaaagcccatgtgttgttttgcctgataccgttatctccgtatgaaaagacaaaactacccctaaatggaccccacatatctcgttatggtcccaccctatcatctttttttccaacaaccatccaaaaaaagaaaaaaataaaaataaaaataaaaattatttggtgaaaaaatataaagtgtgtaaaaaagattccaatccaaacacagctgctttatatatatattttttaattaattaattttttttaatgtgttattgtctttttcttcaatctccaacactttcccaacacattttctttctgtccaaacaccaaaactcttgttcctttctctctctttctgtagcttttggattctcccaatacacgtctttcctgaaatttcaaaatccactccctcattttccactgaataattttgtttttggccattctcgatttttcaattcctcgaatctctttagctctgttttaaaattcgccagcttttgtttttccttcttcttcttagattgattttgcttttgagtagttagcttaagatttttttggccaatcctattgtttcgttttggatctttcttttttctactatggtggtggtggttatgattactgctccaacttagatggtacggttttctgtgtactggtcgttattattaggtatcggatttagctagggtttgtttggttttcatttctagggtttgttttgtttgttaatctggtctcaacaaggagagagagaatgccacctgaggaaatggcagtttccggaaatagtggagatgggattcagtactcgttcgctgtcgagtatcacggtcctccggtgaactatgatattcctcgagccgttcctatcaacgtcgagcggattcctgtggcggctgtggtttcgcaggtacctttgtctgatactttatccttgcctgtggttcaaccggtattggctccgacttctttgaggaagcccttttcgaaagagcttgaacagttaggttcttctaaaactacggtttctcctacttctgtgatcgctttcgagcgtagtggaggggaagaggatgccggcgattcggcttcgtctaaagagttggaattgggttctacagtttctccgaattctgttaatggattcgaggagagagctacagagaatcgtgatgatggtggttgcgttatgtcaggtgagttgagtagttcaggtgctttggatttttctaatgggcattttgggtctggggaattgtcagacggggctaataggtcgatgggagtaattggttcctcttccattagtcatggccactctcaggatttgttagctggcgctgggagctccagcaccatagatttttcggatagttttgataaatcgcgaggtagttctagagctttgagggcttccattggaagaggggaaagtttagacatgaatgatttaaatcaaccggattgggcctcatccgaatcagtgttgagtttggattacccgtcttctcgggtttcttctataaaggctgcggattgtaataacgtttcgagttctgatggaagacggcctcaagtggtgacatttcgcgatattgaatctgatgatgatgatgctgttgatgaagaatttagcaaggaagaacctaatgttgttccagccaggagagaacctttaactaagggaaagaaagggtcttgttatagatgcttcaagggaaatcgatttacggaaaaggaggtctgcattgtttgtgattcaaagtattgtagtagctgtgtacttagagctatgggatcaatgccagagggtcggaaatgtgttacttgtattgggtattccatagaagaatcaaagagagggaatttgggaaagtgctctcggatgcttaaaagacttctgaatgatttggaggttaggcagataatgaaagctgagaagttttgtgaagcaaatcagctaccacccgagtatgtttgtgtgaatggtaaacctctttgtcacgaggagctggttttactgcaaacctgtcaaaatccaccaaagaagttgaaaccaggaaactattggtatgataaagtttctggtctttggggaaaggtgaatatggtgcttttgaggaatttattacttctgttgcccaaagtttgttccattacttaattaattttttatttttggatgattttaacaggagggacagaagccttcgaaaataattagtccacatcttaatgttggaggtccaattctaccagatgcaagcaatggaaacactcaagttttcataaatggccgggaaattacaaaagtagagcttcgaatgttgcaggttaaagctattccaggcttcattagttgtttctgattttgtgaattgattgttgatcggcaaagacttataatatatttttctgaaaattgcagttggcaggagtgcaatgtgctggtaatccacatttctgggtaaatgaagatgggtcataccaagaagagggacagaagaatacaaaaggatatatatggggcaaggtaatttgtctgactaaacatggttcttttcttgttgttctaaatgaaatctacatttttttagatattaacgttcccttgaacttttaattcctcttcaggctggaacaaagcttgtctgtgctgtcttgtcactgccagtcccttctaaatcctttaattcttctgaagagccgctgaccagtctttctagcagacctgttcctgactaccttgagcaaaggacacttcagaagattcttttagttggttataatggatctgggacgagtactatatttaagcaggtactagatttatagcaaactcatctctgaacttcttatgctttttgttcttgttatgctaggattacgtccccatatggaatcgcattgcataactaactaaaacatttgggtacctctatttcgtaaaagaagcatatgtatcaacttaaatattttttctttttttttaaggccaaaattctatacaaagatattccttttccggatgatgagcgagagaatatcaagctaaggatccagagcaatgtttatggctatcttggtgtacttcttgagggccgtgagcgttttgaagatgaatgtttggctgagacaaggaagaaacgatcttctcgtggaacagactctcttggtaggtttttttttatttggtttcagcttccatattttctttgagtagacttgtcttgccagttctcaaacacatagaaaatgataccactttccagacatacaacgatagatagtgggaatctggtagtaaatcacaactgaattgagtttctgttggtaacaggaaattctgacgaaaatgatgataaaactctgtactcaatcggtccaaggctgaaatcattctctgattggcttctcaagactatggtctcaggcaatcttgaagccattttcccagctgcatcccgtgaatatgcaccattagtagaagagttatggaatgacgcggcaattcaggccacatacaaacggaaaaatgaactagaaatgctacctagtgtagcaagttacttcttagagcgggtgagatcatgtttttgtcatttgtgcatgacttcttcttgttaaaaaaatcattattctttaaagctatactgtttaccttctgattaatgtaatagacttggaagtttgcaatttatatgataaggctagaaatcgtttaagaatgtaaaaaatctaaagaacgcaagatttcttgtatgatactgtgtaaagaccagcaatgtctttatatggctacacttaagtggtactgtgaattcttgtcatgtttctttacccttcttgatgctatctatgctgctttaaagtaaacaagcaaacatgatacatttatgtaggtggtcttagtccggaatcattaacaaccagtttataaggatggttgcttaggattttgttgttggctaagttatgaaccttagataagttagcactttgagcacaaagttcaaagttggatgaatgagttgagcttttgctaattgagatttgtcaaaggttttcaacaacaattggatcttgtttattgttatccttctaatatttatgcaaatacatgatcaattattgcattttgttttgtttttcatgcatctaatattatttgtttttataacctttcaggcagttgatattttaagaatggattatgaaccttcagatttggatattctctatgctgagggtgttacttcatccaatgggcttgcttgtgttgacttctcatttccccagtcatcatccgaagatattgaagctgatcaacttgattctttaactaggttggtagttaatttgttaccagtgcataaagcatgataatatatatcatgcttgtatgtaatactcttgactttgttatacatgcaagtataaattcattgaatgtgttagattgggcctggtagtgggaattggtggtaattttgggtggcagtgctacattggtactgaccagccccattttttaagttttatttaacttgatcacataacccaataagtaggtttggtattttccatttttctgtttctcatagggttcattgaatctgcataattaatgagtttccgtgttcacttgtttcttattaacctcaatgtaattgtttgttggtgtaggtaccaacttattagagtacatgccagagggcttggagaaaactgcaagtggctagagatgtttgaagatgttgggttggtcatattctgcgtctcattaagtgactatgatcaatgttcttctgatgcggatggatctttcactaacaagatgttgcaggcgaagcgattctttgagagcattgttacacatccaacctttgaaaatatggacttccttttgatactaaacaaatttgatttattcgaggaaaagattgaaagagtatctttaagccagtgtgaatggtttagtgatttccatccattggtaagccgacaccgatcaaatagcaatagtaacagcatcaaccacagcccttcattagggcagcttggtttccaccacattgctgtgaaatttaaaaggctgtattcatctctaaccggaaagaagttgtttgtttcgttggcaaggggtttgcagcctaatagtgtcgatgcatcacttaaatacgcgagagagattttgaaatgggatgaagagagaggtaacttcagcttgagtgaatactcaatctatagcactgaggcaagctccttttctcattgatgtttttaggtcataaaaggcttgtaaatgattccacttaccttgtgacgttgagattaatgccactgccagtgtaaatatatggggcttgtatatgagcaatagaagattgtttcttttttcaaaccatttcaacaacaaaatcatactcagtagagagagagagagagagnnnnnnngagagagagagagagtgtgtgttaacatgtggccggccacattgtagcaaaatttaacaaaatcagatatgtctttgttttgtctcatctttatgaacttattcaatactaaaaaatagtaatgcttctgaacaactcataggatgtatcacatctttcaacacgtttttcttacagttgattcagctctatgataacaagatttgcataatgtgattcttaatctataaaaagatgaatcatatggtaattgtactatttgctaattaatttggattttgctttttgcactttaaaatcttacatttactaaccaacaatgccatagagaaaaaagaagctcggtatgatagaacatgtttgggacaagagaattatttatttggtgtaaatactaaatatgatatacatatacaaattgtaatcgccttctttgaggcttttaacaaagtgagattacaaaataaagttaaaaagaatggttagcttttgacacaaggtaatccccgaaaattctccttccttaggaaagagaaccctgcaaaatctccggaagttaaatgtatatttagtcatcaatgaaactgtatcgattctgttcccgtgtactcaacaaaatgttcttcatagtccatcccattcccaacatctgttcgtttagtatgcataaatcatctcgagcacgcactttgcactcctcgagcaatttaaaccattcatgtagaaccgaatcagataaatcactagcttctaagattttctgccatttactcttgttcaagtgaagggctttacgtatatagcatgcctacatgaggtcatcgtattaatcttcaaattgaatttataaaacagaagctgaagatgtttatcttcttacctgtaacaaacccatgataacattgccagtggtagctccctctcgtagacaaatgataatacgttgctataattcaccaacaagcaacaaggaaacttggtaagaacaaatagtgtcacacaatattgcaacaagctgggttaaacatccattaatatacttacatgcattcttttgggcattctggtgtagaagatctccatggatatgaagtaatactctgcactactcaaagattgcattgccatcattgacaattttgaaaagtggtccttgggatttagactcccaattctgatgggccacgggcctttacctgaaacaagccttagtatgagacattgattttaagaaccaagtggtttgatcttgtcaaagcacaaacctaaaaatgagaaatttatggatgagacctcacctttgctccatgggagatcaattccttcgagtttactcacttctgcaggtgaaggcacatatcctaactcaacccacgtatttagtataacctcaagcctatcctgaacacaaaattgcaatggaacgggatacttttaaatcatatttacatcagtatgtgtagacaacgaaattcaaatccactatatttgtgtctacaaaaagtatttagcaccattaagagtgcaagcatctcattaattcaatctcttacataaataacataactcagactctgaacaaaaagcccgcatgctgactcaccttggttaaggtttgcagatggacatgcttaagctcttgatatattccaaaaaggtcaatccccgagaatattgggtatacaataaagggtaatcctgcttgcaatcttgcacattaatcactttattagaaatcttgcaagaaaatttaattaaatgaggaatgcatacaagttgatagccttagattagttaatgtacccaattgatgaaaatcaaattaaaaaagtaaaactaaaacgttaacatatataaccaactaattagactcccaaataaaagtgaaaaataaaacctttgattgttcttaaacagcacgttcaagaatgcagcaaggagaaggccaaggttatcaaagcacacagtttggatctgaaaccagagtacaaacctagtcacaacatgtctcctggggagtttagaaacaattttactattaaataaatatgcatgctagaaaagctcataaagataacctgtgattttgcagaaaattcacctagattatctgctaatgcaaagcttcgatgaacagcggactgccaacacaaaggcaacatttagactttccattatgtgctaaaaaatgccagcttcaaatcaggagcaacacaaagtataccaataataataatactcataatacagattcaaatatatcagaattgatgtgatagtaacatagctaaatagctttataggagacgaagccttacaccagtagctaaaacgcaagccaaacttatttgtttggcaatgttggctattgatgcaagaagcaagaagtacttgggaaacaaaggagtcagcaactcaactccaatacctaaagtgaagagaacagaggtggagaacctaaccctcttcaaaagaaaatatcatatgtcagaagtcttaacattacagtctaaatctagtaaatcatacacttttctaatttgcagttcctctaacaattactaatagcaacatatccactattttagaacataattcttatttttttggtttataagaatactgatcaaactgaaaaatatttgaatccataccttcaaattagtatcaaaagtagatgctaggctagcagtgtagatgcatctacttagtcgtccaagtccatctttcaggacccaattcagagcagcagctgatggaagtgagcgagagtacccaattccaatagcccgaaacattgcctatcaacacattcccaacagttttctcgcttaaaaagtacaaaacccttttcattgtaaataaaaatccaaactttcaactatatatatatattatatgtttgtgtatttattattacctgagtggcaagaacctggagggctgagctgaaaatgcggtgcaagcatttccatttgacatattccatataattttgaccaacttttttgggaatcaataaattccgaatagccaaactacaacctctacccaagttacgaattccatcttgaaagtcaaaggagaaggaagaagaaccaccatcaacaccaaccaactgcaaactatccccatcccataagtacctagaaacacaacccgagctctgaatcgccaccggaagccgacccagttctttgctaacgctttcctctggttcgtaaccgtaatctatggaagttctcaaagaggtggctattgtacggattcttaagcaagttttggggggtatgagtatctgggttttgaattgaggttcttgaattgtcgtccatggataaggaagatgtggatggagaaaggattgcatgagaatggtaaaaatgcaaggtcctgctctgctgcaagggtttagggtttttcgagctttgattaatgaaatggatattgtgcttaaaagttttaacttataaaaaatgaggatgctatgttatcactaacgttgttattttgagatattttttaaaaatctattatattaaattttatggaataattgaactaataataatattaacactattttataattttgtatataatattttaattaattataaaatatgtataaaaaaatttattattattttctcatacatttttatataccattaaattttttttgtagcggtaatatgaccccctaaaatgactttattctactttatttatttattttttttacatattaattaatatcatatataaatgaataaactttaaaaaaatttgaaaaataacagacctaaaacttatggaattgtttccacccaaaacataaagaaagaaaaagaaagtcaaaactataagaaagaaaaaaagagagcaaaagaaagagtgtatgaatgattactaggtagtgatagtaataatactagtagtagtaagtaagaaggtaaaccactcgaggctagctcaagtagctataagtgggtgtgtgagtgttggaaatcctgggttcgaatcccaagtaaaatatgattgtaatatataaacacttaaatcaaataagcgtttataatcaaataagaaggtcaaaattaagaaggcaaaaaaaaaaaaaaccattattgaaacaagttattactctaggcgaaaagaaatgagaaaaaaataaaatatcatagctacatattgaaaacaatgaaaaaaaaaccacattaattggataaatagaattttatttatgtaaatacctgagagatagagatgatttattggattgctctatacctgaaaaaatatatatatagtaaaataaaattaattaatattaatgatacattaataataataataataataataataattgagtacttcttgctatcaaccaagaatgttctgtggtattattatattatggtatatttgtcttatatgtctatattatggttaggaatgtcaatcgggtcagccccgccacaaatccggtccggcccgacatcagttcggcccggcccaactccttcttttggcctagcaggtaagccccgacccaagataatcggaggaaaagggaagtagtgcagtcaatattagtataattgttattgatattctaattattattaccggataccatacataattattagaagagcagaaagaggaactatactcatgtcaaccttagtacgtaatcttcatcaccttattgttaattcaaaaagatatactttacaacgactagttgctctttgaaactgtttatacaaacaaaataatacaagaatcgaatagcgcccttgtttattattataactataatactctttttaacaatataattataaaaacagaacgtaaaatccatataaaaatccaatacatacgcatacgtataagttacaggcacatactcatatacagatattatttgtacatacataaagatttacaaacacacataacacaaacaaaactcagaggtaaaagagaaagagagttacaggaacggaggtaggttgagttcgactctcggccgagacaatagactaagggtgggtgccgtccctgtgcggtggccggcgccgctggaagaagcttgacgatcaagagaggggacgatcggacttttagtgattaaaggatttagtcgatacagtaaagaaattgggaatgatgtattttagggatttaggattttttaacatttgaaatccggccgggccgggcccgaaataatat

SEQ ID NO: 16182 - DNA, 9685 bp, Cannabis sativa
  modified_base (5889)..(5897): a, c, t, g, unknown or other
  modified_base (6139)..(6140): a, c, t, g, unknown or other
ggtcggtggcgcccgagagtcttgcttccagcgtgcttcatgctgtggaggaagtccccttatggtgggttttggtattggtgcgtcagatgggtgtcagacatcgttatttgggaccggttccatggtgcctgttcttgtaggcgaccaaccgccgctcttggagactgatcgtctctgttgagatggttcttgcctccaatcggaggctcccgctctattaggcgacatagtgatgatgggggtaggcttgttttggctctcttcattcgtttttgaggttaatgggtgggtgtggtccttattaagtgtgtgctttggctaggagtgttgtttttcttcctcctttttcaaatctcagtgtataagtgggttactatttatgtttactggctctggtgcacaatggctggatgttaactttcagagtgttgtagatatagaaggggagacttggatcttacctagagggatgtgcttcccttgtcctagcaccttcactgtttagaaccacaatgagagactgagtgtggacctttctcgtaggaagttagcagcggtcctttgcttttaacctgcttgtttaaggctttcaagcagtcttttttgtgttttgggagaggtcttggaagctattttattttatttgattacttattattttgtattttagtttagttagtattttttggtattgtgcactctatgcctttgtggcgtggccttaggccttgttttgaggctctatccctttagatgctcctatgtaagtcttgaactttttgctccttccagtattagtgtaattaagtgatatttgtgtcatctctcagtgagattgtgtggtttgtttgttgggcgtgtaggactttggtgctttttttaacctcgaatgacattctctttcctcaacaaaaaaaaaaaattgtattctaaagaaaataaggaaaatgattggaaaaatatgttgatctatctattacatgtaactaatccatgtagaactacattaagcatataaatttggatgcttagtccttggtgaaattttttgctaaatttgatatttggtctaaaatttaaactatcatgctaattaaataaaacatactaaaaaaagaaattaaatggctttattgggatccacgtaacgtataatgtacagtttagttcccctacttagctaaactctcactctctcaatttattcatgtaagtttcttcataaagaaataaataaaagctttcttgtcttgtagttttccttaggaaaatttataattactgatattttttttggactcagttcttcaaagaggaaagagatctggtttgtgtttggaccatggtacggtaccatgcacgaaaagccgccgttggttggttttcgataagggtagctattttccgagtcaaagaactaatcaaacgcctccacgtgtcatattacggatgacttgtttgacaacgcagacacaaaattaaaacacaccatataactctctccctccttttccttcattctcttccttccctatcatttactacccacccctgttatccacaaaactctctccgccattaacgccaaaaacagagcttccccctgaaagagaactaaactatcagaaagagacagactttgcattaactcggtgaagtttggttttttctttatttagtatttatgtataaatgttagggtcttgaagaagaaagagttttagaatatgctcgggatggagagtataggactcggtgctcggaactttgtggccgtgacggtgtcgtttgggtctggtttgaggctaagaagaggagggttggtgaagagaaaagctccgttttgtggctatggtttttgcaggcgtagttgtctgcgagtgatggccaatgcggggagtgagagttgtgtggcggtgaaacaaggtttcgcagacgaagaggattacataaaaggaggtgggtctgaactcgttttcgtccaaatgcaacagaacaagtccatggaattacagtctaagctctctgacaaggttaaacacagtgctttgtatgatgactttacatgtatattttgattttattagcatgagaaagtcaaccttttttagagtttcgttttaattctggcattaatcattttcaaaattggggtttctgttaaggaatcatgtagtaaagccttatttgtttatctatttttatatatatatttttttttttgcagcttcctgcaatttcaattggtgataaaatactggatttggtggtgataggatgtggtcctgcgggtcttgctctagctgcggaatcagctaagttaggattaaaagttggactcattggaccagatctccctttcacaaacaattatggtgtttgggaagatgaatttaagggtaccttgctttgtatttggtttttgtttttatgatttctaatacactaatactgtagctgtttatgatgatgtattattatttgacattgttttggtttttaatgacttattgattatctcttcctgtcaaccaactgttgtgacaaaatttgccttattatattgttgcttgttctagattacatatattatattcaagataagctactcaaatactatattatattactagttttcttatttttttattctaaataaaaaaaagtctacttttgctagatattattgtagatttaataatattaaaatatgcattgttttcagatcttggacttgcaggttgtattgagcatgtatggccagacaccattgtttatcttgacaatgatgatcctattctgattggtcgtgcttatggacgagttagtcgtcatttgcttcacgaggaactgttaagaaggtaagacaaagcctgtacagtgaaaaaaagcacattatatttatacatgttaaattgctgatggtaactttatagtgagaattgtggaaatggtattcatagatatgtaatatgtattaatttttcctaggtgtgtggagtcaggtgtttcgtatcttaatttaagagtggaaagcattgttgaagctaccaatggtcatagtcttgtggcctgtgaacaagatattgttgttccttgcaggtatgtttttcttacttttatcatcataaaatggagacttgttcaatgtagttatcattgctttgcttcgttccaattctaacatggtattataggcttgctactgttgcatcaggagctgcttcagggaaactactggagtatgaggtgggcgggccaaaggtttcggtgcaaacagcatacggtgtggaagttgaggtagaatcattagcctaatacagagaacttgttacttgttgaatactgggaattctttgtaagtggcgaaagtgctaaatatctttctaataacttctatcaactctcaggttgaaaataatccatatgatcccagcttgatggttttcatggactatagggatcacttgaagcacaaagttccaagcatagaagaagaatacccaacttttctctatgtgatgcccatgtctccaacaagagtattctttgaggttcctccagttggcattattagttttgctgtgttatgtgattcttcaccataatcattggaaagagttttacataatctttactttttcttattcaggaaacttgtttggcttccaaagatgccatgccttttgatttactaaagaacaaactcttatcaaggttaaagacaatgggtatccaaatttccaaaacttatgaagaggtatgtagggattgacgtgagggggtagggatggctatatttctgggagcgaactcctatccaacctttgctttttactattttttttttctttttttcatttctcatttttctttggtataagaaattaaaatgcattgaacaacaacattgtttaatccaggaatggtcttatattccagtcggcggatccttgcccaatacagagcagaaaaatcttgcatttggtgccgctgccagcatggtacatccagctacaggtagaaaacttcgaacgttaatctaacttccatttccccccccaaaattataaagaaaagaaatctaaatgcttttttaatacttgttttctcttgaaaacaggctattcggttgtgagatctttgtctgaagctccaaaatacgcttctgtaatagcaaatattctgaagcagggccaagccgagggcctcctaagccgggaaagaagtactaagaacatttcaatgcagggtaataagactactagactctatactggctgccttgtgattgtacactggaatatgttcttattagtatgcttgtttatttatttttctctttctagcttggaatactctttggccacaagaaagaaagcgccaaagggccttcttcctattcgggttagcactcattttgcagctggacattgaaggcacaagaacattctttcgcactttcttcagattacctgattggtatgatcacaatactagcttttcttatttaaaatcattgatataaacatgcatacaaacgagagcccatgaaagagtaattcagaagaacatttgcttgctttccaaatggtgtgtagggattaattctctctctctctctttctctcatttttcaggatgtggcagggttttctaggctctactctctcctcagctgaccttgcagtgtttgcattgtacatgtttgtaatagctccaaatagtttgagaatgtcccttatcaaacatctaatgtctgatccaacaggagcaaccatgataagaacttatctcagtatatagcttgtaatgttacttgttagactgcccacttgtcacttttgagggtttttaggctcttgtgtagatatatgtatacatacaagtccatttttttttgttgtctcaataataatgttctgatttcttctccagccgccagaaaaaaaatagctacaattaagtctttctatactttttttggtcaggaagtctctctatacttttttcttgttctcagttatgaattttggactttaaaaagcaaaagcaattcaagttgaaccatcaagaaaagcttgttttgaccatcatttacaagtaatagagttacaaaagtgaggtcgatctcacaaacaccaccgtaaataaatatcaaacaattaaacttttatttctaatttagcaatcgaatcaaaggattttataattaaataatctacacaaaaagtaattaactaaacaaataaataaagcaattaattaatatgatatcaacaatgataaaaatttagagtaattaattgcaattgaatttattttacatggtttaacataatttaattcttagtaattttcatgtaataactaatttactaaataaatttatattcggaataggacatataaatcacaacctatatgcaaatcttttattatcgtgataaattgaaatcctaattgctacctaaactaaacaagtactctcaccctatatgtaaatatgtatctatttcactatagcataaacaatactcactttttagatttcgtattaatatcataaacaattaattgatcgccagatgttacgaaatttatgaacaatacgcaagtgcacgtaatcaagtagtaaattcacacaggtgaggtcgaaccacaaggaattggattgaataccactagactaaatttatgattctatttggcaaaccaatagtttttatgattaaaacaaaacaataattcaagaaacttaaatagacagataaaaattaatcaagatgagaaaatagggaagagaaacctgttgaattgcttacccaattgttaatgactaattgctatcctttttcttgatgtgaatgacagattatacaattnnnnnnnnntcttttcagatcttttaggttctatatcacatgttctctaattaatctcttaattagaatcacatgtaatcaaccttaagcagtaatctaattgtcagataggtcacacaaatactttcgtttcacataaaacctagattatctaattttagcattctcaattctcacttttcaaattttgaattgagattatagaacatgtagaagatgatcaagcttacacatggaattaaacacaaatnnagataatttcacaaatcaagattaaaggaatgacaattgacattaactaggcaaaactttgaataacattcatcatcttccccgattgtgaatttagttcatgaaaataaaattatccacgattaaatctagaacagaaatagacataaagaaattaaagagttgaagaaagaaactagatggtgatttctctctggttcatcaagatagcttcctctcctccttcattcacttttcggggccgatttctgatgcctttcatcatctgagttgagtctcttatataggaattaaggttgtgcctctaattggaaaaatatcagaattaggtcgaaaatcccgtgtttcgtacctggtcgcgactaccttaatggttggtcgcgaccataggaaaaaatggaaaaacacgcattctaccaatccacctaagtcgcgaccgtagtcgcgaccaaagaaaagggtcgactagggcttgtcatggtcgcgactactgatacgtttctggaagctttagcagatttttcaccagattgtcctgtctttttgccaattgactgaatttgaactataatgcaccgggaacccgaaacaaggaaaatcaagcgtaaaaccgctccaaaaaggctaccataaatgagaaaatgcttattaatgtgacccgaaacttaggctaaaaatagcctaacgaaattcccccaaactagatccttactcgccctcgagtaagactaagactactactaactatgctatcaaataatcataatgctgctgtctcaagttccatttccttccattgatcaaactagaatttcaattctacactctaacaattaattcatgctcatcttatcacacaatgcacaaacacaaattgacttcacaattgaaacaatgttataatggtcttactctttccaatcattccacaaaccaatagccaatatgcttgcatgcttacctctctccactaatgttgacaacatccttttcggaatcaataggtcttgcagggtaaaatttttggacttaagtatttggtaactgcaaagtgttcttggcgaaggatatcataagcacctttataacccccaagcttcccatatgttgaaatttcttcgaagtgttcccacaactaaccaacgattgagaaatttttttcttatgtttttttttcattcacctgacatcactgaaatcttctatatttttcttcatttcattcacatttatttatttttttcattcaagtgatgctgagtttacaatttttctttcacctttctcaagcacgtaagatttctttcttctatcctttcacacactatgtatttcactcccccaaacttattgtcaagcttatgatatcattgaagatgtaatgaggacaaaaaaatagtgtggatacatcttttggttcaatgggaaaagaaacaaaacaggtttaggctcaacagggttcactaaggatattcattttatggtaggcttaaaaggctcaaactatccaaacaactgcctaaatcatgttcctattgaatgctgtcaaggatttcaccttgagagaataaggcatgcaagttctaagctgtccaaccagtcttaccacaaaccacagtaaaacaattataacatatttcacagatatcaaattgcatccatacacaggttttacaagcatccaaactaatccaaagagttaacagaattaagcacacagtttttacaacttcaggacactttacaatcaacagcaacatgcaactatccttagcttattgccaaatcttaagaaaactaaaacagaaaaattaaaaatttatgtccctccccccaaactaaagagcacattgtccccaatgtgtaaatagaaggcaaaggaaagagacttacctgagaccctcataagaaagggtctggtggcgacagttggtcatatgggtgaaaacgaggaggtggcgccagataattagggtcctcaatcccaatgttcattctggtgatcagagagttaagttgattaacttgcccctcatcgtagatactcctttgcaccatgtagtttttcatgtggttgttctgctgaattatataactcatctgtgcatgagtatattccattgctggatcaatggccccaagaagttgtggtggctcttcctcctcttcttctacactgggctctctttgtcgccttcgaccttgaggttacgcttctaggggtggctacccataaggatgaggttccttgagcctgttaaccatgttgacatccattttttttgcggtaccaccttgttgtcatatttcaattcaggcacatcataggtcccgcaaagatcaataatcactccagccaacccaaggccaccgcctgtggctccctgaacaatttgctcaatactacttagatcacttgaccaacattaatattgtaccccttcataatggcgtacacatatttcagtctatccatctgaacatcagaaaagtacttgctcggtaccaaccgagcactcacaaagtacaaccagttttagccacagggttgatttcacactggtacagtaaattggacgacccatcctgcccatcattatcatggaaccgttatcccgggaaccccacaatttcgcaacatctgccatatcaaattgctcttcttcctcaataatctgcaagcgttgatcttctctagagtagtcaggtaaggagtacatgacattgatggcatcagatgtggcaggaactttctcgccatgcgccttgacctctccgttccttcgttcaggccaattcgccagaaattcacaagccatagtaacattggctcggtctttagcatcaacaaaggtaccccacttcattccctcaatttgacctcaaattttttcaaactaaggttgacgtctctatggagcatcagggaactcaataccccgatcttcaatatagggcctactctttagccgaaggaagcgttgttgggccgcttcgcttacaaaccaagttttatcaaaagttgaagatggtgggttggatgatgaaccctcctcttcattaccccttgttcttttggcacccataatcaacaaaaactaaaattttttcacaaacgaaatttttttgagaaaattaggcagcacctccccttatatttcttgatttctcaaaattcaaatatcaccaaaataacacaaataacaccaatggcaatccacaatccacaatactcaaaacaatactccaatcaatcacaaaacattccctaatactcaattaattccaataaaccaccaaatccttcaatcaatctcttaaaataagaaaagggatgatacttactaattgaagaagccactaatccacctccattgttgaatatccttgaaaagcttgaggttgaagatgatgaatagtgtttttggatttgggtgagaattggtgaatttgggtgtgatttttgaagaaaaatgatgattgatgagaaaaattgaggtttgggatgatttggattgaagaatttgtaaatggatgaagaaaat

SEQ ID NO: 16183 - DNA, 6880 bp, Cannabis sativa
taaacgcaagtttagtctgccttaactcaaatctaaacccgtcctgctaataccatagtgaagattgtcgattatatttcttgttggactctcttctcccaacatcagaaacacttctcaacctaccataatcttttgacgatgaagatgaagatgaagataatggattaaaagtgtttgtaagttttgagaaaattccacccacaaaaccattatttaatctttctttgtgatgatcaaattcttcttcatcatcatcaagaaaatagccactttcatgagttgaattatgattaggagaatcccaaaggtgcaatctttcaacaatattagtgttgtcatgatcttgttcatgtgatgaacagcttattccaccaactgaataattgttgtcatttgctgaagagggctccattattggcatatttgatgaaatgggtccaaaaccaaaaccatagatttctttttttactttgagagctttcaaacgagcttctttaagtaatgttgatcctcctagaagctttaatatctcatctgacttcctttgcatattctcaccccagttgattctaaaaaaaaaattaacaccaaaatttatagtattattatttttgttgtcaggacaaaagctcacaaaaccttagggcccaaaataaaagaaaaagattaattattttaaaaatacataattaaaaatatcatgtattgttttgaattaagaaggattggaaaaattgtatttgttgtaattaagttggaacaaattaattaaagtgatgatatataagatttaattgttacccgttgtggtctacgaattgaaaagttgctagctggtgaatgacttgggagtcacaaacaaactcttgggagaaatctaaagggccatgagtgagcaagaactcaagaacaacaagagctttgtaagcttgcctccattcattccaattaacacaacataatcttctgtgaagaacatcaacaattctccaataatcatctacttcattataacatgcttctgcaattctactcattattcttgggtcagggctgcatgaatccccatttgttgcttcctcagccaacctatatacatatatttatacatacaacaattaattttaattatatattattattattattttatcattatattatcgaaatactttactaaagcatcttaacacgtgtcataatgctattggtatatagattttaatgtggaatctcacatatcacatattgtgattaaataaacaatataccaattataactctcgtgcatttctatatatggtgttgaacaccttaattatgcaaaaattaacgtaactaattttaatataaacaacttgaagacaattcctaacataaattatgcaaaaattaacgtaactaattttatcataatacctctagattaggttattattaaatttatttttgaccaaaaatcaattgaaaagaaaaagttcaatcaataacttttataaaacacagaatacaaaataatattttaaaaaatatacatcacatgataaaaatgagaatcccagtccgtacttatttagaaaaaaataataagttcataagaaagaaaaaaaaaagctaaatctaataactattagcctaaatatatactgattataatgacttataagatatttcgttcatcttgagtcattataattcttttgcaaaattgtttttttatccgattcaactatttattttatttattttttttttgtaaagaattatcgaaattaattcaaaggaaaaaaaatcaaaatttgcttacagttcagcttcagtaacatcagtaaaagcaagcctagcaatgttatatttgtgttgcagaaaagaagatgcatgcttcttaataagctccattaattaatatatataataaaaaataagtaatcaactccaaatgaaatatattataatatatatgtatatatagaacaaaagaaggtagtgatctaataagtaattcatgtaattaattagttaattacgtacgtactactagctagctagtagttcatttgaaataattaatcatataagtgttgcatatatagagactaccaattttaagttgtattgggtgatggaccatgattgtagttagctttgagatttatatgggtgtgatatggtcaacatcactaattaatattattattatttgaatttgaccaaataattaataatatatgcatgcatgttttgtttttcaaattattctttcaccatatattttaatttcatgcttgactaattctaggatagtaacattcctttatgatcatcccgagtaataagaagctttgcacatttggtaatcatgaaaaaatcatcaataatgttgatctttcaaaatttgatgcaacatatttagaaaagggaaatacattattagattgcaaactatatattatttataagaaactatttaaacaccttattatcaatattcattttgagattaaattttataattcttcctatgatcgatatcaaagacaaataactttgataaccagtttgttttattcgaatcttaatttttcagtaaattcataccaaaattaatgattaatctccataacataataacaatatattcatttaactaggtgcatttaaaggaaaataaaaaacatatagaactatatatatatatatatacatccatagttaaataaaaacataaattcatatatgcacgaacaaaaaatttaaagaacagtaactttttgttgataataaaaaacaaagatataatattattaattaatgaatctcaaatttcatagagtaataatatgtattattttaattaattatttatacgcattaattaattcaaatttaatgattattttttttttgttaataacgattagcatttaaatattatgcttcaattaagagaatttaatactaatacctacataattattttgatatttatgtgattttgtggtcataaaagaaagttgagaaactaattaatattcttaattcatattttatatataaatagtagaaattttgtcataaaagtgtagctttgacataaaagtacaatatatattatatatgactattcatacataaacaattacaaaagaatcccctcatactatatagaagtactctcattattgttgttatttatttattaacttatttgttatatagagtgtatatatatatatgtcacatttaatctaattatttataagaacactatacattttattacaattaattaattttgagaggctttatgattatggatataaatgatattagagcgaaataattttaattatatatagtgagtgtgttttattcatatcttttcaaacattaagtaaattaccaaaagttaatcttaataatatgataacaatatataactatatacatggcattaaataaatttttttaaaaaaatatagtacttttatgattaattttatttgttaataataaaaaatatttgaatattatgctctactcaattagtgtgttatattatagtaatattttatatatagtgtaaatttaaatctctaattaatttgaaatttgtgtaataaccttcacatttatcttgtagaatcaaattttgaacaagaataatttaagattcacatataattatatggattatttagtatgtataatacttttataaaactaaatatggtgtatatatgtttcatgcaaggggtggataaacatcctcacttaacacatgtcacctcaatatgtgatatatagatttgtggtcttatatctgtttcttgttttcataatttttaagtattacaatttaattaatttgaaatttttcgtaatacttgtttaaatcagtataatataacttagttagaatattttttttaattaaataaaaacaagaagaaaaaataaattaccagtgaaatgagagcatgtgttataaaatgagcaggttatattatatattatataaaatcagaacttttataattatatagatatttaaatactattagattttttgtacgttataatattaaatgatagtagatttgggtatgaaaattaagcacgagtaagcaaaatattatttttcaactgaacgacaaatcacttgcacttagtaataatattataatttacacgtgtgtatgtctttttgaaaaactatgtcccacctcattaataattaattataaatattcaattactaatatataataaaaaaatacaaaaaagctaattgagtgaggagaagttctaccattgcttttatttttatgacttatttatcatatatagtcttatgtcgtattaaaaatatattacacattttattaccatcaataattgattttgaaagactttaatggtatcagagcaaaatactaactttagttgcagtgagtgtgttttattaaatattatttattatttttccaaatattaagttaattcataacgaaagttaatttcgataacatgataacaacgtatcatatgatttgttataagtcgaaagaattctcgttaaatctttaatacagaaaaatattgcagtcagtttgatatcgagtaacattgcttatagtagttttatgattttttttaatattataattagtgtgatatcaattaagtaatattttatgtatagtacataaatttgaaccttattattttaaaatttgtgtaataatgtaattctaaaaataaattaagtgatcttataatatcaaactttgacacataaaatatttttatataaaatgacacatctatatatacatatatatatatcaagggatgcgcggatgataatcacttaacatatatgtgctataaatttttggtcttatatatttatttattatttttatatctaggcataaaatattaaaatttttagtcacatttgtcaaagtgtatatgtaatataatttatatatgtatatatatattatatcttagctagaaagtgtaattatatattttttttaatttaatggaaacaataagagaaaacaaacgttaatagagcgtaaaacagcgtaaataaaatataaatttgttgctacagtataataactataacgactataatgtttcattgttatgacttttttttagcttacgtgtacacaaataacaataaatattattatattctatattctatataaaatcatgacataattaattagatatttgaataataacaaattcgttgtacgttataatattaaatgataatggatttggtacggtttttttgtgcatataggtgtgaaaattaaatacgagtaagcaaaatattattttttatgagtactgacatgtagaaggcgtgtatctaatattacgttttacatctatataattttttaaaactgtgtccaacctcattaataattaattttatatatattgattttatgttcatgaaaatcttccagtatttttttattaattttattaattttttttttatatataaataaaagtaaaacaaaattgtgtgaagttttttatttttttttttactaattcgatcactaaaaccaatgtaaaaatctcaattgagatctttcatttctatacattttggctatacaaattttttattaattaactatatgttgtgttgtattttccttatttatttattaattattatttgcttttaaaggattatgggttgatgcatagtgactgtgtataacttatttgacattataatattcatatttatattcacatatatatatataattatatatatacactataaaacataacaataataataaaataaaatccaaatatattctcaacatgcatttttttccttttggaaaattacatttgaaaaaagaaaacttcatgaaattaattaaaggctccattaacctataattaactctaatccgataaaaattaaatctcatgacacaaaaatgggtcttctagctagcgctattctttgaatcatgactaacacggatgagacgacagactcgataatcttaaagagagaaaaatgacataattaactaagactaaaccctaattaaacgattaatttgcatgagagaaaaaacaacaattaatggattttcatctatggagatttagtgacaggccagagcttgagagtgaaatcaattttcgccttcttttccttctccttctccttcatctcagccgtccgtttctttttaggaatcggatggtccaaaagacttgtaaatggcctagtttgatcaacagaatccaacaccaccacatcatcatcatcatcatcatcttcctccttcacattcttattaatattctctttattctcatctttgtcatcttccttgtcctcctccttttcctctttcttcttgtcttccttctcctctctctgcctcttcggcccattaccactcagggtagaagtaggcaaatgagtagaagtaggaagagaacacactacctgagggggtgtgttcgggtgagtagccctaccaacagaactattaaaattattattatgaataaaattataatgttgttgataaaagttattattattattaggaagaggagggggaggaggaggagaaggagtagccagctggccaccaccacgaccattgttgacatggttgttcccactggccccgccagctggacccatcatcaaaacattgttattgttgttgtgatggtgctggtgttggtgttggtggtggttgatatggttattggtgttgatttgagtcaaagcagcggcggcaggatgatgttggacattcactggaatagtggcgggcatgttgac

SEQ ID NO: 16184 - DNA, 6522 bp, Cannabis sativa
ttttgattttagttttgtttcaaaatctgaatttaatttatgttggaattcctttttaattcaaagagaaaagaatggaacaagaaataaaagaaaaatgcatttaaaaaaatgaaacaaaaaaaaattaattatttaggtttagaataattttgtaggtttcagagtacattttttttatttttttttatacattttaaatatatatatatattttgtttttgaatgatttttaaataagttttaattaattttaaaatgaaaaatagaaactaatgatgtggactaataaaaggatgacacatagacatttaactggaagaaaacggagaggtacccacggaagttccagaagtgtgacggaaggtatttttactgcaaaaaatacgacttaggtatttatctgctactcgggataaaatttaagtatttttaccgcaaattactctttttttttttaaagttcttaaaagttccaagattcaatcctttgtaggctcacgtttaatatttttaaaaagttcgaaaagtagaggttggaaattgatcttttaccttctaaattgtatgacactcactatcactacactaaatactattttattatagaaacatgcaatacaaggctaaaaaattactaaaatcatcaatatgctttaaaattcacatgaaaacaatccaaattatgactaaatcatttaattttgttttaatatgttcatgcatgaaaataaaacattaccaaagattttgagtccagttgtttgaattattttaccaaggtctcacttataatcgtgtattctaatatttaacctaaatattagactaactagaatatgcattataaaatagaaattaaacaccttaagtatgagtatacttacagtgggaacgcaatggctcctttctttagattttctaaatccttgaatcctttatgtagcagggtattgtcaagaacgtgaatcgaactttaactttttacatagtcttccacaataacacctaaaaatcaccgagaccagtgtcgacaattctcagcaaatgagatgactaaagaaaggagagagagtgacagagtttcatccatttaggagagattctttcctatgttatctgttgtcagaaaattataattgtaacctctctaacaactctaaatttaatgttccttatataggttactcatagattttatttaaatatttatttaatttttaaatataataaatgagtatatttagctgaaattagatctcaattaaattctaattaaactaaaaatagatattcacactatcatcttcttgattaaatagttaaataaataactagtaatctttattaatttaattaattaatcaattgtatattaatatatattcacatacatatataattatatattaatgtataattatatataatatttaattattttattaataattaataattaattattttatatttaagtccttattcatttcttaataattatgaaaaattatatattggaactttatatataattattaatttgacaccaatttatcataattaataactttcccaaaattttcttttcttctctaatttacacatttgagtgaaaatttttcaaatttgaccaggtcaacattgataattctaatcgataataaaatcaattaattgagattgtctcgacgataatgaaatcaagctcccaataagtagttctaaaatttaacaaatgaattttctaacttatttattcctcttgactcgattatagacttgtaattgcactctcaattttataaaactctctatacatgtttatagatatgctataaattattcattgttttaatcaaaataactgatgatcctctataaatggtctaaaatgagttgggactaatattaccattttagtccaatcagcttgaagctaattttttctccgtttttgctctagcagcttgaagctggagctatggcgaaaactaggtcaaagacgaaggggaaagcaaaggtttcgacgaggaaagcgaggaagggctttggttctgtgattgaggacagtatctcgaaggcgattgaagaagaaatagggattacgccactgaagttatcagaggaagaggatgatatcgttgttgaatcggtcaggagaaggaatggtgattcgcatctccgtgatgtgtatccgactccactgtctcctaaatcatctctgaaggagattaggcgcatggaagatgctcgaatggatatgatgcacttcatacaggccaatcagcaatgtaacagtgaattgcttcaaggtaaacattcgaacccccctgttcttcgctctggttctgtaattcgcaatttagataaatcattgcagcagtcagaatttaaggggaagggagagtctagcaaagttaagattacactagatgacattgaggaggaagttaatttttggaccccatccattgtatgctatgtgttggggtcaaatcctccattgccggttattgaaggttttgttaagagactgtggaaagatgagatagacaaagtcaagatgcttacttatggagtttttatcatcagatttcactcgataacattcatggaccaagtgcttaatggtggctatatcttctttaatagaagaccagttatcatgaagccatgggatccaaatacaaactttagaaaggaagatgttaagactgtgcctatctggatacaactcgaagaccttgacctcaaatactggggacaacgatcacttttcaaaattgttggtcaaattggcaagcctataatggttgatgcagtcactaaggaaagagaacgactgaattttcctcgggttatggtggaagtgttcatgaatcaagattttcctagcctactggatttcgaagatgagtttggcagcaatgttcatgtaggtgtcaagtatgaatggaaaccggttatttgcaagcattgttctgggatggggcacttaacagatgaatgcaacaagaaacagagtgctaagcaagagtgggtggttaaggaagatgaaggaaagagcaaccacctgtggatgaggagggttttcaaatggtttctaagggtaaaaaaaattgtagaaacaagaggagaagacaatgggacaaagctcaccaatgtttttcaaattctagccgagagagaccaactgggtattcaggaacaagaagcagagggagttgataacacaagaggggggggggagatccctctcttggtaatggataaattcattgtttggaacattcggggggccaacaaacagcaaaaacaacaagctattaggcagtttattcgagtacagggggctgattttgttgggcttctcgaaactagggtaaaggctcacaaactaggagccttgtacctaaacgttttcaatggatggtgtttctcctcgaatatagcacgagacaaaggtgggagaattgttatagcatggaacctgatccgttttattgttgatattatcaagtgcacaagtcaactaatgcacttgagaatctcaacaatagatggaacatacaacagttttttgacaatagtatacgggtttaatgataggcaggggagattggaattatggagagatctgaatggtcttaaaacaaaagaatcttggatagtcatgggtgattttaatgcaattacaaccaaggaagaaagagtggggcaccgagtgaaataccaagctgaaatggaattcataagcagtatacaacattgccagcttgaggatgtaaagtctactggtagtttttatacatggacaaataagcagcagggtcatgatagaatatattcaaagattgacagagtattagccaaccaacaatggtgtgataactatcctagtgcagaagcgttatttctcaacgaaggaacttttgatcatacaccatgcatctcatcactatatcccaaatggaaatgtggcaaaaagccgtttaagtacttcagaatgtggaaatctcatcctgagtatgacaagcgggttgaaatgacatggaggaaagtgattcatggtactttaatgtatcaggtcgtgtctaaactaaaggcactgaaaccggttctaaaagagatcaatcagttgggtttctctgatttacatgccacatcgatacaaactaagaaagcactggatgaagttcaatccaagctacaagaggatcccctaaacacaacactacatgattaggagcttgctgctaggattgcatttgtaacggctcagcaacattacagctctttcctgcagcaaaaagcaaaaatcagctggattagagatggggacagcaatacttccttgtttcatgcgagcatcaaacataggaataaacaaaaccaggtgtactcaattgagaatgaagatggcattcgagtatttgaaccagaataggtcacaactgctttcatctcttattacaaattgcttcttagatcgagtttgacagatagaaggaaagtctcacaacagatattgcagagagggcctttggtcactactgaacaagtagaaatgctcaataggcctttcactaaagaagatgttaagaaagtggtatttgaaaatcctggaaacaaagctcctgggccagatggtttctccagcttcttttttcaggataattgggatttggttggtgaggatgtattcaaagcagttacttctttcctcagctcaggcagaatactaaaagagattaatacgactgtcctcacaatggttccaaagatgaaatttccaaacaccgtcaaggattttaggccaattgcctgttgcaatgtcatttacaagattgcaactaagctattgtgttctagaatcaaatgcatcctccctgaattggtttcccaatcacaagggggcttcattcagggaagattcattggacataacattatgatttgccaggatttagtgagacactatggaaggaagacaaacaaggctaattgcatgatcaagcttgacctccagaaagcatatgataccattgagtgggacttcattgaggagatgcttgcaggattacactttccatctcagtttattcagactgtaatgaattgtgtcagaacactgagattttctatcatgttcaatggatgtactcatggattctttgaatcaaaacgacgtctaagacaaggagacccaatttctccactgctctttgtcattggaatggaatatttgaccagaatcctaaagaaagtgggggataagaaggatttcaagtttcacgaaagatgctcacccatgaaactaaatcatctggcctttgtagatgatgttttgttattttgcaaaggagagttcaaaagtatccattacatattgcagggattgaagcttttcattatgacatctggtttgcaacctagtccccaaaaatcggcaatgtattgtagcaatatgtctcaggaggaggtgaacaaaatacaaagggctgctggttttactctaaaagatatgccttttacatatttgggggtgccaatatgtgctaaaaggatatctgggaatgagtgcattgcattggctgagaaaatgactggaagaataagaacttggagttcaataaacctatcctttgccgcaagggtggttctagttaactctgtgttgatggctatacacacatattggtgccaagtaatgattttgcccaagaaggtggtgagacaacttgaatcaatttgtagggcattcctgtggaaaggccaatctcaatcaacaggacctggtttagtagcatgggaagcagtgtgtcaatcaaaaaatgctggtggcattggatttaggaaaatacatgaatggaaccgagctgcaatggggaagtatatctgggcagttgctcaaaaacaagatagcttatggatgagatggatacatagtgtctatatcaaggatagagattggtggagttacaaagcatcagatcacagtagttggtattgaagaagtctagtcaatttgaaaaatcactttaaagaagtagctggacatcaacttttctctcaacaataccagattgaggaaggctacaagtgctttgtccaacccaaaagcttttattatgtggttggcaatacaaaaaaggcttagaacaaaagacaggttgaaagctatgggaatggcaataggagaacaatgtgaactctgtgataatcactgtgagaatgcagaacatctcttttcacttgcagttttgctgcaacatgtttacaggaaataaaaacctggctgtcttggaacatagcagtcggttcactgaatgcattgactaggtggattggaagatcgaaactcagcaaattcaagaggaatgtattggctgctgccataagttgcctggtatacacactctggagagctcgcaatctgttgttgcgatatttagcacacgcaagtgtacgtatcgtttcaagtagtagactcactaggagtgaggtcgatcccacagg

SEQ ID NO: 16185 - DNA, 5948 bp, Cannabis sativa
ttttacaaatatgctagttaacacattcattagaggaatactacttcctgaatatttttttctccaggataaatatttttacttcaagaaacaaaaattaattaacaggctcaagtctatagaaagtaaatctattatgtgaatagtctcttctacaaagaaagaaaaatggcgaaagaaaaatctacaattttagtagctttacacagaagtcagaacaagagatccataaggcataaagactaaatgttgtctaaaaatgcccataattttgcgaaagctatttccttttagtatactttaaaaaggtggcaaaacaaaataacaggaaaaaatgccacttgaaaaaattgcaacaaaataaatcaatatcatattttagtcgaattgaaatacacaatgcattgctgaccactttcgtatgttaaaacacatttggtggaaatccatgttttgcacattgacataactaaatctatgtacgtttgatatctaaatctgctcttataaaactgaaagtcaactgctgtatttgttgaatagactaacagaaccataggatttgcataagcattccaaaactcacatgactttgggtggggagacagacagttcaaaaccttcccgccgcatattctcaattaagatacctgtttacacaatgaaaactacaatcagcaaatatatgaactaaataaccaattcagcagatcagcatgtgcgtacaatctgcaaatatataaactaaataaccaattcagcggattagcatgtgcaagtgcaataagcaaatatacaaactaaataaccaattaagcagatcagcatgtgcaactagagacagatatatacactatccattcctctggaattaatattttggaagtaaaacagttaattgcaagtttaagagggccatacctagttgaagttctcccctaccctgcacttcaaaagactctgataaccctggaataacattaatggcaagatttgtttctgcttcagccattaaccgctcaccaatttttcctccagtcaactataaatacaaggtttccattagcttgtgaaagattatatagatttatacaagaaataagacaagctttttatgtcatgttgaagattgtttaagcaaaaaactggattttaaatgcatagcacatcattgttatatccaaatgatctgcaaatgatttattactatgaaacccaagataaatttggccacattgaatcggaatgtcttacatgttaacttaactaaggagagttatccttgcataaataataaaaataaaaaactaaggagggctaatgggaagctatacatgtaacactctgataataaaaagtaaataagtaaacatgaaggctcctcatgaaaaagttaaaaagtcctcttttaaaacaacattttgggatatagaagactgaaagaaataagaaaaacagcattaatacatcctcctcatccttcctattttctaaacagtactttagtagtttttataacccttatttggacgcatgcaatttcacaaatttattaattatttcttaatttttattgattccttttgacaagaatcactttgacaattaaatgagatctacaactgtattaaaagtttgcttaccaatgaaaaaaaaatggtaatcaagcactctttctaatacaaaactatgtaaaaggcataacctgagttttccttttatcttttactttcttttttcattctgaaatcaagaataataaaagcatattctgcaactggaaggctaaaagagaagtgatcatttgcccattatttcgatcaactgaaacagagcccgaataagcctacaaaagaatatataatatgtagttaaaaagcaaaacttcagatcttacatgtgaaccatcacgaccagccaatggtgagtcattgacaccaaaggtcatggaaatagttggggggtccaattcaatggttggcaaagcagttgtgacctggaagatgcacactaatgtcagctcaaaacagaaaaaagatgccattggttacaatatttcattagaataataacaaaaacgatttgagcgatgattgataaggggctatcgtacaaataaaaaataagtgggagctaggatcaagaatgctacaaatcagtgcagcaaatttaagttcaattaatacctctacatttgcaactgtgtggcctatagatggacttgctaacccagtcattgatattatgtcgccagctccagcactttcaattagaaccatactagtaccttttttcttcatcaattttgtaacctggaataacaaaatagaacattagtaaattgtggcattcatataataattgaacaaactcaaaattctaaacaacagcaagatttcttgtctatctgagtcagttccagtaagaaagctattagccgtgatagataagtggtggttttgaaagctaaatagaaaattcatttaattttcattttcatttgacaaataacataaccttacctaagataaaaacagtacaaatataagaaaacaggttactgcatcattttgatatacttaaaaacttaaaatttcaagaaaatataaaatatattaaaaaaaaaaaaaatcaatgtagtttcacatatatacttcttcacatttatctaaaatcagaaagacctccaaacctttccttcttcaattttttgaaccccagaatctttgttgcaaagtccatggaccctatcaccaacacggataattccagaagaaactcgtccagttaatatccgtccaagataaaagtccttttccatcatagagacctaatatgaaattttatgagcaccgtcaaattcaatgatgccaactgactagaatataatggatgacaacatcaggaaacaaataatacaactttttgcagcaaattaatttattttttataaattacttgcttgcaacgataaaatacaagatccaaatacatataagagtagctgagtttcaagtgatatattacatcaatgtacattaccctaaaataaattaatgattttaagaaagtacattagaaaaacacatttgaaaacaataatgaaacaaaatgacatctaaataaatatgtttctcaagaagtcatataaacattataatatacaaaccatcatttggaaaggcgcatcagtatctgcagtaggtggacaaacatgctttatgatggcatcaagcaactgagacatatttctcgcatcaggaagagggtctttggtgaaggtggtggaagcccatccttctttagcagaggcatatagaacgggaaagtctagctgctcctctaaataaaaaataaaagatcattaatcaaaattattactaagtgattaacatcaataaaatcaaaaagtaggttagcataaggattttttctctactgatataatttccgcacctgtagcaccaagattggcaaaaagatcaaataccaagctctccacctcattgcatgtctcctcagaaactgcatttatagtaaccacaaacatggacttaagaaaaaggataataagaaaaaataattataactgtcaaataaacagggcttttaccaggaagaacaaatgggaaacattttgtgcactgaaaaagcatgaaaattttgcaatcttgagcaggatgttactaagctatataatatacaaggcatggagatataaagcatacatgtgtttgccaaagatatggaagaatcattacaccaatcacaataatcatgcatgtgcacaaggtttctatcatacaaacctgcaggccggtctactttgttaaggagaagaatagggcgcaggccatacttcaaagcttttgcaagtacaaattttgtctgtgcaagtggaccctcaccagcatcaactactaaaactgcaccttcaaccatacccacaactcgctcaacctgtacattgcatattaacaatgaaaaccactccaaaaagaaaaagaaaaaaaaactaatcaaaatgaacaaaaagatgggttccactttgagtaagaggtcacttgaagactataagctctatttcctacaatagtagtagtgaagacatacttcgccaccaaaatcggcatgtccaggtgtatcgaccatgttcagctcatgttccttccatggaatggatgtaacctgaaagatggtataaattataggcagaaataagcagtggggaagaaaaacagtaaagaaggatgattctcttcagttggagcaccaaaaaacaatgcaccaccccaccccccaaaataaataaataaataaataaaaaccaataaaacaaaaactagaactagaggagatgcgaagcagttaaatactactaataaaaatgatccatgatccatcggctaataagctccaacttttaaacatgtataacatcagttacactatcttctacttctttcctgtcttcgagttccagacaaatgcgttgtgttagggacacaaaaacttgcactcaatgatgacataatttttaacaacataaatagtgtgatttcattttgaggaaaacataaatggtttttaaaacatgtcacatcatcgagtgtcgattttgcgagtcccaaacattactctctaataatttaagggcgtatttgcttacctataaataatgaaaataattgtaagaaggaaagggtttaaagagaaatgggaagggcgactataaattgagtaatctcctatcaatttgtataattacgtggggtttcagtaaactagtttctcaaatgtgaatgactaatagatagacaatggaaacaattccgtcatctgcattaacacccgcaacaatataattcatgatcattactgttctaatagaatgcgatgcgatgttcctcaaacaacgtgctctgtatatcttagctttgcaagaaaactgaatacggtctcattactaaaataattacgatattaaattttgaaggtaacctaaaatgcaacaaaaaaaaaactatttgtcatggaagttaatcggtaaccaaaccaagttttcaattctccataagacttaagatagccaatacaaatttcgaaacaagccccctactgattactgaccttagaagagatagtgatgccacgttcacgctcgagactgatggagtccatagctcgctcgtgagggatatcggcaccacactggcggagcagcctgtccatgagcgtggtcttcccgtggtcgacgtgagcaatcaccgccacattgcggattcgagtcgggtctagccagctggttggcaagggggatgcggcgcttgtagccggagcggccgagaaggtccgtgacaaagaggcgccgggcggggattggaggatgtaaggtttgacagcggccgatggagaagagcgagcggaggcggagattgatttgcgggcggatgaccagagagatcgaatcaacggacccgccatcttcttactcagttgaagattggcgagttctgacccaagcgacgaactcaggactcagtagtcagtgtgtgggttagggttttaacgttgttttctaactgcgaaggtttatgtcccacaaaagggaaagtaattaataatgttacatacgtaatacgtaaattatagctgtaaaaaaatggtctttttccaaagtttttacctgcagttggttctaagctatttttattccattacttatttttcaataattgtcgtttcacttgtttagtgtcatagtagaagaagatgtcacgaccttatttccatccagcattaatatttcaaatcgactacttggatttctatttcatcccttcaatttgttggacaactgtggcttaattaatatgtccataaaacactaagagcatgtttgttgcgttctcagttttcagtttttaaaattgtatttttaaaagtaa

SEQ ID NO: 16186 - DNA, 6633 bp, Cannabis sativa
ttattttttaattaatatatataatgtaataaaaaaaataaaaaatatacaatgaattgaatatgcgggttagcgggtggtttcgggttcaacccgaaattcggtactcctaaaaacttaactcgtaaaccctaccgggttaaacctgacatgcccgaacatttttttttaaaaaaaaattgcgagttcaccagttcgggttcaggcgggttgctcggattcgggtcgaacctgctcgaaatgttcagttttatcaacatccaccctaagtgcgtacacagataattcatgagtagatttattggccaactgacaaacatgaatcggtaacgcttcaagaaaattggatagtagactagaaatatcatctaaaagagaaccaaggtcattacaaagagatgatcttttagcgaaagcagagatcacaactaggcaatcatattcaatagaataaagagggagaccaattctaagtgaccaatctaacgctatcataagagctactgcttcagcctagataattgtgaaatttcttacaaaaccaacatagaacaaaataaggttcaccccaagatattaaactaataataataaaaacaaataatattaaaagtaaaataaatgttgagcctatcttagatagaagggaaacctctcttcgtccttactagccacataaatatctgaactttatctgatatccttatttagaagcatgagaaacaacatcataacaaaaaaaaatccctactgagtaaaacattaatcaaggataccattaccaaataatttttttgaaatgcatgtcattgctaatccttgtgagtttcaaataattgctccaatcctaattgtagcacttatatcattcaaggatgcattcacatttaatttaaaagtacccattgacgttgatgtgcaattagtcttctcttttaaactgttaaattcattagaaaagaattgaatacatgaaactataaattcaggagaacaaatttggtgtccatgctctacttgatttcgttctccccaaatataccaagctgccacaaggaatacttcaaattctgattgtggtaacatttttgatgctttaatgattatttattgaaaagaaacttctataaagagattgtttaagagattgaacttttataatttttacaccttctaattaaacacagtacaaaaaaatagcatgactatttgtatcagaattgtaaccacatactggacagttggaatggttaataatataccttttctttaaactaacattagtaggaagtatctcatgaaaacctcgccagataaagtttaaaatctttttaggtatatgcctcctggaagacaagctatagggtgtgaatgggtttataaagagaaagaaaacacaaatgggacagttaacaggtataaagccagcttggttgcgaaaggatttcatcaacaacttggattcaatttcactgaaacttttagtccagttgtaaaaccagtcaccattcgagttgtgttaacactttctctctcttaaggttggccaattagataattggatgtcaataatgccttcctaaatggtgttcttcaagaggagatgtacataacacaacacctgattttgaagttacaacaatgcctaatcttatttgtaaacttcataaagctctatatggccttaagcaaggacttagagcctggtttgagatattgcaactgtctttttacaagtttggttttgtctcatcaaagtcagatcattctttgttcattcaacattctccttaggctataatattagttttggtttatgttgatgacattctcatcacaggcagcaatacttcagtattatctcaacttgtttccaatctaaacactgttctctcttaaagaccttggtgaactaaactacttcttgggaattgaagtccaatacactgcagatggcttacatctttcttaaggaaagtatattagagacttgttaagcaaaactcaaatacaaagagccaagtctgcatctgcacttatgaccagtggactcaaacattcagcttatggaagtgatcctgttgagaatgttcaactgtacaggtccattgttagagctctccaatacttaacaataacaaggcatgatatctccttcagtgtcagcaaagtctgtcaattcatgtagaatcctctacaagctcattggattgcacctgaagaaacccccacatattgaaattacaaccttttgtgatgctgactgggcagcagatgttgatgacaggagatctacttcaggttatgccatttattttggcacaagtcttgttgcttggtcctccaagaaacagtatattgtttccaagtctagtattgaagcagagttcagatcacatgcaaatgttgttgctgaaataacatggctccattcttttctctttgaattgcatgttcctctacctaggatcccaatagtgtgatgtgataatttaagtactgtgcttctaactgctaatctatttctacatatcaggactaaacatatagaactcgatttatactttgttcgagagaagattctgcagcatgttgttgacatcagacatgtaccagctatagatcaaattgcagatggtcttaccaactctatttctagcaatagattcaacatattcgactcaaactcagaattgaagatacttttattttacgttcgagggagagtgttacggataccaattctgttattaatgttagtgaagttggttagaaatgccaattagttaattagttagtgttctaactgtctttctccttctttcttttgtctatttagtttgttagtgagttgtgtatataaataatgtatggtgctctttcatcattgaattcaattcactctttcctcttcctttgtttttctgttttctctatctttccttttctttcgttttctcttctactacaatgtctagaaagtttaacatggtacaatactaattaatcaatttcagcccaatctaataacaaacatatgtatattattatctttttaaaagaatggtgacttctttaaaagaaaaaacaaagacaaaataaaatagaaagaatggggactcattcttaagtcctgattcgaattaaaaagatcatacacattcaattacaaagtaattaatgcctctttaaataatttttcacaatatacatgtaattattatatgtaattagttgtactgaattctaattttaactaaagcaaagaattattgaaattggtccccaatttcttcactccaatcagaattgggttcagtccaagacctaggccgaacccctagcttgaaaaacaagagcatttccaatgcctcaaaaaccttatggttgtccaaaacctcattccaaacaccactcactatgcaataattattgttatatggtgcacggtggtgcgctccatgctgtgaccgcgacacgatgatgccaagatcttgtagagccgccacgagtggcggtagtcggcttttggtgccatgtgcccaagcatgaaattgttggctaaacataatgcaaccagagaacataccagcaaaaccaagaaaagttgggtcatcaaataaaaggtttatggggagcactataaaagttactgtacgagcaagtgcgtgtaaattgttagcaaattgacgcttagtgatagtccaaggccacttgtggtgaccttgaaatgcctcaatttggttaccaaagattggagttgaggcacttccataattgtcaatgccccaatggtatactcctgaaccaagatcagccattacatacccaaccaagccagccacagtgggctcgacccaaatatgcatactagacgcacccactaaggacttagctacagaaatgagcaccgctgtgcaccctgatgccaaccacacacgatgcaaccatgtggacttaagacttgggtcattggcttgaggtggggttttgcttgtagctagaaattgagtaggcggcacagatggtgattcgatcactaatcgatttggttcaacttttggtttagaagatgtggtgatcaagcaatgtacccgagtgatgactctaggagaagggcgtggatgaaagtagtgatgggagctcaaagggagcttgttttggttaatgatggacattggggagggtacctaaggtaagataaagtaatgagaaaatggcctaaataaaatgaattttatatggtattgaaatggtggctccaaattaagatgacatttttgtggtgttcctacagtatgcgtggtgtggtgcaattctctagaaaaaggctggtagtgagcaatcaatttgtgtgttacataatggaacaagtccccaaattatatatggtgttttcctatcctacaagtcaagtggcaaccttttttaattaaaatggaccatacgatttggcctttattttattaattaattttgctctttcatatttacggaattcaagtgccctatagttaaatagttatataacgtgtatacacactacattgctttaaataattctattttcaaaatttagaattgtggttatccaaaaaatttattctaaaaccataaaaataataataacaaaaaaatgacatcgttattatttattttcaagagttttacttattatcaattttagtcctaacgtatttttttattagaaaattagggtataagtccttaaaaattcatgtttgatgcagataagtctccaactttaaaaattaacagtaataatccttaatgtcacattttttataagttcgtaaatacccaattaataattccgtttgttatttttaaatttgctacatattaaaaatttagtgatccacatcataaatattatttgaaaattaaaaaaaagatatattttttctctctttttttttaaaaatttttttttcttcttcttctcgcttaatgccgattcccgcgtgctaaaccggttaccaaaaatccaccaccaccacttagggctgagcatcggtcggtttggtcaattttttctatataaaaatccagaattcgattttcggtctggattggtgcaatccaaaaactgaccgaccaatccagaacctatcttaaaaccgaccattttgaaccacggtttggtcagtttaaactgcccaaaccgaacttttttttttttaaaaaaaaattaatctaatttattctataaacacaacattttacattttacaactacaaacatacaaattaattgataaaaactaattatcttattcttttaactttaatattagtaaaataataatgtattattattattatatattattagaaactacaatatataaagcaaaaaaaaaaaataatatatatgtataacggtcggtttcggtttttacggtcggtttgttatccaaaaaaaaaaccgaccattcaatgtcagtttcaactgttagcggttttttcgattttcggttccgtcggtttcagtttcaacagtgttcggtaggtcagtttgaacggttttgtggattttatgctctgccctaccaccaccctccacccacgatctgttcatctacttttctcctgggttttatcgacttctcaaccggataatattaacgaaggttttaagagttttggagaggttgaaccccattgtggggtcagatctcgtcaacttgttgtaatcgtggctgaagaagtagtagattggaggtattgagatttggaacggtaagattctatcatcagagatttggtttccaggcgttcaacggagatgggcaatgtttttcttaagctgtgatttcttaaactgctatggagagggcttcttgttggctgagaggatgcactgtggaatagatcggtgaagcgcaagcagagtcgcatagggaattgtggggacgaaggcacacctctgaggttcacgatctgccctctttcttttctctctctctctctctctcacgatctgtgaatagtcagtaatttgataggatcaatatcgatttacaaaataagctattcctggggatctttaggcttcaagggattgaggtttcactggagattatgttgagacgatgtggatgatgtttcagcaagagaagtcaaatgattatgttgtggttactgaggttggggttggggttttctgggttggggtttttataatcgtagagcttgtttgtcgttttcttgtaggtttggactactacgtgtgtggggggatgacgattgggtggggtgaaggtcgagggtaggtggctgggtgaggaagacgagagaagaaactggaaaaaaaaaagaaaataaaagaaataatattttaaatttctaataatgtttttttattatttttaaattatttataatttaaattatgatttagaccaatagtatttcaacatgtggtatttttttaaaataaatagacggatcaattaagttagggactaacagacttacaaaaatcgtaaccttaaagattattactgttaatttttaaaaggctaattaggatttttgccctctgaactttgacatgtaccaaatcatgccccctcaacttttaaggccattgaaaatgcctcctgaact

SEQ ID NO: 16187 - DNA, 2935 bp, Cannabis sativa
  modified_base (2216)..(2221): a, c, t, g, unknown or other
caaaactcaacatcatcttctctattttttctctatataatttaaatattatatttttaatatattttattcattttatattaataattcatataatattacgtacatatataaaaaaagttaaaaaaataatattaaaatatgtttagctcaatgaaaaaaaatatataaaaaatagctaacggtttattgcatttggtgatagttcaattttgtaattttttctcaataatttaaaaattgagctatttagttcatctcttaggagtactcttaggatataattcataagatagacatttagtattaatattataccatcgaatgatacctttggactaaaatatgataaaaaaaaagttggactcagataataatgatattaatacaaactgtaggggtacattttgcaaatatatatgtattattatatgtatttatatatatatggactgagctgaagccataagtattgaacttccacttactgcattgtttcgaactcaattttagagagagagagctcaatctgccagtactatttccaggccaccatttcaacacttgttcaaatagccccaaacgaaaaaaaagaagagaaaaattagagaataaaaacaaaaaaagcacgagttttttatttttgttttctgcttcttattaatattatttaatttctgggtttgaatcaatttgggtgcccatgtcctctgatatgttcatattcgatggaagctctttcttcaaccattcaagcccagcagaagaagtggcagtttcttctggagcagacttgttcctcagtgatgaattactctcacctttctcagattccgccatggatatcctccaagcttactcagaccataataatcagcaaaacccagttgaggaatctcattcccttgaccaaatcgcttcttcaatactctcatcttcttctcctccatctcaccagttacaaagcttaaacctttatcaccattatgatcaccatcagtctacaacagcagcaacccaattacaaaatcaaaatcaaaatctcccaaatgggttcggaatcaatttctctggtttggatgcttttcatgttaaaacagaggaatgtcaaatgggtttcgagaataatggttattataataatactaataataataattatggtactggtggtctctcttcatcttcatcaactgatcataataatgtaacaaagtatattcagaggagtttaagcagtaactcctttgatggaagtaagccttgttttttattctcacctctgtttgattctctcacggagtcaccaaattttcatcaccatcaagccttgagctctcctgagattgataatggattcttaactggtcaaatgagaagggtttgtagcactggagatttacaggtgagaatttatttatttactttccttaaaattttcctctgttttcatgcacatttaaaataaaaataaaattttattttatcttattttatgaagaatttcggaacggcaagaacaacccagagatcattttcgagtcctttagcttcagagagttcgttcatggaggaagccaataacaacaacaacaacttcaaagtgggaaggtacagtgcagaagaaagaaaagagaagatttcaaagtacagagccaaaagaacactcagaaacttcaacaagactattaaggtaacggaatagaattaatcaacaaactttttctttttgtaaggattaataatcaacaaacttaaataatgaaaaagaaataagtcacaactttatttgtgtaaaagaaaaatatctcttttgctaaacatatatatatatatgtatatgatgaatacgtgttggaatctaaaaattaaagagtgggtttttacgttttaatgttgtttttgtgttaataagtatgcatgtagaaaaacactagccgacaacagaccccgcatacgtggcagattcgcacgcaacgacgaacctggtgagattcccaagactgcatgttcattcagagatgaagacgaagaagacctctgggtatgcaatttacatatatgcaccacttattttcatcaccattctgctcctgttttcttactaataatattttataaaattatgccattcaattatgttgcatttaattcattttttaattatattatttgtaatataggaaaattgttttatatattatttttttaatttnnnnnnttttttaaatttatggtttagtttgtaataaagatttttatgtaaaattctatataaaaaaaaaaaaaactgtcttgaaatataaaaaggaaaaaatctctattatatttataccacttaaattcacaattaaatctagataaataaaaaaaattaatattttcagtacaaaaagttactatttttaacgataatctttaagttctaatataacttttttggttaaatataatttttagttacaacaaaaaattacttgtaactaaaatatttaaaatataatatttagatataagttgttactaatttaattttaattacaagaaaaaatattgcgactaaaaataaacttagtcataataaatattaaattttatgactaatatttttagtcataattttttttttaattttaattataaattttattataaataaaagtaaaaaaaattgtagtatttggtctgttatcactacctcaaatttaagcgtattatatatgttgtaatattatatacaatatgatattttttaaaaaagaaaaactatataaaaatagatggattaattaaaaaaaatattatacatataagtaatgtatatatttcttcttatatataattaaatttatgtttatggtttttttctttagcttgaagagctgcatgaagaagaagaagacatgaatggaacagtactaagatcaggacagtt

SEQ ID NO: 16188 - DNA, 5457 bp, Cannabis sativa
  modified_base (1407)..(1416): a, c, t, g, unknown or other
  modified_base (1475)..(1484): a, c, t, g, unknown or other
  modified_base (1703)..(1712): a, c, t, g, unknown or other
ctacaagcctatttatctattttattaattttcttacttataaaagttctttgtttattgctaataatatatataaaaaaaaaaaaatcaaaagagagggattatcttcatcatagaaaaattttaattaaacatttttctgttaatctatgattatacataaaatattaatagtttatataaggtgcaatacgaatattatggttttttaaatatttaattattttgtttaactacaccgcactttgattgtcgtaaaaaatttaatcgtaatcatatcatgtaatgaagtagattatactagattgttactactctccacttaaaggtagaattgttattttattcaaaagtattttttaattaattatttagttagatgattttgaaaatattattataatcatttttaaatctttaaataatgtgtaaaagaaatattttaaaatatgcggagctttgtcaaatcattttattggtttgaatatttcttcttactttacttggattgcataataataaatctttaattttagattatattgtgaatctaatcatgtatatactttgataatatatatatacaaatatatactaaagtaaactcagtgattattaagattacgatgggtaacttacatttattttattttttatagaatatttattaatattagaagaaaaaatattaaacaaccgtacacgaagcgcgattagcattctagttccataataatgcacatatatattcataattaattaattaattatactgttaatgatctactaatttctatgtataattatacagttattataatagtagtgagcgatgacaatagtgatggtggaggtggcaatggtgatggtggaagtggtcgtagtatacagtggcggtgtacgatggtggtcatcgtcaacaatttttttttttttaattttgttatttattttattaaattttataactttttcaattttaaaataaattttgaaataattatattaaatgtaccaatataaatatatcacgtgtataaaaatatatacataaacaatcacattagctgttaattgtggtaaataaatgacattttaaatttattaaggattcagtagtttgataaatttcaccaccaaaatttgaatttaaaaaattaagtaaaagtaaaatgataattgagagtttaacgggcaaaaattcttaccaaaaaatatgaacaacctttataaaaatcataataagaaaatattaggaaaagaaaaaaaaaaaatccacgcaaatacacaaaaagaaaatacggaatattaaagataattaattacagtgaaataattatttggttaaatagtgaatttgtataggctaattaggatttttgccccaactttgacatgtaccaaatnnnnnnnnnnaacttttaaggtcgttaaaaaagcgcatgaactattgagattgttaaatttaagaattnnnnnnnnnnttcattcaattttactacttcagtgattgtttatatattaaattatgctccccagactttgatatctaccaaatcatgtccctcgcccctggactttcatccatgttagatttttttactaaaattgaaaaaaaatccttaaatccaaccatctaaatagttcaggaagcattttcaacgatttaaaagtttagaggacataatttggtacatgtcaannnnnnnnnngcaaaaatcctaattagccatttgtatattatgtaataaaaagtgtccaaaaactgtaaatataaaatatcctaagcaaacacacatgaaaattgaaatgaaagtgtaagagaaaggtaatcatgtttagaggcatttggggatttgattgaattgaacgaggaaaggaaataaaaaattataggcacaataagtaacttttgatccaaacaagtagtatttgattaattatggtcaattccaagcgtgggttctttcttgattctcaagaagaaaaagcaagagaaggaaccatatgcctaaacaagtaagagaaagccagaagaaaggtattgaaagtattacagaacaaaacaattatcatttttttttcttcatatattaattaataccactatttcttcctcatcaacaaaaaatgggagaaaagcctctggcctccataaaatttatgtaatgcgaacctcatattacaatgggaaatgttaacccataagaaagaaaaaaaagtgaaaaagttaaactatatgacctaaccgaaaatttccttgatcttagtcttttggtcctccgttagagaagtggggaataaaacctcaaatgtgacaaagagatctcctttctttgtgctaaaatgtagaggcataccttcccctttaaacttcctcacctcttttggttttgtaattccctgaaaagtagtcatgtagaaaaaatgtgttatcttaatttaagaggaaaacgaggcctctagcaggtgagaaaatttgaatttttgtttacctttgagctgatattcaccaaatggtcgtcgaggtgtttaagggtcttttcaaaaccaacgagtgcttgaacctgaaaaaaaaaaggatttaaaaatgaactctttgtaaaaaaccaaggctaactgatacacaagtaataacaaaagaccattgttggctacttataaatccaaacagccaaaagaaacaaattgccaagagacagtacttcggtcttagattcatcacaaaacttattaatattaaccagcacgaaggtagcattaatgttctaattaccagtgttatagtgacagttgcgtgtaagtcgttgcccactcttttgaagcggtcatgtttcgcagtgtggatgcggaactgccataaaaatgaggtgttttactgtcagtacaaactaaaagcttataacactctagcatcacaaaagtagagctaccatcaaatgaaccaacctttagatctccagcttctccatctattataggctcaccatcttcatagaagagtacctcctggggaaagcatatcacccgttatttctttattattcactttaggtcagtgaattaactcaagaaaatactgggtgtgaatgttcaccaaataaaagaaaccttttacacactacacaatagtctgtttttaatgctctaattttcacaaagtattgatcttatatgacggacacagaattacagacactagtattttttcaaagtagcactatactatatttaaaatggtcagaaattatgccacattagtgtgtaacttttaggtgtaattttatgtgtatacattactctattcatatacagttttacatgaaaaaagggaacaaaacacaacaatttcctagtgagaatatgttttggagttaaagtactatgacgagtacagaagacagataaatgagaaaaaagggtgaactactctaacaaggtaacatgccatacattgatgatagataataaatgcaaagaaagcgaagtatccagcacaaattgcaaaatgaagtttgaaggcttacttgaccatcttgcatccctttttcaatatcaacagtaacgaaatatccttctcgctcaaatttgacattttggcattgctcgcagacctgaaagtggacattatagagaattgcaatacattagctgatgaagtattgcaatagaataaaacaactcatagaaagttcaagttttacagatggataaaagctttcttctagaataggatctattggacatctaaaacaaaacagcataaatttaaccaagttctaactatacatttctaaataattatgcatacctgttctgtcatctgctggaacattcccggaccaatttgcctgtggtagacttcatttctacagttacaacgtctctttccaggtgccggctttatcacattcttctccctccaaacctaacattcaactcaatgacttagcctcacataaatgatgaagacacaaaacatggcaaagtggaaatatagcaaggcaatagcatactaattactaagcaggtaaaatcacaaatctcttaattacattcacttctcaccttcagtgatcctcccatgtataaatcttctagtgtagcttccaaatctacaatcacatcatcacctttcacaactctatcttcctcttcaccaccgccgcctccaccaaagaaactagaaaaaatatccacaccacaaaaccataagatacaaagatggcaaagtggagacattacaatatctaagggaagcagctcaggaaactaactgagcaattgagttagtgcattaacaacaaaacaaacaaatacaatctcctagttccaattgctaatagtgtactttattactttccactttaataatttccatgtaataaacattcaagccccaaaggaaagaaacttacttggaaaatatgtcattgatgttcacacccattcctccacctcttcctcctccactagcagcatgttgttttagaccctcttctccatacctatcatatatacccctcttctcgctatcactcaaaacctcgtatgctaaccaatcaaaaaccaaaaacaatctacattaattaaccctaaaccatcacaaatctacaaaaaaattccacaattaaacaacgaaattaccattgttaatctcagcgaatcgcttgttagcctcttcgttgcccggattcttatcaggatggtacttcaacgcaagcttcctataagctctcttgatctgatcgtctgatgcccccttcggcacttgaagtatatcataataactctttctacagcaataaacgcataactaacacgtatcagtataattcaatctgcgcataaaagttcaaaagagagaaaaggaaactaggataagagaaagcgaacccggcaatgacggcgagaacgtagcagagagcgcagaataagaagagtagcttcgagcttcgacgcgccatcatcgaagacgtgcgagctcagatccgaaaaatgttaaaatggatgaggacccgtctgagaagagatataaagttgatgtttgttatgtttgtttggttacctagaaaatgttttctaggaaaatcaaaagcactttcctttccttacttccttcctttctccgggggagctgggcgtgaaagtttgttcagttataaaaaatggggtccgaagtggaaactgacggactttgtttcgtgactacgatatgcaacgtggtttttgtatacactggccaatcacagggagactacggttgcttcgtccaattaaagattgccacgtacacatgcgctttttattctgtttcctttggtatgtggcccaagatgcgaagacgaacgagctgtggggatgtgagtcaactctagaccgcgaggtttactcttctctcttcttcgactcttgggcctgtaacttcgtagtagtattggcccaacataccttttt

SEQ ID NO: 16189 - DNA, 3814 bp, Cannabis sativa
aactctttttttttatcaaattttgtggctgtggaaacaagtaatataacgaaggtataatctcattccttgtaactttttgactaaggtatacatggtatagagtaatatagtattgtactcaatagtggtaaggtcaaactcatgatatagtggtgaaagaaagaaaactatcattttatgatagtctaatgcagctagtaggattgtatgtatgtagatataagagagattgaagaatatatttaacagtacagttaataggattgtaaagtctgttagtacttatgtggcaaattaaatgagttgtcataatataattagttgggacatatattgggacagggatatgggacagggaatttggctccctacaattcaacatatttagtaatcaaaagcatagatgtcattcacattacacatatattcatataatcacatttatgtatatttcatagtgtgttgtcataactacataactcatatattttggatttcgaacccagttcaaactaaaatactcaattatgataatattgcgcaaacttgtcaaaattcacctgtaatacaaaaaagcaaacatactacatggccaaaatgtagttaattctataaaaaaaacttacactaaatgttaattttcaacttaaaactgataaacaaccctttaactatctttttttagcaaaaaaaattgtctccaaaggccaattttgtattgttagaatatgaggctaaaatgaataaggttccatcttaaaactaactaattggtaatggaaaaaatagctagcctatttatcttatatatcacaatttattttcacaaattaacaatgtgagactaactctaatacataatagtggaaacgaactccatttttagccattgaagaaagcttaagatgaagattaataattagttctgatacatgtaaaagaataacataccaaacaatgaagaaaagctttcttgattgattaagctaagaggttgagtatttatacatgagctgaagtaaaagccatctaagcaaaagaatgtaaaatttattacaagatgtaactaattaactcagtaaattataagttagttatacaattagctaactaatttaccattgacaaattgagctaatgttctagtatattatcctaacattgcagggttttaatatgggtcatcacacagataatcttcatgtattaatatcatgagtgcatgagtccacgtagctaaattatctgtgttttcacgcgaacgccctctaaatacacttcatatatatgcatcacttacatatatatatctttcctataccgaatttaatacaataaaattggaacaaattaccaaaaggatcaagttttataattggtttattaaaaaaatataaagtttatatcaagaatatcaagataaagatatgagggacgcatgtgactcatccggaaaggtaattaaaacttaattaataataataataatataattaatagttaaagaaaaaatctatctaaatcatgaaaaatatatgattctactactcctcataactttaaaaaaaaataaacatctcatcgttttgaattgacttgatcctctcttatggttgctaaatattataaacaataaacataatattgtcttaatatttaaataaaattctacatgtttcatagacatatatattatttatacacaaatatctattacggttatgtattacaattaaattaattaagatgataagttaaactatattaaaaaaaaaattaatataatatttaaaataatatagccatacatttttttaaaaaaaaaataataagactcaaacatttgttacgtttttctccatagaaaatgaaaaaacagatatataatatatttggtagggctcaccataatcaatccattgtggaattggacaagattgttgagtcagattggatatttggataagctatatatgtttcgttgataaaataacattattaattttttgtagtagcttatagacgaacatcatgaataattatttttgtgtaccaaaaatatcaaaagaacctaataagtttgtttattttgggcaactatattattagttattttctttggcattaaccgtatttttacgtaagaaaaaatgtcacgacttgtttactctaattaatcatagatattgctccacgttaattgttgcttctcattataataattttctttgaatttatgataaaaaaatatgatgaatattgtaattatatttttgttaaaaaagtgtacgattttattagttattgttttactgtgtggtgtttttttttttttttattgcatgcatgtatatgaaaatacattttatagtattatattatatatataactaataatatttctgattttatgaaactgatcatcacatactatagctaacatgcatatatatatatatatcataacacctgtgataatagtgatatatattaatgtacaaatcttaaatatatgtgacactgactatactataataatgatttggataaaattttggaaatactttgaggacagctctaatattaatgatggcaattttggcactacactagctattaccggccactaccttcaacattttcccttctcaaaatattacttatataaaattttatatataattcaaaaaaaaaaaaatcaaatcttcaaagtaagaagagtcattttaatgaccctacagtgggagccatctgtaatatatataaatattaaatgtgtgtatatttatatatgtgtgcagaaggtgtctgtccacatcattttgacaatgatttaaccctttcagcaatacaaaaccatatttaaataattaataaaaataaaatctttaatgtatgcaacccaacataacctaacacaaattgtgtaaaaggtaaatgtattatatatatacactagtagtactagtgatagataacattcaattaattcaactgatcatgaaccaatctagctaattataaaaaaagttagatgattggacaagaaaagttagattctagttacactacataggttatttgatgtaaattttaaaatttaattcgatccaatctgtaatatcttaaaatggggaatgaattatcaaccctaatcactacaatatttaaggctattagcggcgaactaatatgctggtaataacctcctcttccgtcgttaatagctaatagtctgccactattaatgattatttaggatgaatttctagtcccctctgaataattattaatagcagtgagatccatcgctaatatttttggtcagttttgagataagcattattagtagaggttcgccgctaatgctcgctgctaatatattcaatttttaaaaaattaaaaagaacgataaattaaaattttaaataataaattaaatataatttaataaatacaaaatattttaagttaacaccaaaataaatacaatgtttattattattataatgtctcaaattaaactacataaataacatatacataatatttataatgtcgaattgtgacagtcagtagtcacgtgatccataaggggaaacaccaggaagttgtgcaatcccacaatgcctggaaaaggtttagtgtgatgattctgacattgtgtaggtatggaactatacagttgaagaagaattaaatagattgattggcactacatgtattaacaaggtgcatcttgttttttggtagctcatcataaaagaactcaacagttaagcatgcttgacctgaggtaatttcaggatgg

SEQ ID NO: 16190 - DNA, 3814 bp, Cannabis sativa
atgactatgagaaaaaatttgtctaaaaaattatttcggatactaaaatagagagatgtattggtgtatctttttaagggagtgcattatagaattttcctatacttttaaccaaaatccactatcctctggtataagaagctttgaggaacttggtccctcaaaatgaaatcgggactgtattgagtcttctataaatgatccttttggtcccggtcaatttcatcggtctgctctttaaaaaaacttggctcctttgtcgcccagtttgttcgactgcttctgctgagacccttcagagatctgatccccgcattggcgttttttcctctctctctttttacgaaaggtacgttttttcttctttgattttgtgttctctcttttagtctctttctaattcatctcagagatgttttccttgagatctttagttttggttttcattaggatctattttaatttagatccattattgccgtcgcctacgctagggtttttgtttctcgattctcttctctatctttttgtgctgaacctgaactttgttaagagttatattggaaaatccttcagttttctaatgtcttgatcgcatagcggagtggatatcgcgttagactccgaatctaaaggtcgtgggttcgaatcccactgcgatcgtacgtatgaattttgttcatactattttgtttgattattttttattctttaaaatattgcgattatgtgaatttgggcagtcaatcaatgaccaggctccatgagattttctgcaaaattgtgaatttgggtcactcaattccctggtcagattctagggagcgactcgaggtttaatttttttttttctcaattctaggcttgccttgaagtcttttatatggttaaaatctgatccattcgagtttgaggactaaaattcatctttttaaggtaatattgacttagattgaacacaagaaaccagtgggaacatatacagatgatgagctacaattacttaataggctttataccaagcgaactaggcttagtttgaagtctttttttggttaaattctggtgtaatcgaggttgaaaactaaaattcctcatttttaggtaatattgatatagattgaaggcaagaggctagtagaaatatattaggagccacttaagcctacctctggttgagtgtttgaggggggggatagaggttcaattttttttttttaagaaaaaaagtagggacatattcagaagatgagccacaacaacttaacagggtctataccagatgaagactcaaggactgacttaagtcttttattggttaaattctggttcattggaggtcgaataatttaattgctcatttgaggtgatattgatttagattgatcatattcatgacttaacggggttttatacttggtggaagactagatactaaaacaatgtgaaatggcaaacggcttgtgtttggtcagttctagtcttgactgaactataccatatgaccactatgtataaaaacagtatactcgtgcacttcgaattcttacacttggaaaataattaacaaggtcacacctttcttagtaccttaccatatatttgtttctgtagttcacatcattttggctgcaattgacctgcacataacacatctttatgctgtattggatgttaaaatatatattttttccaattgcttgcagttatagctgctttcttcccttttgttttgtttatcatgaaaacttgatatgactaacgtaattttagcttgtaaagacatggattactctttgtcttacaaacaaattgtgaataatgctcaattggctgtatccatatgctattgtttttgatagtataagagaacataacttacaaatcttcctaatgtctagtatttgatttggtcttttagttttttaagtaaatcacttgtattgtagttttttaaaccccacaatattttgggaccaagatactataggcaattgctatgtagatatcttggagaatccttgaatcttttgactatttgagctatccctcttgggtaccacttttattctatttaatcaggccaaatacaaagagaaaacttaggaattgaaccctaccctccccaaacacaccgaatgaatccttatcaattgaagctacacaatctgctagaccctgtgttttttctcttttccacattaaatatctatatgtcattttatttcagcacattatttaagtgaatgagtgttcatactcctaggccggttgagtgagtgagtggtccggtataagtctctctgagtgttaaaaaaaaaagtgaacaagtgttgctatcatgttacatctttggaatacgatgctgatttaaattttattgttttgacagatgtttgatgatcaagacttgggctttgtcgccaatttccttggcatttttatatttgtgctggtgattgcttaccattatgtaatggccgaccccaaatatgaaggtagctaaaaaagtgatagctacgaatatatgtattatttagtctaccttgttctaccgaaactagcatgatacctacaatttgtggattttgttaacttatattttcatgggaagttttcttattgacaatcttttttcctcctataattgaggctataatcttcatcattcttctttagataacatcttcagactcgatattttgcaatctcttatccccagcttatataagtccaactccaagaggaggattgagccatgttactatgtgttcttttcttgatttgttagtctctgcagcaagtataacaaaaaattaataacaactttatttcaatccaaattttattctttgtagtacgtaggcagtggattcgttctttgattagtggtttgattccacttaaaattttagaatccaatctgtgtgggaccttttataaagtataccataaataaacctcctttagaggctagagaacttgtgttgaacttgcttcatacactaccttgtttcgtattcacgaagatacaagtgttaagtgcacttatttttagtggctaatgagtgcacgctggttattcgatctaaatctcatatgatatttctagaggctaatgctatatcaaattttgatggtttaaaaaataatattttgtggtataaatatttaagtttaattttttagagtaataatatttatagttatatttttaatatttttataggtacttgatggtaaagatagccacgttcctgactagtttatgttattaaatttttattttttatttacaaattaatataaatatattaataaaaaaataatacgtgtataatgattttatacttattggtaaaaatatgacttaatattattattgtaaaaaattaaattttagtatttatttataattgagagataaatttaattatttatgctgtaaattatttttaaaaaaacaatttttgaatcaaggtacttaagagtaggattttttcctgccaatatttttttattagagcttttcttatttttttatcgagcattatgattgtgctttaatgagttttaatatgcaatgtcaagcaatttttttttctcgatcaaaaaagtatattgttggaactgggttggatttggtacactttattatattgtatacaactatatttagttgtgttgtataattatatcaaaatttaatttattccaaattatatgtatatatttggatgcacctttaattgggtattacttatgaatgggtaaaattagaaaaaaattgagtttttatgcttaatttttctat

SEQ ID NO: 16191 - DNA, 2487 bp, Cannabis sativa
atgctgacttgagtgaatgaaattaatggcagagcttgagttgatgaaagaaagatttgcaaaacttttgctgggtgaagacatgtctgggagtggcaaaggtgtttgtaccgcagttactatctcaaattccataaccaatctctacggtaaatctttaattgagattaagcaaatatgactattttttgctttcatttttcaatctgacatctcttttttgtattcagctactgtttttgggcaaaatttgagactagagcctctaaattctgagaagagagctatgtggaagagagaaatggattgtcttctatctgtatgtgattacatagtagaattcatccctgccacatcacaaaatttgagagatggaacagctttagaggtatttccatacatgaatgattcatgggctgtaatgaaattcaactagttttgctatactattgcttgttatgaaccttttctgatatatatattctttttcctctttaatctctcagattatgacaagtagaccaagagctgatatttatataaacctgccagctttgagaaagcttgacgcaatgcttattgtaaggatctctatcttgcaccatctctaatagtttcactcagttctctatcagagactaatatatacatggattctttggcaggaaatattggacagtttccaagacagagagttctggtatgcagaacaaggaagcttgtcatccagttcaattggttcaggtccttcaggatcatttcggagaattgttcagagaaaagatgagaaatggtggttgccagttccatgtgtttctccagatggactcactgagaaagcaaggaagcatttgagacacaaacgtgactgtgccaatcaaatccacaaagcagccatggccatcaatagtagtattcttgctgagatggaaattccagacacatacatggcaactcttccaaaggttatttctctactttcactttaaaacttctgagaaaagccaattgacatatctaagccacattacaacaagtttctctcatagtattaatgttaatgcaattcaaaaagttgttcatttcactatgtttcctactattctgttctgacctgttttttcaacaaatatttttgtttatagagtggcaaagcgtgtttaggagatatgatttatcggtacatgtactcagcagacaagttctctccagaacatctccttgactgcctcaatcttgcatcagaacatgaagcgcttgagttagcagatagggtcgaagcttcaatgtacacatggagacgtaaggcgtgcatgagccattcaaaatcatcatggaacatggttaaggatcttatgtcggacactgataggagtgacaaaaatcatgttttggcggagagggctgacagtttgttgttctgtttgaagcagaaatatcctgagctttctcagacaactttggacaccagcaagattcaatacaataaggtaaagattataatgatatttcaaacttcaaagtaatatttgagatgaaatatattcttatataagtataataacccaagtaaaagttttttcaaaaccataattgattatatctatgtgggaaatattatactcattatgattttctctgattatgcaggatgtgggacaagcaatattggagagctactcaagagtgttggaaggtttagcattcaacatagttgcttggattgaagatgttatatttgtagatagatctgttaggaaccaaaataattagagattgcaaatgagtttattgttaaatagggattatcttaatcttagtcccataactatttttcttctctaaccgtttataacaggaaagtgcagatgttatagctaatggctaatcaccatgcatatatgttaatgcagcttaattctctttttcttattattatttcttttttgtaatcttgagtttgtacaatattatcatccaatatattgaacaattttcaaaagtatgaccactatataaaaaaagtaaaacatacattcatggatacaacaacttaatcacttaagatacatatacatatatataggcgctgagataaataaaataaattaattataaaatgagagtaagaacatcgacattaccaatccaaatataagatatgatggaaaaaagaaacctggatttatcccttgagtatctcggttacataaatggcaacaacaattcactcattcataatgagctgcactttaattcaagcggatgtgaaattttaagtcactaacgcctatttctctcccaattaatatctttgttattatgattaactgagtttatacactaaacttcaaaaccctaaccaaaaattctcaccataacagccatagccaccggcgaactgcctctctagccatctcccaatctctacctgtctccctctcttcccgtctttctctgtcgcaccagcacggccagccacaccag

SEQ ID NO: 16192 - DNA, 9240 bp, Cannabis sativa
gatggatttgactcaacacaaatccaattatttcagttttattttttgctaaattgttttatcctctcttttatgcagcttaccagccagctattgcaattaccatacatcgtatggtagcccaaattcaaaaaccaaatattgagtggccaaagtctaatcaaaggtatctattgacccttgtagaagtaaaatgtggaatagttttgcttttttagctaacttgaatcttttatgaaaatttagatgccgaacaatggtgattgaaaaaagagatactttaagttcttggttccacacgattccaccgcatatttcaaggcatttatctcctacatccttcgtagaagaatcagtttctctactattacacattctgtcaccttcaactctaagaccggtatgctactttttacatcaactgtttgtttcccttagtgccttttcagtgcagttcaatttcaattttctgtggtatatttgcatctttttcaatccatcactagagactttagtggatagagctttgtcagaatataattgtgtgcatacccatgagggataagtcaagtacgcctatgaggtttgaagttcaatactctgtgtcatctatctctgaaaagttgtatggtttggtcagaagaggactgctatttaaaataatgttaataataaaaacaaagtgttcagcatttttactttcttttgtgcaaaattgatctgattatccatgtgacttaaaacgtagtttatggagacaccttgagtactttttttggtaaggtgagtacttttttagttattcttttattgtggtgttgcaacatttattgattttatgttacataaatattgcccattgttattttcttgtaaacattggctttgaacgtttttaccattagataatagaaatatttttgtggttcaatatatctgccttattgctgttctatgaactatgagaaccttattatactaagagatgccaagcctctctgtgtacgtcgtaatagtttacttggtatttaaagtaatgacaagttttgttatgtttcttacaaaatctgatactctttataggctgcattaaactcactatcagaaaaggagaaagcggatctggatcagttagttggcaagatggtatcttattcgttaacgtataagaatgtgaaatcaaaccctcttcctagtgacctgggaaatggagcaacatcagatgtcacggttcttgcatttgatccccccatcgctgactttatcaatttcaaggtttgttgctgtggttatcttttctgtcctcttatgttgaaaatattgtctaatattgttttcttacaagtgaacaggggtacaagtctggccattacgtacttgcattagcaatgaagcaggtgctggtaaacgaggtaagctcttttcacctaagggaacaggaatcttgatttcagttgccataactattacatatttctgtatatgttgcccatgataataaaatattacattttctataatctgttgcatgccaggtggaaaagcaaaagatcttgcaagtaagcactaggagatttgcgagtttaactaatggaggaaatgagggtaaccaagttcttttaggagaagaaaccagcagatcacaacctgataaagcagctaaaatctttggaaaaacttcaaggccttcaaatcctagcatctctgctacttcttgtaactctgattccagcagaagcggtaccacagcaagtgtgaatttgaagtcagccaaacctccaaagagatcctctacaagtttttttgacaggtaaaatgagttctttgtatatgtatatgttcttttaatgttgcttataccgttcaccacttactcttttttttcttttttaaatttcatttcggtaaaccaacttcttgttgtatcagtgacttgtttacttgtatttattaaatttagataaaataatgtatgcatgcatctcctagtttgcaatattcttctcttttgtgtactcaaacttggtgactaagccattttcgtttgcgtttctgtagactgcgataaattttggacttgggcttttgttgaattgttaaattttcttcttttctttctccatctatcttaccatgtcattgtatgcttatcctgatactattgatgtacttctcatcagtatatacatcatttggtggaatatttatttcaaaaaagaaaatgtttattacttattttgattatcaatttacaatctctttcttttgtgagtctttaagtttttattataaactagaatatttataccactataatgaccagtaaaggcagtattatcttgcacttttcttcaagtttatgatctcatgtttacttaaaatacaggttcaaaaggattggtactggttctcagaattctgagaatgttgtcccaaaggaagaaaccgcagagagagacttacgtccactgctgtttaaatttaacgaggtacatatacattttgcagcgttactatttctttccatcataattacaatcataattatggtcacatttgttaatgctaacttcctgaaagtagagtagttaagctacagagttagatttaagaataattgtaaaattactacttgcgtgcaatatctttgtatgtgaaacacaagaatattcttcgaagataaaagaggacaagatttcggtacaataagtgctgaaccattttattttttcttccactgcactttcatcttcttagtgaatttaatcaaggatactcaagtctgccagttatgtctttaatgaacaatatcctcattgactttctgttttctgaagttttttaataaagaaatgaacaattttgtttcaagtaactgcgaattcacatgtttgaaccctggcgtggaagatgaggcctgattattttgaagcacagttaactctgactgacaatcttctgtgtataaattctctgttttcgtcatgcagggttttacaaatgcagtaaagaggccagttcgcattcgtgagtttctgctatgatgaatcgtggtttctgtaagcaacgtcgggaatcttagccacattttcttgcaaattctattcactacctttccctctaaatctatacataaatgtacttaatatgtatgcatttatactcaaaagtcataatatttttgtatcaatagccatgtaaagactgaagcattttccatatgcaataaccataccaggtttcagttgcagcaaaggagcaatgagatggacaggcagcaaaggagagtaatttcaataaaatggtaacattgttttgcttgcctgcctccaaatcattataaaaaaattctgagaaaaaccttagattagaagcacataatttttcatcatgtcttagttcaattttcaattttctgaccttttgtttcttcattaatctgatgtttattgcatgaaagttcctctagagtattatgcctaaagttcaaaatcacattatacttcctacaaaataatacaaaagaaaaaaaaaaaaaaattacattgcttgaaatcacaaaatttagaggacttaacactagtaaccacacaacaaacacaacagttctattgttacatttatcatgatacaaagtagaccacctaaaatcacatcaaaatagttttttcttttcccctagtctagttccattttatttgatcatatctgaacatttcctccagaagtagtagtagtatcatcaggaggatttatcgaaattaacagcaaagaaacagtaatagagatcaacccagcccaaacaaacacaatcgtagggactcgtcctcttcttcccatcaaccctttagcaaaagggtacatatgagccaaaacccaaaagctaaagaaagtcccacctaagagcttgttccattgaggtaacacactgtataaggtcctaaaacaactaatcaccacagcaactatgttgaccactataatagtcaacggcattataaacaaactggtccacttaacaacatataagtcagcaaacacatcttcctcatcctcaccacctgacttagaagtcaacttaaatgaaatctcaataccagctatgattttcaataacccttgtactacagctacaaggtgggcacttgtcccaccaatgagccaaaactgttcgtttctccaccattcctctagaccaattccagaccatttcacttctaggagggaaattagagtgagacagattgtgatcgttaggagataggaaaggaatgccacactaaggccttctactatgaactgtccagaaaggagtgatagagctggaagaaaacaataaactactaggaagattgaggtgaagggatagatcccgacgtttaggtaagccacgcgttggaggaacttgaggcggcgcgtggctagaagtgcattgttctttgagaagaaaatctcgactgagcctgttgcccaccttagcacctggtgtagccggtcagtgaggttgattggagctgtgccacggaaggcgtctcgttttgttatgcagtagactgaccgccaacccctgttgtgcatccggtagcccgtcaccacgtcctctgtcactgacccgtatatccagcctattctctcaccccattctgtcttatcctcgtacctgttttttttttcaacaatgaaaaaaaaaaaagttatttcgtataaactctcttttggttaatttgtagaagaaaatttagacaatgcagtaatctgctctcgtattacattttactccgtataatcattaaaactcttttttccaaaataaccaagcgtaatttattacttagatttcaaggcactgaacatattactcaaaatccaaagtagctgcttagcttattgaatctgtagagagtgagtgaaatacttaatacataccagcaagagatgacggcaacagcttcggcgacagttggggcatcaagaggaggacgcgggaggaggagtgcgcctggagggcggccattcttgacagagctgtgatcagcaagaggacgtccttggtactcggcaacggcaatggtttcagtaaacacgtttgagtttccaaacttcttaggcaaaccaagatcagggtgtgaatttaatggctgtgtatctgaatcgtcatccaccaagtgttctgattggtaatttggagctctctttttcgattggccaaacacgcctaagtattcgtttgctctcggtgggtgaaacccgtagagtgcatatcgcctgaacatgcacccggttcccacgtacaccgggccttgcaggccgtcaagagctctcatgttacctgttaaggtaaaatatttagtaggagaagtgggtgaagtactcttatcatcatcaagtgacatcgaatagacatgagaatatcaaatcgttattgaattcttattgtcaattagatttgagatagaattaacgaaatggatgtaacatttgtatcaaccactttctaaaccttcattatacttgtttagatcattttttcaattacaagcttaatggctaatccaaataacaatagggaataagcataatatctctaatgataagaattcattgagataaagaaaaaattaagaaaattttgaaaaatagtctaggtataaagacacctaagaaataagaatagtagcttaagaaactacaacaaaaacaaaaagctctatctacactagttttaaaaaacacaacaactttgaaacaataaggaggcgtttggttggagataatgaaataattttcactctattgtaaaatgaattttttaccattttgattaaatgactattttattttgaaatagaaagaaaaattatttattttttttttttgaaagataaaaagaattattattatttttttttttttgagtaaaagaaaaaattatttttatgcagattaaattttattctattttatttctatgtgttcattactaccaaccaaatgccacctaagctaatagaacactagtgaaagtttggatacatcatactctcctttgtgatgacattgttgtttagaaaagtaagcctatttggtagaggtttcaaagtaaagcattattataactaactaataataagataataaaagtgagaaagaagtaataccatcaaagaaaacagtgttgtgatttgcatatcgatcagatgggtcaatcccttcaaatctttgtgggaattgtatgtagcaaattctgtctcctccacggtccatcatgaaacacattccttccttaatggccaaacagttgtagatgtaatggtcacaatctaggttgagaataaatggtccattggagagtattgctgaggctctaaccatggcgttcatggctcctgccttcttgttgtgatcgtaacccggcctcttctctctcgacacgtatgcgaacattggcagcctaatgtccactcctgtgaaatctagcttttgttcatcgttgtaacccattacttgctcattctctgggactttagtcattacctgcactcaaattcataaaaaatcttaattcaaacttggtttcatgattacactagttactcttttttctttggacaaaactaatttgggccattatcttcactactactttttgttacatggagcatgaacatgggacttcttcatttttttttccttaaaaaataggaattttgaacttttttctcaatatatagttttcctaattataaattaaccatatgagattgtatatcttttaattaaggtttctcatatataataacaaatttatgtataaatgggagagaattttgttccgtgaaagtatgtatttttgcggtctttataactattgaaacaagattgagttgatctaacagttgtctctataactattgaatcaagattaagttgatctaacagctgtctaccagttgaaacccaaagtatactgatttttttttttttttgatttaaacgtttatatattacaatcatgttttacctaggacttgaacccaagaccttcaagacacacacccacctatggccacttgaactagcctcaagtggttcaaagtatactaattaatacatataaaatttatagagaatgcctatgtgattaaagatcatgaaaacaagtgtatgtaatataactatgtatctataatataactataaatataggtaatgtatttcactagctatatataagtaatgatactatattactatacataataagtacctgtaaaataccagcgtgatctcccttggcatggtcaggtgctgaggttagccatgtgccaggccagtgtgtaccatcagccatccatgttgccttggtcactttgattggctctgctggcaaaagcccaccattttggtctctggctagctttttctcctttgcctcttctctagaattgtacatttcacttctcttttttattgcctctggtaaaccattgatccttaccttaaactcgtcgtattctcttttgatccaacgtcgatccttgacgaaatcaggaagcttcttgttcttagttgggtcggttttcgagctgaaatagctgtctggatttcttggttctatgttgtgttttctacaaaatggtacccaaacctgtatgtacatgggaatttcatcattatttcattttcaacaactctttctaataaggtcattttgcgaaatggccttgctgtattttgtgaaaaattatcatattattgttgtgcaaatagattataagatgaagatgattcatcaaaattactattttatgaactaatgataattaattagtaaggtttaactctggactaaggcgggctaagactacgtttagagcccacttagctcagagacccaaacaaaataattaatttttgaagtatacatattgttttagtaatttttaagaaaatacgatctgttcttttaataagaattaaaaaaaatattttattttttaattattcattcaaaatgaaggatattatctatctaaaaaagttttatgtgttaattcatagggcacacactaatctataaataacatagattaagattaccataaacttctaataacctaaaacaaaaacatcttaatgaaattgtatcttcaagtattaacttaatgcataggatatgattttggtggatattgaagaatgtaatgaaaacctgagcaaagttaacagcctcagccatggcctcaaaggtgagaatggcacctccatcatccgaaatgtagcacgagagcttttcggtagggtaatcagcagaaagaatggagagaattgtgttggcagtgaccaaaggaggttccttttcagggtcagcagtagaaacaaacacatccacaccgggaaggtccgagcggccattagggttagacggggtgcgctgctcgaacttgtcgcgaagggcggagagatccgtggcgcggttgatgggattaagcttagggaggacatccaaaagccatgaaaatgcaaaccaaatctcacaagcaatggacattccccataaccacattgcatcattgtttggattttggattctccatgctaagaaaaatgatagcactaccattcggatcaccactagtaacctacacattatcaattcataacaagaacaaatttacttgatttagattataatcaaacttgaattaattaagcatatttattagatttattatctagattatgtatttgagcatgaaaactatactaaaaagagtagtgagtccttttcttttctcaaaatcaaactagctacaacttcttggcattttaacataaatttaggtattctagcatagaattataaatcaagataatcttaaagcagactgagtactctgttccattgatgattatatattactatgcttaaccataccctatgttgattaatttcatattttaatctcattcttaagcataaaagcaaacaccgaacataaataagatgacatcttacaaatgaagtggcatatgatttgttcatcacccgccatgttcgggttttattaattcaaaatccgaaaaaatctggttacacctaaatccacccgaaactcgaatatataaaattttgtttgatacattttctgaaaacataaacttaaaacaaaagaaaaatctaattctaaacaatgatacattatttatattttattttcttttcttttcattttttct

SEQ ID NO: 16193 - DNA, 5845 bp, Cannabis sativa
aaagtaatggaaagaaaaatattctatccattacatggaacaaaatgtttcaaggaacactattcgatctcctgaaatcggcagaagagatgcatctcctacaacataatacatagctacagtacctcaaatcttcggggctcatccttgatgttaaattaaaaaaataaataaataaagactttcagcaaaagtaatggaaagaaaaatattccatccattagatagaaccaatgttgaaaggaacactagattttagtagaatacctggatcacaagggagtcaaagcttttttctgtaccatcagaatcataccttccctcatataggtcttccaaactatcaacagatgaccttactcttaacgatgttacaaaagtttgccacaatggtcccattattactgcaatagaacagtgttgttattggggcccttacaatgtgaattggtaagaaaaaatgaagaaaaaaaatgcatgcttgactgaagtgagaaacatactcatgaattcactttccgtaaggctagggaaattctgaacaaattgattcaagcacttcaaaacctggtaattaatgaaaaacaaagcacgaatttcagtgcttattgtaattcaaagagactacatgcatcatgacagaattttctcaaacaatctgacctccattctgatactccaatcatcaggatctttaggttccactggttgatttaggataatagcaaattgagccatccaaggtttaatcataggtattaatattgtgctggtttccgtctgaatataaacatcttaatctgttaattaattcaatcacccgaatcatatcactgaacatgaccaaaacagaaagaagaaaataccctataaacgccacacattgcacccagcatggagatgcaagaataaataattgaaagagcttttgcacgtaagtatttgtcatacacctgcacaaacaaaccgtacaatatagtgataaagtggaactcagtggaacaatgttttccttctagcaaaatttgaacaatgaatacccctagcatgtcaacgctatatgttcaatgacaattgcaaaacaaaaaaaaaaaaactttgaccacaactatcaaagctactaaactttatgcaagccaccaaataatagttcattaactctagcacaatctgtgataatcttgaaaaggaaaaaaatcagagagaacaagaaggaaataagcatgcataaactaaatttcattctatacatagcaaaatcatgcaagtactcatttagaaagttatgattttttttttacatagtaagtcatgatttttttcttcaactgtttgatgagtagcacaaattgctagcatcttttaacaatattaaaatataacattgacaaaaattaaaatcaaatccattgttaatagtcaaattcaagtgttgccccatagcttaatgcttaatctttaaggaaattcagcaatgttagtatgggattacagcaaaagcttgagttcaaacccgtagcctttaaatattttcaaatgcatttacctattgttcagcacacagcctcacaaaagaatagaggttgttgtgctggaggataggcttaactttgctcactttctaatagactacgttttatacgggttatcacgacacaaattacccaccttcagaataagaaataaataagatgcccactgtttgcacagacataaatgcaagatccaattcagtcattcaatttttatttatttttaattttttgaaaaagagaaagagaccacttgtctagacaggtctccccccgatatatattaagaacctcattcaatgagcaatgtgaacttttacttgaaccatcaaattcctcataaagttttaagatgaaaatcccattcacttggtctctttacctcactccatttgttcgaaaaagcaaatgactcaaaagttatatttgctatgcacatgcacaaatactaatgtaaactcaaaagcataattgactatttacgcttatttcagattttcttgaataatacctcttacaaaaataaaaattaaaaatttatgtttagaaaacatattcaaatttcaatataggattctaaagagctgacaaaaccaaaatataacacaaacaaacctgagtggatgaaacaatagtaagcaggcatgggaacaaaagaggcactaatgtgggcatcactttatcatccaagtcatcagaaagaagagccaagcacctcaaagctccatttactacaacgtttagaagcaaaaaatatgcatcttcagatgtataagtcatgaaactcttaaatatgaaacagataacaaacaacaacttgcaacaattgagcaagttaaaatcctgaataccctaaaatactaccgctgctccaagaggatttcaaaatcttttcataaaataggacgcatctagaggttaaagttgtcaatgcaacagaagcagtactaagtaataacagaataacaacaaattctccttctgtataaacaagacagctcagcactagttgctgctggacaagaaatctactagatgatgatgagtaatcatgtttaaaacagaaattaaaatcatggtatatgacatgttatacattgagtttccttttgggcttcctgatttaagacaaagtttatattgacgcgataattgaggccatcaaataatttgacttggccaaaccatgtaacaaaggaacctggccaatttcttacaaaatgattttgaggacattgtgacaacctcagagaaaaattcaaagcctgatagatcaatatatgctcgcaaagcaaatatgaaaacatgaaaatcattaacatagaccatgtagtagaaaaatattgtatttaaaatcacataaacaaaggccagtaagagcaaggacagcatacatacctccatcccgatttgtctggtcattaattaacttcaggagataaggcaacaagtcaggccaatcctctggccaatcatgaagcgcaatcgatgcaatagccatactaattgcagtgcacatttttctataggagtcatccagtgacaacaatagaagtctgcgtattttttcctgcgtgtgtgaacatggtcttattagccttggaaatcataagatataatatacagatattatgacctgattattaatactgaattacaaactctcacagctaaaattataagtctgaaatattttaaatgtctttttgtgggaaaggggcattgggcggggctaagtgtgggaacacatttgattttggatggaacccttcacagctgcattgccttatgaaaacttccagaaaaagatattcatgcacaattaaactgatggaaaattccaaacttgctggaagttttatcattttcgactgagcatttgtagcaataatgaaaacaggagaatatgtttgggaaatttatctgaaattttaaaatgtaaacaaagcaccatttattagctcaataactgaaatctattaaggaatgcccctctccagagattttgtgtaaaagttcagctacaccaaagtttaaattgcttgctctgttgttgattttggaatgtctcatgttcatgattcactggcttgggttgttattattgggtgttctgggcaaaaaaataacagagattctgcagatcatatattcccattgtaggatctcttaaattatggtttagagttgaagctagtgtgggatgtgccaaaatatgacagtgcactgaactactgggattggaacatgaatttccttcagtatgttctgttgtggggggatatggggtgcctatggatcgttgccgttcactagattaaagtgatccaacaacacaatagcaaaactaaagttataaaattaaatttataaaaccattttatttatagctcactacaactagtgaaataaaacttgaacaacaattctatgttaataattagactcttaagacgaaaaattttcttatcatattgctttttcgaatagcaggaaaaatgaacttatcgacatatttgttactccattaaagaaagagaagctagataaggaaaaacacatactatctagaacaagtgcacataatatatttttcctattaaacatgaagtcaaaaacaaaaagaattttcaatgaactgtaccttttcatcaaaggaaacaacaggatgctcaaaagattcatcaccctcatgccagtgtttcttaataaactgcttcagaaggacagcagctaggtatcttttttgtcaaattcaacaagataaagagaagaaaatttgatatagctagatatataaataacaaaattcaatatatcttttacaaagagaaaaactacaagatctttgagagagcggagaatctataaatctttatgaatgacattgtatattttactgagatgtgacagaggaaaaaggacatgtaataaacggctaaggaaagttccgctgagaacatggcacccccatgaacaccctactttctgcaaaaactgcttacaattcacatcaaaggttctttaattccacaaacctcccaagaaattaactccaactagagttgagaagagacaacaagacatgagaaacaaaactaccctccctttctacattaggcgctaagcattttcttcctgagtcaataccatgagctgctttcaacaatcaaaactccttagccacgtgcccatgagagtgtacaaactttgcacttagaccactatttttgtttagcaaatgttgaaataattcggaaaataaatgattcaataaaagaaaggataaacctctagtcgcatatacattcaaacattattgtttatctataatcaagcacgtaggaaaaggatatctggcgcaaccctagtgagagctctctgtttacagcaacctgggctagtgcacttccaaacccttcaaaaaataaacaagtaatttacgtaaccgcaaaacaatcaaagacatattgacacattcatccattgaaatgccaaatcaagacactataactagtacaaaacggattagcattaactgcttagcaatagacaatataataataataataataataaaatccatattcatgtcccttgtgaacaatgtaactcctatactttctgtacaaagttatttcaggcaccatcatttcccataagacgacaataagatagtccaacatgaatcccaaagcatatgcgaacacacatacttagctcaagcatcaaatatcgattccttgaacaattctcctaatacaaatcaaactcaagttcgaagtctcgaacaaatcatcatcctgcttgaaatgaaatgaaatgaaagtatagctagattgagacttatgtaacataaacctggctgaagagtggcctgattaagtgaagcttcggcgaaagagcgaacctcttggttagggtcgagagtggcggacaaacaattgagtaaccattgctggtcctgatcaacaacaccatgaacattcgccattatcgccgaaaccctagggctagtattggacttcgattacagttacaaaaagcgtgggctctgcagtttagcccttcggattttgtgtgtgggtttttcccgctcaattaatggagacgctgctaacaaaagacaagacagttgtactagtcagcagcagtctagtcgcttcctgcctttgaaatgggttgcgcttatatatggaggctcacacatcacagtggcagtctcgaaattttgtttccttattcggagctccgatgatccgatccaaatagggtttgcccaaattaaaggggatttttatttttttttagaa

SEQ ID NO: 16194 - DNA, 9230 bp, Cannabis sativa
caaaacggaaccagggtttaggtagtttagccgccaaaaattcagtttttgtggttaagtgttacaaacagtaaagttcaggtggtttagccgccaacgaaatttcagtgaacactttatttttagttcagtatacaatataattaacattaaaaattatatttttattttattttgtttaaattgtttaaatatttgttttaattgattaatttataaatttgaaaatatgtattttgatcttactcaaaaataatttgaccaaattcaagtttaacagattattttgacagagtacatgcaggtcccatatctacgagttaaatttctatccctagctaggtgctaggcaccatagtaactaatagcaatgttccaaagtaattacatccattaatctgatccaaactaaaatatctctaaaaaatggataaaattagtatttacttatttggaaatgaattccaccaaagcaaattaaagatttggttagggttatatatttagttaacattaacatttagattttgatatgtccaaaaataaaaatagtatgaaaaatactaattaataaatatggaataattaattatctcttaaaaaagaaaattgggagcaaataaatataaattattaaatatgaaattatcccttaattaatctttctctccaaattgttcaaaaaaaatctatttataaatagatttttatttataaaaaaggctgaaaattgactaaaacttgacgtggaaaagcatatctggaccattatcatttcacctctaacaccatttacctacttttttttcactcttttttttttattattattaaaaaaagaaaaaaaaaacgaccgtacaaaagagtggtagtttgggatctataaatacttaggttccccctcctcattcatatattcgtaaaaacatatatagactataggatctgtctttgatgatattatatatataatttttcttcatcttcttctttttatttttccaaaaataattataatggaagataataataagaagaaggttttgggtttgttgttatgtattgtttgttgtttaaaccttaattatgaagatggagttgaagcctctcacatatattaccctatcgattctaatgtggaggctgttcaagtcaggcaaactcacagaactggataccatttccaacctcccaaacattggattaacggtaatacttacttcattatatatatatatatatttatatcatgttcatatcctcatctttatatatttgcatgcaacattttttttatatatataaaaggaagttgtagttttttttttttttggtgatcgatcgatcttttttcttttgaaagggtacacatttctgaatgaaaattatgatcattgatctaattatatatatatatattgacacccatacatataaatatagaatatttcgtgatattactgttactaaataaatttaactatatatatattaattttaaaaatattaagttattatattttgatccaataacgaataataaaagaaaatttttagtatatatacttactttaattagctacttaattaaaaaaaatatttttttttactctatatcaaaaatatgtttatctatagaaaatatttaaatcaaactcaatttttttttaatttttttttttactgaaaaatattttttcttaatttttttcaatagaaactcaatccatataatgtaaaaatgagagattaaattaattagataaaaaaattaagcttaaatactaaaatttaccaaagtaatgcccattaagtgaagataactaattaacatgaagagcaaatttttttgacaaaaacaataataattatgataatatgaatagcaatttttgaactatttatgcgatgtatgcataatatgaatagcaattaatgtacataatgatgtgatactattaaactatgcataaaataataatttattttgaaaaaatgtttgactgatttttattttttttaaatggatatttgactgatttaagatgcataataaaattgagtgtgtgtgtatgatccgcttccatatatattgtgatttcttttaaatgggagtacatggtgggctcatatgtatgttacatatagttggaaaatctccaaagataagattgtaaaatcttgaccacatactatggggaataatgatgatacataaatgtcaggtcaatgatttttcgaccattttttcatttgtgtttattgtttcttttgccaattttacttactttttttaaatcagaaaacatccaatttgttttgtgttatatatttggtatacattattgcgattcagacgtggaaaacttttgaagtaccagttctaatcatttttttaaaaaaaaatatattctgcctatatatgagcgacaagccttggaacttgaggctttttggctagcttattaaacatttaaacctaaagttgggtatataatatatgtttgttacatcttagatggactgattatttatatttattttataggaaaatgtagattttttgtttgtgtgtgtttgtgctggcattaatgtatttttatctatatctttttatacatgcatgatttttttggtagcatttcctcatatagaatagaagaatataattttgagtagtggaagtattcatttttacacattagttttgaattgattgaaaaagacatgtgtggcgacgggtttaggaataagactcttcctttaatttgcagtcccccggaaattattaatacataactatttttatgaatatattttttgtcactatatattaattaatgataacaatatatgatatctataatctattttttctgtaacaagcttaaaaataaaataaaataaaaaataagtgacttttttttttaataataatgcacgcatgcacatagttcttctagcataataaacaatatttgaagtttggaacaattagtaagattacataacattccaccaaatagtagtttaggaattaattttacttttatgtgtaaagttagggttactgtgtctttatttatttggatggttttttctttttctttttttttcattttaattaattatttttcattgttttgtcaacttcaataataaacaaaagtagtagagacgtacacatcgatcaacctttaaatccctttaataattatattgtactcattttgcatgatcagtatgtggtcacaagagagaccatgcaccatggtttgtccacccttatactattttacatttttattatttttatttttcatggtgcattttacattattacctttcttaatcataaactttgaatttcgccaacaaaaaaaaaaataatgaggttttaacggctaaacctttttaattgtcaatttacttgtatttaattttttaagttcaaattttggtagttaaatcctactcaactagtagcaaatttaaggttttatctagtcaactgtcactatgagtttcttatgtgtacacttttgtacacctcatatatttatattggtacctaatattattatttaaaaattattttcaaaattaaataaaattataaaaattaaaattaaaatattttaaaaattaaaaaatattataaattttaaaataattttatattttctaaataataatatttagataactaatataaatttgatacatgtacaaaagtgtatatataagtagtctatattaataattaactgtaaaaaatagttgacaccttaaattcccgtagtttgaagagttttattgtcaaaatttgagcttagagaattaagtgccaattgagtgatagttgaaagaatttaactacaaaaagaaactctaatatataactaaagcttaatctatattactacgctatttattagactcatgtctatattaactataaccacacacaaatgtgcttaatttctatgtttatgtagataaataaaataaataatgttactcgattaatcattaacaaatacttataacacatagttaatttaaagtgttactaataatttaatgatcatgtgttctagcttatctaacatcttttttttttcttctcttatttgtcatgtgggaatcataactatctctccaacaaacaaaatacaattatctcaacagatccaaatggtaataagagtcttttttttctttaataattataaaaatttaattaaattatttaatctatggttatgtgacacatatattaatttatgtaataacaggaccaatgtattttaaaggactttaccacttcttctatcaatacaatccaaaaggagcagtatgggggaacattgtatgggcacattcagtatcaaaagatttgattaattgggaagccttagaaccagccatatcaccatctaagccatttgacataaatgggtgttggtcaggctcagccacaatactcccaggcaacaagccagtaatgttgtacactggaattgacccaaaccaaaaccaagtccaaaactatgccatccccaaaaacacatctgatccttatcttagagagtggatcaagccagacaacaatccaatagtcttccccgacaagggcgaaaacgctagcgcctttcgggacccaaccactgcgtggttggggaaagatggtcattggagaatgttagttggtgggaagagggatatgagaggaatggctcatttgtatagaagcaaagattttgttcattgggttaaggcaaaacacccaattcattctaagtcagatagtggaatgtgggaatgccctgatttcttccctgtttcagtgtctagtagtcaaaatggtttggacacttctgttgttggaaatggtattaagcatgtttttaaagtgagtcttgatcttactagatttgattattacactattgggacatataatgttaaggaagataggtatgttcctgataatggatctattgatagttgggatggattgagatatgattatggtaacttttatgcctcaaaaacattttatgatcctgttaagaagaggagaattttgtggggttgggctaatgagtctgatgctcgtgaatctgatgtccaaaaaggatgggctggagtacaggtaacatatttatatatgtttgttattaatgaattatttttttaatatatatgtgtgaaattgcataaaatatatattttatgagaaaaattaaaaataaaataaaataaaataaaaaatgggaaaaaatttagggtaatattatttttcctataattttttaacttttttgaaaaaaatctcataaaataattttttgaaagtgctttaaaaactataaaagtgaaaattctgtaattttttttttatatatgttaggctattccaaggacaatagtgcttgatcctagtggaaaacaattgctacaatggcctattgaagaagttgaaactttgagaggaaaggaaattgaaattaaaaatgcaaaattgaagaaaggagatattattaaagtgaaaggaatcacacctgctcaggtaaaattaataatatataatatattgttgttgtgtacgtacttaattatttttaaaatattgagattattattaatttgattatatataggcggatgtggatgtgaccttttcatttgcaagcttggataaagctgaaaaattagatagaaaaggatgggacactgctgaagccctttgtggtaaaaagggttctgatattagtggtggtgttggaccatttggactattgactttagcttcagaaaagctagaagagttcactcctgtcttctttagaatattcaaaactactcaaaataaacacaaagtgctcttgtgctccgatgcaagaaggtacgtactaattatagaataataaaagaattaatgatgatgatgatatgtatatgacatccacaccaaatatgcacacaaaaattacaagtatcccagatttttatttaagatgatattctttattttcaaatataatatcatatcattattgtctatgtaatatttttgtgcatatattctattattttatatttattacccaatataaaaaatagctacttttagtgataatttagtcacaacataaatttttaatcataacaaaaaattaattatttgtgattaaaacatagtatttgatataagttatcactaatttagttttagccaaaacaagtaatgtgattaaaaacacattagtcacaacaaattgtaatttttgttactaatattttttgccacagattttttagtcacactataagaatgatgatttataattattgttaatttttttatttttagtcacaagttttattgtaggtaagagtaagatttttttttttttgtagtgatatttaatttgtagttatgatatatatcttacatgtattttatatttttgtgtgacaattaatattccttttttaaatttgtttaatttggcataatgcagttcttcgttgggtaagggtctgtacaagccatcatttgcaggttttgtggatgtagatttaactgataacaagctttcacttagaagtttggtaagttaattaattttaattatttcaatatatattctcatcttatatatattattaattatgacactttaaaattattattattattattattattattgtagattgatcattctgtggtggaaagctttggtgctggaggaaagacttgcatcacttctagggtttatccaaccatggcagtttttaatcaagctcagttgtacctctttaacaatggcagtgagactgttactgtggaaagtctcaaagcatggagcatgaagaaacctctgttgatgaacaataactgagagagagtactgaatattgttcttattataactttagggttatttcacttttagggttcatcatatatataatttgcaataaaaattaaaaagaaaagaaaaaacaaaccaatgagctagctttcactaaatggtttgttttctctctattaattagtactgccctgtttaatttatttttatgtttatctgtgatctttttcatatcaatatataaaatagtttttgtatattagtattgaacattaatattagtttactagtatatttgtattgctctaagtacataaacataaataaaaataacaataaataataaattatatcaaaaggtatgacgaggttaattactaacaaaactaagtgtatataatgtacatattatagtgatcatttattgggttgggtagctaattaattaacaatatagctaattaaaaaataattatggatgatgcatgtccactaactattaagtaaatttatacaagtactaattctgtaccttataaaaattaaaacagaactaatatataaattctgaaaggtagatgctctatattccttttggctttaatttattaattattactagtagtagtactaaggtgagaaagtacgtagcacgtgtaaaacataaacctgaaaaggtaagtactttgtttaattacaatacctgactgacaccaatacatgtagttttttatttttgtttttactttttttaaggaaacaaaattcatataaaacaaagattacaaaggcaggtctggtcagccatgatagcaaaaccagcagctagcacaagtgtaatcctcattccactcagctatagcttccaaagctattctaaacaaacaatgggcagctaaattggctggacttttataaaagtattcttattagattgtagtgtgtttaattagtattatttatatgtgaaaattttgtaaatagctaaccatattctattttagttgttaaggtaaattatttgagactcgatacttaataacttaataactaataacgtaaaccgccgtccaatagtgatatcacacttctaggtaatattaagcactatatttctctaaaattaaatgagcttgggccagtccaaaacagccgtctcaaatgaacaaaaaaatgttttgttgttatatcagtccctgataaaccactcataacagttctaagttgtaaattttttaactttgtactgggctccttatgtagataaaggatgcctattattaattaattctaagaacagaatatagacagagagagagaactgtgagatttttttatggtgaggttttattgtaacttggagcaagagggttaaagtcttaaagatgaagagagaagaacgaaattgagaaaccagtgggaagcaggggtcatcaagggggtttcctaggtgttgtagcttcatttgaatattggtaaagggaaagattaacattgtaacaagttcaagctatcttgaaccaagctttgtaatctgccattatcatagtgaaaggagttcagggggaataaattctctataaaatgtagaggaaagttcgaacacctctaaattgcttgtgttatctattgttttctatttccaatttttttttctgcatttccagtttttgtttatgtggtgtataaattgaatggttaactgcaaactctttctcttcgttttgcttagctaaaatagtatcatatatctcttcctcactctttcggtaacttagacaaatctcgaagaccacatgctagttgtaaaggtcttacacctcgttcttccttaattgactttaactaatgagtaaaaacaaaataagaaagagcttaaacaatatagaccagattggggcacatcattttggatagtaaataaaagattaaaaaaaaagtattatccttaaacaatatacattccactatccagctacaaattgccaaaatcccaaggtgggatttattgacaccctcaataagaaatacccagtcccccagatcactctccaggctccatccatatattcttctgctacatcttacaaaaacaatagcacaagcaaaaataatcaatagtgtatacactaattatacagatacagcattacaatgcagtgaaatgagcttttaaatcaataaaaaatctcaattgatttgtgtaagaggagagcgtggtatgagggacggtttcaactcttttccatcaaacgattcatatgcattgttttctctaaattcctcaacaagagagtccattggcatggctctgagtgactctattgtccctttggttgggat

SEQ ID NO: 16195 - DNA, 3458 bp, Cannabis sativa
ctctctctctttcactctctctctctctctctctctcaaatgtctttcttgttctgtttttagtctttgtcaatgtctaagaaatctaataattattgttgaccgagtattgtaatccttattattttagagtattttttattttatctcaatatctttttaaaatggataaggtcaaaatttctcttacgatcccaaattagactaattgaattttatatgttttgctttaataattatttctattaatttcaaaaaataataaaacaaatttagtacttttgaattaatctcatcattcctttaagaatttcaacaatcatttgaatttgtctttgttgactaataatttaatttttcaatcaaatactcattgtaaaaatctcaataacccgattctaattattaagcttcttaatatcgccaattacttaagcgtcacctattgcacgtgatttggtgaacgaaataccaaataagcttatctcaccttgtaagcttcacaaacttaaatggtgcacgacaacaataagctagctcttattttactatgagcttgatgaaccttgctctaataccaccttttgagtaagaaaattacaacactttattatcattgaaaagtacttgggtaattgactctaggacactcttacacttttacacactttggactctcatacttacacttgaactatcttactcaaacttgcattttggcacgaaccatacttctatatatataggctacaagtgaagtgtctaagtcttttagaattttctaattttttaagttttattcaagtttctattatctctaaagaagtcttgaattatctatacttagcctgagtaattctaagcttactccatagctttctagaatattttaattctttcctaactagtacttgacattatagatttggcgatgactcttaagagcatctttaatttttcaattaaaatagagagtgtgccttaaaaaattgagctttaattattataaaaatagctctgtataatagaaaataggcaaagagctttttattttttattttttttgcttattttttaatagtatttaatcaaaagcattattagttttttattattttattaaataaatttatatttagcaaatttaaattatgaaatattattaaactaatcaaaatatactcataattaaagcaaaaataattatttattttaatttttaaactattttaactaaaattgaactaaaaaatagataaaaccttagagatgctctaacaacttgaagattcatgcatgatgcatagataataaatcagtgcatgtactactgctttcttgccgtgtagtttgtcacaagttttaaaatattatatactaattcttcttcaataacttataattattatttattatatgtgaaaaattgtacatatatgtagcacaataatcatatgttgaataataagcgtataaataaatctattaattgtatagtataaccacttttgttttatgacaaagttagagagaagatgaattaataatttttaacttggtttagatggaaggagtttatgccaacaagaagcaaactaaccagatgaaaaagataatttcaccttgagaacggtacgtataccagtttattatatctatattttttatttgctagtttgtttgtgtggtatactcatttggtaatatatcttattactatgaaatgcacactagatagttggttttaaaggcattttattttaggtgttccattgtagttcctatttaatccttaaaaaaaaaaaaataatatttgtgcaaaactgctaagagaaatattgacttcccaacatctattaactatatttaatctcatcaaaaaggacaactcttatacatgatgtatgatttttaaaaaaaaaattaaacaacactaatatatgaattggctgagcataaaattcacaatcataatatataagttaatttaactataaacttaccagatatgtaatcaggaaattaaaattaaaaatcaatgagattcaaataaataagatatatatccttttttctacataggaaaccttagttgttgattaattatgatgaatatacgtacattgccccgtttagaaaaatatatatctatacaaatacagttacttaaagaggaaaaagaaaattgaacgaaacaaagaaaataaattctatgactgtggaattactaatactaataaatacatttaaactcacctttttattcatccaaacatgtgatttgatttctattatatataaatattatatataattaattgaaatgcaaacttattctacgtttataactatatgataaagttgcaagattgcctaaagccttaaaatattaaatcttgtgtgtttcgatcatatatatattcctgaaatgtcaatcaaacagtatatgcagttacacttaataattgatcaatgtcaaccacatatattactttagatgttgaaatgagatataatgtgttatcaagttaatgatgtcaatatgttcaaaaaaaaagttaatgatgtcaataaaaattaatgcgaatcatgatctaatggaataaaatcatatatgcatgtaaacatcattagtgtttttcaattaaatgatcatatgattaatgttccctttgaaaaatcaaaaactgctgtactatactgttcctcgtggaggaggtggtttcgtggtccatgtgtagtatctagaagtgggtatctaagaacaaaagcaagaaatgacataaatataaatatatatatatatatacatataaatatgtattttgagagagagacccaaggggagagtggttttggataaggtaggatggacattgattgaaaaggccagtctttgctgcaaattttttgtacaattataattggattaatgcattaaaatctaaggaaattaatatgtggtgaatgctcactcttaaagaagattgttactgcattaataatgtccaagaaatacaatttaaaactaaaactaatcacaaaattaaaattagaatttaattgaaattagacaaagaaaaacttaacttaaagaatgaatcatgatctttattgcttgaatagtcagtagtatacaaatgagtatgtccaagaataaaactcaacacaatgaatgattacaaagagatgtcttacattaaggaaaattacttcaagagtgatactcccattatatcccttcacatactcactcactatgatattagactttttctctctaaacttgaatttgaatctaaagtatgagtcttggagattagagatcagaactcagaactccctttaagaatagaggaacacctatttatagttgttggtgtggttccctttaagttgctattaaagtcaactgttataactaataatagtttcttcagattcatctgatgagcaaa

SEQ ID NO: 16196 - DNA, 7324 bp, Cannabis sativa
tttgtatttttacgaaaattcacatagcaacccatatagcaactaagtactaacggagcaacttaaatacaccatcagttacaagctcagtttattaaattgagaagctattatctttttttctttattttattataaaaacacatgcaatttctttattaattccaccatttaatattttttacaaaattgttacttttttatgtattttaaaattattttttaatgtcaatattaagactttgtttataatacatatattaaaatgttatattttaaattatatcactcaataaatataatatatatgtataatttacaaaagttaggcaacactgcgtgaagcgatgcttagcgtaattttaaaaataaatttaaatacataatgtttataattcttagaacatattcatttggtatcctaagagtaattgtgttcttgataatagtactcaataattggaaaattaatataaaaatgatacattttattcactactaaaaaaaattattattgaattaggttaaaaatagtataaacctagaaagtgtatacacaagtgtacattgattgttgattatagcatcccatttctctcctcttccttccttcctagcttcacacaatggagtttgaaacccagtcagctttaccagagtctacaatggtgaagcaccatcaaaccacagaagaagaagatatttataagattctcctccctaacgtcggggaccttcctcctactcctccatcggctgttcaatccaacttcatctcctatttcgccccagatttcttgaagccagggcacgatcagtacgtttatcgtcacgcaaacggtatgcgtgatcggtttggcttcgacgcatctggcttttaaggaccaagaaggaggaggtggaggaggcatcacggccgtagatttcaatgtcggcaaatctaatcgaagcgagatgaaggtcaccggaaaacgcaagaggaacgctcaaattttagagccgaattcggctctttgcaaagtttgcaccaacgaagggtcttacattgtgaggtgttgcgtgaaagggtctctgttggaagtaaacgatagactgataaagcagccacagttgcttaattcgtcggcggaaagagagggctacatagccattatgatgccaaagccgaccgattggctcaaagtcaaggattctttactgggttttgaggagtataagaaacttagggaaatttgttagtttttcaaaaataagtgtgtttagtttagattgtgtgatgtatttaattaatacaatcaaatgctcttttaattgataataagagaaatcattacatcttgattatccattgtgtgtagattcatcttcttggtcttagaacttgtcacaacacaatcaaaagtaaaaaaaaaaaggaaagcaagaggggcctttagaagatttccctcttcgctcgcacataaattgtttcatattataaaccaatgaaccaaattatgtgagtacttaatcataaatcctaccatagtcttcaattaaattttggcacattactttttcactcttaaatttcaatactatactttttagtgtcgagccaattatacttgtttttagattctaaaagactatttttgagttttttaatttaaatgtcctaatctaaggaacaataatcaataataaattttaattaccttaaaccttgaagaaaaaaaaaagtgagagagtacatttttgaattttagattttgaagttgtccttaacttattataatttgaaaaagaaaaaaaattgaattttgaatgtactataattaaaaatattcaagtccttaaacaaaattgagtatcttaatggagaatgacttaaatcataaaaatgaatgatagtgtcacagaatcaccaaaggtgtgctctagtcaacttcaaaaactaagaaaataatataataataatcaccataaacatattaaattatataagaacacatgataagataaataagttaaacattaaccaaagtgcaaggtgttacaacaacatcctttagtttaagagccatcgcctatgacttatgtgctctctcaaatgaaggaggaatcagttattaaaaaaaacataccaattctaactaaatattaagatggagagagcccaagtaaacagggggcaaaacagcggtagctatagctaacaaagaaatagttttattacaaaacacaagaacaaaactaccctaagaaaaggcatttcaactttaataatgtaaactccatccgagctaaccagaaatggagctcaccttattcaggaggccttttatttcaccctctaacttggttctcatctctggagaaagattgttccctgatttctccagcattgatgtcatcatctgaagattctgtcttataaagtcaagaggaactgatccaggtgcttgtgcttgagatccctccattactgaagatgttgctatagttgttgcagtagaagcttgaccgggtttcgctactttgaaagcggcagaaagatcatggagccggtagttaatcagggttgaaccaaaagggttgtttttctctatactctgcaatgctcctctagcatcaatacttctggtgaacacaatttgagcactacccgggtcttttaacaacatagtttctgattctttcaatggtccatacttgcaaaatgttgagatcaaatcttctcttgaaggcactggaactccagcagcgaaagtcaagagaagagcagcagcaccttttgtctttccattactttcttttttattgtaacttacattggtgtctggtcttccagttaaagaaatattttttggtggctcgaaagcagcttgtaattttcttctctttttccgctcaggttttgaaggaactgtaacgccattaatcagaaccgcctgcgaatccttgcccagtgaattggattcgctgtttgttccatttaaatctggaataatttttggagctgctttctcccttttctttctctttttcggtgcagatttaccttgttcagaaagtgaatcaataatttttccatctttgtccaacagtccaaacctaggagggccattatgtgaagtaaaatgttgttgaatgggtgctgcaacaggaaccctcagatcaaccaccagggtaccaggttgagcattgtttctatgcatatccatcaagttaagagtgacattagcatttgaattccctaaaagagcacctttctccattttcatcagcagctccaggttactttctttagccacactgctcataacctttggattattaaccataacacttgatacaacagtgttcttaacctgtggataatcaaccataacacttgatacaacagtgttcttaacctgtggattatcaaccataccacttgatacaacagtgttcgtaacctgtggatcatcaaccataccacttgatacaacagtgttcttaacatgtggatcatcaaccacaccgcttgttacaacactgttcataacctgtggaccatcaaccataacacttgatacaatgtttccattcaaatcaggtataccagttgtttgatttgtctgatgatgctccaaatgcacttcttccactttcttctttctcctccgcttgactttattgtaggagcccatctccaaggcatcttttaccgacacgccatctgtggcaacgcttgtattcacatctaacagcccagaaacaggagttgttttcaaattttcctttgatgacagatcgaggctctcattctcctttacatcctgcacactattttctgcatttccaatcacatcaagcgagcagacagaatgtttaggagcttcttttttcgcggttctctttggcttggaattagacttgtcctcctctaaattattttctgcacttccaatcttgtctggcgagcaaacagtagaatgcttagaagcttcttttctcttggttctcttcggtttggaattacacttgtcctcctctacattattttctgcactcccaatcgcatctggcaagcagacagtagaatgcttagatgcttcttttctcttggttctcttcggtttggaatttcgcttgtcctcctctacattaatttctgcactcccaatcacatctggcgaacagacagaatgcttagaagcttcttttttcttggttctctttgtcttggacaaacactttccctcctctacattatttgcagacaagcaggcttcagcagcatttaactcatttcgaccgattacattttttggagatatttcatcagcaacttcatcatgatacacagaagtcctgaacctagaaaaagtccaaccaatgagattaaacttattactaccatttggatgtaagcaatccacagcagcagaacgaatttcacatagcaactcagctggggctacacttattaactctgaactgccaggtatgttaccctcaccagaaaaacccctgtaccatttcttccagaacttctccccactgcattttaaattcaaaggagacaccatattttggtcatcaccaacattttcttctggaggatcttttgttccagttgatgagtctttcttctcccagcttacataaggataagacaagtatctgctcttctttcgttctctcgaatcaaatcctttttcaattattctctttttcccactaacatctcctatgctcccttcagttccctttgttggtgtagatttgcataaaacaaccaggtcttcctttttacccttgccatcttcaactttgacagcagactttttcttcatctttttcttcttggcttcacttaaatcacaagaaccttcttcagcattattgcatcttctaatcccgtggaaaacttttttgtctttaactgaaactttatcttctacaacactggccctttctgtaagtagatgcataggcaattgagtatggccattataaagattgaaggccgaaagccgattatgtgtgacggcgaaatcaagcgaggtgcgaggcaacgaaacaacttttgcaagatacttgaggcaatcaaggaacattacaggttcaaacttagagactgaaaattcaccaagtctagtagatttctgcttggacttcacaactcctttggcaaatgatccctccttagctgctgtgagttgattgcgtgacaaagcacaggagcaaatcatctccaactttacatgcccaccaaactcatcaacagctttctccacagctccaacaaagattctactagctttggtttcccttttcatttgctcaaagttctcatgaaatggctttaactgagatggacagcaccaagcaaagtggttgatcccataataccccactagaaactggtccccctcaccagtccttgcagcatgttttggtgcatccacaggattacaaatctttgctggccaccacgtttgatttttggtttggacccatacaatatcacccacggaaaagttcaagtcttgattatcaatactagctccttgctctccattttcatattttatatcctttttgctctcttccaaagaagaagaattttctacattaacatccttgtgcatgtaatttccagcagagccactaaagtccacaaagagagatataccgccacttgaaactgctatctctgttgatacaagtggtttatcttcattcctcccctcatctgattgtgactttaacaaacccatttcagcctcatttttcttgtcaaatgtagacccaattaaacccaaacctgcctctttttcatctcccttcacaccaccaacattttcagcttttactagctgagttgcaacttcaacattttcaacccccaaatcattatttgtgaaaacctttgtttcatccactgcaatggaaatgtcggaacaggaagctaacccattgtttttttcacccaactccctcgactcagaaaacccagaagtctctttcgcggttttatcatctgggctttcagattctagggttttggggttctccatttttcgacaatgcccagaaagttcacttatttctgtaacatcttcataatcttcattacttcaaagctgataaaaagagaaacagaagggaaaaaaaacacttttttatttttcctgttctattcacacaaaaatccaacaatcaaaaagaaaaaattttgacttgaggcaaaaaaaaaaaaaaaaaaaaatatggctgaaactgaaacacaaaattaaaaataaataaatataaaatgtaataaaaaaatacctgagtagagagatagataaggagaagttgaatggtagtgagaggaatctttgtgatctaacaagtagcccagttcaagaagcttgcttcttttatttatttcacagaaatatataataacaattagacttttatcattttatgccgtttggagagagagagttgagaaagaaagtgtggttagtgagattaaataaggatagtacacagtgagtagtgtgtgactattttagcatacgattaaatgccacttttctgtcttccaaaagctcagttactcgcctaaaaaggatcactgtcatgtcacatatcatatatggcttatttatttttatttttttcaataagaataatttgatgttgtgttggcatcttttcttgtgtttgttgcgttttattagcagatagtgtaccaaaaggtcatttttaacccccttttttttttttttttttttttttatgaatagcatctttaacttagaagaaataagttgtaatgactccgttataagctttcattgaagtttacacttacaaaatgatgactcttatatacgagtatgtcactttgactgcttcataaaataatgactggccctacaaaccaatacgagtgtttccagcgtgctttgtccttattcgcacacttcctgagaaaactttctaagagatcacctatcttgaaattatcacaggtcaagcacgtttaaccgtggaggtatttcgtgatgggctaccgaaaaacaagatgcaccttattgatatacgtagtaccaatcgatccatttaagccatatttaactatgtagtctcatacctacacagtttcagaaatcatcacacatgagcttccccaagagatgtgggattgcacaactcccggtcttttcccttcgaatcacgggactctgactgtcacaatcaccccctctttaagggtttgacatcctcgtcgatcacacttttagttggttcaaggctctaataccatttgtaacgtccccgcttcaagcctcca

SEQ ID NO: 16197 - DNA, 3261 bp, Cannabis sativa
aaaaagactcgagaagttaatcacacatagaaacatatattgctgcgttttagcaaaccaaaatttatggtttaatctgtgggagaatcagaaattcaaaccccttcttatgtcaaattattggtatgtatgaaagctcgcatacaccacagttcagaaccttataattcaaggagagagatagtagcctatgtgtagaaattttacagcctcaaacaatttaaaagcaaacaggcatgaaaagagtaaacaagatgaacttgtaccttgtcctgaacacgactcacataattccattataaaatagcagcttttgcttacaactaaacaagtaaaaagtatagctaaaggtgatggttataaaacctgaacttgaattacataatccaaagtttagccaaactgtctgctattacaatattcacttaattaaagaaaaccatccttcccataggtggctggcaaaacacgaaaatcttagaactgtctcaaaccttatgcctgcaaagacgaggaagacttgtcagaaaacagtatatgcacatacagcaaacaaggtattcaagaaactgaacacaattattcttagcaaattcatttttgtagacttgccttgctagcaatgttattggagagccagtccaacccttcgtaaagaccttccccagaggttgcacatgtactctggatgtacctgaaaagaaacaccatatggcatcagtaagagttcatgtcatagttttcatctcaatacatcatcaaaacaagacttttcggcatacatttgccaaccactttaactcaaagacatttcaaatttctggttcatttgggtcaacaaattatctatatatactagaaaatatgaggattcgaggccctttagttaataaaagaaattatcaatgtgtatgcgtcttggtgtattcatttctattccataatgattctagattcaagatcttgctttcactttgctgagatcaaatgagatatcccaaccactagattcaattgggtttgaggttgaatcatatcattttttatctgtttttcgaatgcaaagggcgaagtaaaaaaatggatgtggcaacccaataaacgtgaaaacatgccaatgtttcctcatataaaaattacatggcaaataatagtagaatagttaccaatggcgttggcgaagagaatggagaccaagcttgtctgttatttctgcagcattcattgcattaggaagatcttgtttgttggcaaatacgagcagaacagcatctctcagttcatcctgaagcccaaataacattcaaatcaagacctcacgactaaagaataaaacagatgatacacaattagcaagcattgacaccaacaaaaacattcaaaattggcagaacagaacaagtccaaaatctaactgaaatattctaatcaagtctcatagtctctgtattaactcaaataaaaataaatgggaataggaatatggaaataataacatgaacaatcatgctaaaaaaggagacaggcagaaactacctcattcaacattcggtgcaactcatctcttgcctcaacaactcgatccctatcattgctatcaacaacaaaaataagaccttgagtattctggaaatagtgcctccacagtgggcggatctgtataagaaaaaaagggcattaattttcaagttcctgggttaattttatttcttccaacatgcatgatacaacaacaaaaattaagcttcaattctgattaattcttcaaggaacatcaagataaatttgaaagaatacaacataaatggaagctcaacaattataaatggttagcaccagcaaaagcacagatctactatacaatcatagatacctgatagaaacacaagttgtgcctccaaaacacacatgacataccacaacacagacactcgacaacagatcaaccagtaacaagttgcgaaatgagtaacatttcacatccaagttctacacaaacatgattaaagattacaagagatagcatgtaacatataccttgtcctgacccccaacatcccaaactgtgaagctaatgttcttgtactctactgtctctacattaaatcctgcaagaacaaccccggcatcaataacaagacaaaattgtatttgctcttaagacaattaagagctcaaaacagttgcttcaaagtcgtaataagaactgagtatctcaccaatagtggggatggtggtaacgatttctccaagcttgagcttgtacaagatggtggtcttaccagcggcatcaagacccaccatcagaattcgcatctctttcttggcaaagagcctgctgaagagcttcgtgaatgtcagccccatttctgaatgtgtatgctcacccttttcttagctctaaattctgaaaagcaacatcccataaacaaaaagttaaaaacgttttcaagatcatcaattaattaactatgaaaaaaggcaaaatatctaaatagaactagcttaaattttcagaatctattaaaacaaatgagcaaattaaaattaaacgcgaaaccctaatcccgtctaacgatcaagcaaacagacaaagcaatcaaaattagcaaaaataaatactagaaaacgagtaacgaaaacctcaatcagatccacgttttctaaaatctccaacaactgaactcaattcaaaattgaggaacgaaactttcaatatattatattaaacaattgagatagacgaaaaacccaatgaactgggtaaaggaagaaagagaccgaaatctgaatcttgaaccaattgcaaagcaaacatgaaatgaaagaagatacagacttaaaaacatatcaagaaaggtggatctagatataaatttaaaaaataataattcaaagtgataaggtgagaagttggatttgaaagcaagcaactactgaatttgaaaatattgaatcgtaaaacgaaaatgaaaattctaagaatggaaaaaagggattggggttggggttgagtaactcacctgggtggagaagaaggaacagaagaaaaagaaatgaggaacagaggccacgattttttaaagtgaactcgcccaattctttctctggcggttaaaatccgattggtgttatatgcaaacgacgtcgttttattgcacattaatggagaatgccgtttcggcccttttggatcaaccgtggatttgggaaaaggtaaaggactggaatgccatattgtcttgtttttttttttttttt

SEQ ID NO: 16198 - DNA, 21270 bp, Cannabis sativa
cctttatatatatatattgatattgatgttatgtgcataataattttaaattataagaagttttattacaaatatttcatatatttcaatccaaaaaaaattaattgctaaaaaagtttttacttaatagcaaattgcataaaattaataaatatttatttgtaatttaattttaaaaataattacttttgattgagtttttataaaaaataaaaaataataaagtaccaagttacaaattatttgttattatttttttaaattttttaaattaatcacaatcattcaatagtagcctaaagactaaaaataataattacatatttaatgtaactataaaaactttctctatatataagatgtgcttcgggagagtttttatcatatagagctatttctgctagaaaaagaaaatatttatatgcttttttggaaatatttgtaaaagacagatggaatctgaaaaatcatttgaaggtcttttaaaattgctcatctcatcaacgcttctggactagcatctccaaaaagctgttaagtagatttgtatttttgttaatactgccaagtgcctcaaaagtctgtacacagtttctatttcaagttgcctaacgcaaacttttgcaggagggctcaaatctaagttagtcaaagtttgaaaataccctcaaatgatcgtctaaaccaacaaacagctttgtattacctgcagctttttcttttcttttttgtgagggtgtggcagctgaaagttatcaagtagtcctccttcaacagctatgccagatgaacctttgtacttggtttgccacagattcatttagatcctacaggaatcatctttaatgctgctgcaactggcattccaaggaatccaaggataacgctaacgacccattgttgtaaactgagaggagatgtgctggcaaatgtacctagaaactcaacgattatgatttggaagatgatggtgcaactgagcacagacacaaacacataattttgcattatgcctttgaacacatttatcttctccatctccctagagctgatctcattgaaagcctgtatatacaaagaataaatcagcataaattgcaagttcataatcttagcaaatacagaattgaactaattgcaaagaactgatggactgagatcagagaattaaagttttaaaattcctcagcaagttcacgtagtcatgcttccagcagggattctaatccatactacaatatgaagctttttcacattgatttaaagctcaaaagaccatttgagccatggatttcttagtctcacacagctcttatatagactccctcagtttaaagagtcaacccttcagtttattgggcttttagtttagtttagggtggggacagagtagacttgtcactttaggactaatacattagcaggtagtcaaatccgatgacagaataaatagttacctgacaaaatacgaaagagttgaaaataatcgtgtttaatatcaaatcacaatctggaccattgagctgaaaagttacttttccacttgtttgcagataccatattattaagaactgatacaaagactgcccaaggatatttctccacatcacattactgatgaagtttcctttcctgccaacgggcattctcttcatcaagtcatcggtaggaggttctgtggccaatgcaagtgctccaagcgtgtccatgatcatattgacccagagaagttggacagcagtaaggggagcacttcctgagtataagtgtcaaagtaaatgcataagcgaaccataggtggttcggttacagttacataataaaaggtcagaaagcaaagagaatggaatctcacctgtcaaacaggctgaagaaaagttaacaataagggcaaccacgtttactgttagttggaactgaacaaacttttgaatgtttatgtaaactgaacggccccacttccccacagtcactattgtggagaagttatcgtccagaattattacatctgcactttctttggccacctgaaaagtgaacgtgctttatcaaattatagagtcatgaattgagacctgacttctagagagagaagaaaatacgaggacacgattaatttgagtataagctgacaatagtaacgggataaaattatttcaaagtggaatttctgtagtgtaagctctagaaaagttttccttggaaagcccaaagacgtttaaattttaaaataaaataaggatcacaacacaagtgctcacctcagttccagcaattcccattgcaagtccaatgtcagcttcatgtagtgctggagcatcatttgtaccatcgccagttacagcaacaacttcttgaaaagtagtccgcaggtgtttcaccagagtatgtttatctaatggtgaagaacgggccataacctgcatataaaataatctctcatattgttgtattcaaaatactcatatctatcccaattgaccataaacctccatttttgtatcttatccataaatcatacctgaatttttggaattatttcaaataatttctcttcactaagctcacgaaattctggcccttcgatagcgaaaccattctcagtcaaaatcccacattctcttgctattgcttttgcagtgtttatattatctccggtaaccattctaacagttataccagctgccctacagatagcaacggattccttgaccccaggacggaccggatctttgatacctacaattcctatgcatgtgtatccactggagggtataggagtatcagcagagaattcacttccaacttccatgtaacaaagacataaagttcgaagagcttcattagcaaattgttcaattgtgttggtcagaatattttggtatgcttcgtcaaggggaacaacgtcgccttttaaatctacaactttgtcacatgcagctaaaactatctcagaagcacctttacagtgagctcggaaaccaccatcaggaagttctagcactacccccattctcttctttgtagaattaaacggctcaactttcacgatagttgaagcttgcctttctgcttggaaatcaccacccagcgtcaaaccaaattccaaaagggcagtctcagtgggtgatcccagaagttcagtcttaccatctttgtttgttaccacttctcctccagtgttgttaaatattgattgtataaagattttcaaagcagaatctggaatttcagagcccaaatcagaagcttctttagagctaccaacatccctgatccttccacaaatgcaagctttaacaacggtcatgtggttagtagttagtgtaccggtcttgtcactacagatagtagtggcggatcccatagtctcacaagctgccaaatgtcgcacaagtgccttatcattcatcatctttttcatggcaaaagcaagactcaatgtcacagccaaaggaagcccttcagggacagcaaccacaacaattgtgacagcgatagcaaagaattccaaaatctccatagcatcatctccagaccagctccagtgggacccttcttgcagcttccgactaaacagtccttgcaccaaaacagcaaaagttacaagagcaaaaaatagacctattttcccaataatggttgccacaccattaagtttcacctgcagcggtgtttcatcatctcctccttcactgagagtggccattaattttccccactgggttctcatcccaacagtagtcacaagcattttgcatgacccatcctgtactttagttccagacagaagaaaaggattttgagaattagcattaactggctcactctcacctgttaaactagattcattgataaccacagaaaaccctgataaaaatagcccatcagctgggacttgatctccaatacttagatgaacgatatcaccaggaagtagatcataaattgatattttctgcctacacccatctctagtaacctgaaccacaatttttttcttctctctgtccaaatccttgaactgcaaagattgtctataatcacttgtagctgtaacaaacacaacaagcaaaatactggcaacaattccaagtccatcatgggcaccctttggccatccttccattactatgcccacaattagagagacaaaggcacatacaccaagtatcatgagggtcatatcttgtaatgcttcccacacgaaagtcaaaaaacccttgacagggctttctgtgaatttattaataccataaatctctttccttttacacagcagttgttcagaagtagggatcccactacttggtgatgttgaaagcttgcctgcaattccttcaactccaccatgaattgtcagctttttcacgtcacggccttcaactattgttcctaactcatcagcacagatttcaaaacctgcatctttgacttcctcaggtacagagtattcactaatcaaattcagacctgtaaacattgaagatggaacgaaattaaatggaggttttttttctttatcctatttgcatttctttcttagcagagtctgagtgcgttatatcaatatgttcttaccatggataaattgtagtgctgcttgtgaaaccaaaaccgcaactctaaacttctcctatattttcaagacaggaacaaagaagaaataagtcacaaccaacaccaaatgtacattgttgttagcttcttcagataattaacatacaaacgccgcattgggtccagcaaggaatagcatttttcatcgtttgagtagtcctcgtaccaaatcaaatacgaaaagccacttaagttctattctacaaaatgaccaaaacaacatcttacaaattctacttgaagggaaagttttactggttcactatggatccaacaaagggtttggatcagaaccttgatgagtttaattcttgatctagttaacgtaggtggaaaaagtaaaggaagaggaccaagttatcatacttcttcatggcttaatagaattgtgtctaaaaaaccttaaggggtggttctgatccaaaacaacatcttacaaaatctacttgaagggaatgttttactggttcactatggatccaacaaagggtttggatcagaaccttgatgggaaccaagttaacgtaggtggaaaaagtaaaggtctagtggtaaaaggaggtgttgaaagtgttggtaggcatatgttccaaggttcatatcccccagagactcaaaaaccttggcgccactggcaggtctgccagtcgaactgccagggctaaaaattaaaagaaaaaaaaaaccaattgtgtctaaaacatgttctttccatcttgaagactaaagagtgaactatatgttgaggaaaccaagacaaacgaatcttttctaacgagagaaagaccaataagaagattcagtaaggggagagaatactgaaattgaaagtcacctacttgaccaaattgtgaggtaaagagactagaaaatgccctaataaaggatgctatggtatgacagtcttttgtggcattttttttcattccaatggtaagcatcaattaaaaaatggtaaaaatatatccatgtcatcaagcatccttcataaaatcttcattttttgttgggatctgaagaagaaaatgaaacaagaagatcaaactagtgaccataaaggacggtagaactgtagagtatccattggaagtggtagatgattataaatcgagttgttttgttgaatatgttacactcggattcatggaccaaatagtgttgctactccaagtggaaatgaggacttcctatctgcccatacatgattaagtatggatctatctccttaacataaaagtgactgctttgaaaattttaaagaatggaaaaatatgataagaaaaagtagtcaataagagtccaaaccatgttcttggactcaagactcctgaagaaagatggtttgatcacccatacatgtgtgtattttatgcactcattcttgacccttatactttgattgggtgtgtttttatctcaagttttgaactggactcaatgtgtttatcttttttctttctttctttctttctttttttctttctgttttttcatctcaagttttgaactggattcaatgtgtttatcttttttctttctttctctgtttcttttattggagagttactgaaaaaggttaagacataggtgtgcaagaatgagcttaattgttgattttgtgatgaatttggagaattaaagataaaagagaagcgatatgtcgcaattatgtaggcaacatgtcaaaaaatttgttaaaattgtgaaaatgatatcaggtgacatatcacttgttaagtggcaacatgtcacagttcgtagcttcatatgacatattgaagcatgtcaacgacatgacgtctgttgcagcgttattgtgcgacatgtctaacttgcaacatgttgtcataagcgatatgttgcaattatgtaggcaacatgtcaaaaatttattaaaattgtgaaaatgatataggtgacatatcacttgttaagtggcaacatgtcacaattcgtagctccaagtgacatattgaagcatgttcaacgacatgaagtctgttgcagcgttattgtgcgacatgtctaacttgcaacatgtcgtcgtaagcctttttgatgcaatataaacacgattaggagaaagaatttttattaattttgtttgtctatttacagcctagaattgatattaaaatcaggaaactaaattaatataatctgatttcctctctatcaacactccccctcaagctaaactatagatattgatgagtccaaacttatttataaaaagtcaaatactcgtttggataatctctttgtgagaatatcagctagttgttgatctgtatgtacatatcaatcttttcttatctacttctacatgcttagttcgatcatgatgtataacattatgtacaatattgatggtagactagatatcacagtaaagctaaataggggccacatagttaatcttcaactctttaagtaggcgtttgatccatatttcttaacacacttcatgggtcatggctctatatcctgcttgtttgcttttttatttctccatgttactacattaccccatacaagagtacaatacccagacatacgctttctatcatcaacagacccaactcaatctgcatctatgaatacttcaacctacctctcggttgtctttttgaagaaaaaacattttcttggtatttgcttgagataccttggaattttatatacaacattaagatgtccttaacatggatcatgcatatatattgacttactagacttaccgcaaaggcaatatcgggttttgtatgtgagaggtagataagcttccttactagatggtggtacctctttttgtcaactgaattccccaaaacatttttctcttgtctccgagcttaattggagtcttgttgggtttgctaccgaacactcttgtctcatttaagaggtcaagagtgtattttctctgggacacatccccttttttcttctagcaaattccattcccaaaaaatacatgagtgcaccaagacccttgatttaaactctttagccaaacattctttgatcaaactaatctcttcagcatggtttccactaacaattatgtcattgacatacacgattagtactgacatttttcctttcttgagtgtaacataaagagagtatggttcgtttgaccttgcatgcatccaagccccttgactacttttagaaaatgattgaaccatgcctgaggagattgttttagaccgtagagatatttgtttaccttgcagactttacttgtattaggagattcttcaaaacccagaggttggctcatgtacacttcttctagctcaccattcaagaatatattttttacatcaagttgatacagctcccaatcctagttgactgctaacgagagcaatactccgatagtattgagtttgtcaatcaaagaaaatatttcagtgtagtcaattccataagtttgagtaaaacccttggcaactaaccgagctttgtacctctcaatagatacatttgtattatatttgaatgtaaacacccatttgcaccctattaccatcttgtctgatggtaattccactaatctccaagttccatttgttctagtgcttttatatctttgagaacatctgtcttcccatgagaaataccaagtgctttgttaatgctcttgggtatcacaacacctgataaactaaaggtaaaagctttaaatggaggtgataattttgaataagaaattaattttgaaatagggtgttgaatacaagatctaattccctttcttaatgcaacaggaatgtctagatctgactgactgtttgagggaacaacacctagattaggttcttgactgtgtcttgagaacctagaatcaatatcatatagggtatatacaaaatcacaccccttaattacaaaataaagaaaagccctataggaaactaaattaatagaatctgatttcctctctgtcaacacgcaatttgatattttgaacatgttttcaagtcaaatttgaaaaggaagtcatattgtccaaaactagagcaacgaatagaaaaaagaaactacaatatggagaagaacatattggaggcaactaacgatagaagattcaagagtttgttaggaacccatattgagtaggcgttggattggctggtagtttataactacttccgcaacctcctctcttaggctagtcttttagaagtgaaatccacttaaggggttataacaaatggcatcaaagccatgcaacctcaagtaggactagcattgcagaagggacgacagatacaagaggcgacttgtggaaaagcccaaagtgggccacagtagagtagatcatcgtggacatcgtctaaggggagggggtattgttaggatcccatcgactaagtatgggattagttggtgatttacatcttttggaagtgagttctacctaagtggttataggagtaaatggatctatatttatgatacttaattttaggattaaatgggaagtttattttgattaatattgctcttgtgttctactttggtttaatgttgctaattgtgatttatatttgtgatgtattatattattataccgagggctttatttagattgtgagaattattactcaaagggaaagattaaataatccgacaccaagtaaaacaatgtgaggtcttttggtcaagagataagcatttatctaggtagtgaaatggtcctagattgtgaaatcaagaggtggaatataaaatttaacttaatgaaggtatgaaaaaaaaacctaatgaaggtaaggtttaatagtcacatagaaatataggagtgtgatcatttacacgttcgctatgcaacacaagatagaaggtataccaataaaatattgtttatgattcttaagaatattggatttacttagtcacataaacggatgagactagaattatttaagagtgaagttgaaaccttaacgattgtcaatatcttgagtttttctatttaattcgtatattgttttgcaattaatattttgtcgttaatcattcgaaaccagctgcttatttaaaattaagattgattattcaccctacttaattatttatttattcttaatctatgtgggtcgatattggttttctgagcactttatgacttgtttaacttgtacacttgcatgcatacctataattttttacaacatttagcatctttgagccatttgaaaatattaggttgtacgcacacaccatgttaatgataaacttggttcaaaatctgtcaaatgcataaacttggtgcaaaaagatatagactttgttcagtagagaaacctggttataacattatcaatacaatttaatgagaaagaatttcctcacttgatcgagacggtagtgtttcttgtgatataagtaaaacaggtgaaagttcatcaacagtagagcttgaaattgagccagttttacaacatcaaggagaaaggatagtagatgaaacatagcaaaaattgaacaccagtcagtaatggaataaccatcattgtcaacatatcagctagatctagatcgaactacaatggctattcaacctcctaggagaagcagatgtgatttcctatgccttgacagtagcaaaccagcttgaaaaaatgagccactcaatcacaaagaggcaattcaaagcaagaagttgatttgttgataaaagataaggatgaataaattgactacttgaagaaaaacagtacctaaaagttagtcccaagaggaaggatcactctcagggaaaccaaagaggcagaaggctagatcagtaacaaagggattcacacaaggggtcgaatacgctgaaattttcttatttgtggtcaagtttaaaactgtggggatcacttttgtattggctgttcagctggtgtttgaaatagaacaaacggatgttaagaaaaattgttctgttactatatgtatacgttatgctacttatggggaaagaaaaattgaagaatgatcggctcaagaagcaacttagccaagagtttgaaatgaaggatcttgggcagagcaaagaagattcttgtaatggatatttcaagagatgagaaatgtggagcatcggtcatttctcaaaccaagtaatccattgaaatgttggatagatttaacatggttgtatcagaagttgcaagtgttctcttagctgctcgcttcattttccctgcagagcagtgccctaaaactgaagatgaaaaactaatggaaaaggttccatactcaactaccgttggttgcttaatgtcctcaatggtgagtacaagacttaacacacttctaagtaggtatatggccaatccaggaagtcaacaatgagaaggtaaaattggtttaaggtaaatcaaaggttcacttttaatatggcttgcatttgaagaataataaaggagggccaacgatattggaagttatgtggatgcaaaatatgcatcctacaaggataatcataagtctctaacctcacttgtgttttactaaatgactgttgcatctaccggaaaactcagttgcaacctatactagctttgtctaccaccgccgacgcagagtttatggttgttactgaagcaatattggtacaagggttgctgaaggaaattgagatgttggaaaagaaagttactgtctattaagacagtcaatcgtcatacacctcaataagaatcactatatatcacgaaagatccaaacatactgatataagaatgttttggataggggaaagatatgagaaagatcttgataaggtgcctactgaagagaatgctgctgatcttggcagcaaagttctacctttaagcttaagctttaattgatctggttgacaagtaaagaccaaaattcgagttatattttctctttgagttccttggttttctataaggattaaaaggtggacattgttgaggtaatcctcaaaccggaccacatatgacaaatcacttaagttctactctagaaaacgacattagctacacttattccttaaaagacatgtgcatgcctctctaaacagttttaactgtatttttaaaatacattggcgccaagacatctctacacacgcatatataaataactggaagagttgtcatttgggtatcacaaatcaataaagaagtttttaaagcaagattcagagagatatttgaagagcgttgtaatctggaatttgtcgttcctacagtagagatggccaggactagatgtaggctcacattgagctgaaccagtgtaaaatctctggtccattcttgactttatttttatctgttttcagatctgtttgaagatgtgcaaagattgagtgcttgctcttgtgtgtattccgtatttcaggactgtgatcaagccttggtgttttgacgacaacatgcataaatcgaaagacattcatcatagacttaatgcaatttggacgacaactgtcagcactgtacgtttttttctaaaaagaaaatatatctcaatcaagaagggagcaaaaagagtaggtgggtctaattttaagtctttttctctcaggtgaatcaggttttgatacgttgacttaaattagaaacagtcgacaaaaaaaaaatctccttttttacaaatcatcatgcatcttaattcttacaaaattgtaaatgacttcgaattttctaaatcttttgacaacataaatagtttgtcttggccaaaaataaaaaatacttcaagctgtattggttttatgtttctaactaactgcaattaacatatttttaacatttatctgctaaacaataatctcctacacaagtgagtccaccttccctcaaataaaaatggactagccaacaatcaaggattcactccaaaatacacatttttacttcaccagaataaccagagtgttatcaatcatcggatcacccaaatttagattcggctaatacaaaatagacaaaaaatgaaaaaggtttcttttaggacaattacaaatttaatcagatctgccaaaatcttaattctagattgcgttatttaattatgtacatccgcaatatttttacaagcaccaattgaatttggaaaggatgaaccaaataattatacgttttaattcaaacagagcaagttttaaagatcagtctcagtttgtcaatggggcatatatgatttatttattttaaattaataccattatttattgcatcggatattagaaagaagaaaaaaaaaacaattagaaattatcttcttcaccaaggtccacgccaactaacagctatcgtttataataatatagaagaagaagaaatgaaaacctgattagatcttcgaatagcgtcagcttcattccgcttggagagattcgcagtaaatcggaatctccttttgggattcttaacaacccaacaaagcttcctccatcgctgaagtgcttcctccgatgagttcttgggctttacatccccaaaatcctcaaggaaataactctccatcttcaccaaagccaagctactctgatactaataccaaaaacctcgattcaggtctggaattcaaaagataagagttcaggtgaattaaattccactgatctgattgatttcaattagaaatgaagaaaaaacacacacttaaatctttacaccgtggtactatcaacttaaaacttaaaaatttgggttcactgttctctgtattcaaacactactagttgggtgttgaaagagagagagaaagagttgactaataagttcataaatctgacctatgagtttttttggtggtagagattaattaattaaacatataataacaaaacaataataatatttaaaataaatatcttcttaggtttcaacgggattggttggaaaaacgtgctgtgcctttcttgaccatgtgactcactaatagataactgacacagtccatagttagagtcattaccattaacgtgctccattatttggttctcttctctgcttattttaaaacaatttctaacatcatttttatttattttaattcactcaaaaatatatataaatatttaatttaaaatgaatatgcttcacatacaaataaaaaataaaacactactagtgtttgtttgttagctttcctttctccgaaatgacagatttttttttttaaaaccaattaattttagaaggaaaagtcatagagcatccttaatagtaattatattttaaagatactaaaaatttacacattatttaaaaatataatattttattttatctttcttttatattatttttgtcattcttacttttgaaaatactctaatatataacactctttaaaaatgctataattatgatctcagacattattattcaatatatcttaatttttagttacaataactttttatcttcaattttttattataaaaatgaatagcatcaatgctacaacatagtatctatgcaaatttctaaaatgacatctttttctctttaatggtatagcatcttaatattttgccacataatatgtcaacttcaccaagcatcctctaaaattttaccattataaagcatctctaatggtagcatcctttaaggatgttatgctattgggcactagtggtgcctagcaccttctagacgtgtcaccttgcaattagttatcgatactctataaaaattattatattaaactatatgggacccgatacttaattgcaccaatagcgatattaaaacataggaggatttttttggctccgatatcaaatagtggggatgaggagattgaccaaagcaagaaggcgagactaatcactcaaaccatgcgttcagttgagagttcctttggctccgataatgattcggaggccttagaccgaggggtgatggaggtagaaggccatgtttctggggccgctggtggagagggtcagattgtcatgacggaatcggcacctgcacgccttgggggattggcgagagtggagtcttcggcgatgtcaaatgctagaactctgatacttttgggtaaattggaagctatcgaaaggaggcaggtgcaggatatttctatggccgtggaggcgggccgaaccatgccccccaaagccccatgaagatcctttcttggaattgtcgcggccttggcagtccgtcggcaaagaaagctcttcgagctttggtacacagagaagatccggatgttctgtatcttatggaaacaaaagttaatagttcgcgtatgaatggaatttggcgtggtttgggttttgggggagcctccgtctcggattccctaggtacgactgggggtgcgtgtctttgttggaaggttggtgtggatattcaggttatttcggttaaacctggggttactacggtcttgttttccaacgtccttcacggcccgaactggtatggcctctttgtttacggcccacctattcgttatgcgagaaatgagttttgggaagaaagaacgcttgagatccttgccctgagtcacccttagcttctggtgggggatctcaactcgattctttgtcaggaagagaagttcggaggtcgggttgtggaggaaaatgacggtcaggacctgaatgattttgttggttgttacgggtggagtggacttgggttgtgctgtgaatttcttcacttggtcaaacgggcgtcgttttaatgagctgattagagaaaggttggaccgggcattgtgtgacccacagtggctggtgagtttcccgaaggtgggggttcgttctcttgctatcaaagattctaaccatgcaccgttggttctggacttgttattggatcgggaaagatatcgtacgctgttccagtatcttgatgcgtggtctagagacaaaacatgtaaagaagtaatcaaacaagcctgggccatcgaagtctgtggatccagaagttggcaattggttgcccgcttggacaatacccgaagatgcttgtcgaagtggtataaaactcattttggcatgtgtgaagagaagttgaggattctcaataatcttctgattgagattcaaggtcgtattccgtctaaagcgaatctgaagttggaagcagatatcattcttgaaatagatgaggttaagggaaggcaagcagatatttgaaagcaaaaatctcgtgagcttgtgtaccgccatggagaccgaaactcgaagttcttccatggtaccacagtgatcaagaggaagcgcaatttcattgctgtagtgtgtgtggatggtaactcctggctcgaaggaaggcaacatattagggattattttcgttctaatttcatgtctgtgctttcttcgacatccccagctgcccctaatcttactggcctaatattttcgggtgtttcggcgaaggctaatcaggcgttgatcaggaaacctatggagaaagagatcaaggaggtggtctgggcaatgcctccccttaaagccccgggtcctgatgggatgcccggcaagttttttaaagatcactgggatatagtgggaaaaggtgttgtggccgcggtgactcttttcttcgagactggagagtttgccaaagagattaatcatacttttttcgtcttgatctcgaagaaaacaagtgccaattgttttgatgatttctgacccataagtttgtgcaattttacttataagatcatctctaagttgttggcgaatcgattgcgcaccctccttaaggatttaatctctccgttccaatccgcttttgtgccgggaagatggattgctgagaatagtattatggcgcatgaggttttggactccttcaaaaaactcaagggtcgcgaggggtatgttggatggaagttggatatttcaaaagcttatgatcatgtagaatggagttttttggagcgtactttggagacctatggcttcgatgccagattcattagaatggttatgcactgtgttagatcggtctctatctcgattttgctgaatggaggccctttgaaataatttcagccgtactgtggcctccgacaaggagaccccatctcgccttacttgttcattttatgcagcaaggtgttctctcggatgcttcttgagaaggaagtcgagggtctgattactggctttaaggtgagccattggagcccttcaatcactcatcttatgtatgctgacgatacttttattttttgcaaggctaatattaaggaagtggaagccgttctcgagtgtatcaatgagtatgggtcgtggtcggggcaacagttgaatgtgtagaaattagcctatactttctttggaaacactgcccgtgacactcaattggagattgtggatcgacttgaatttcacaagttggggattgaggataaatttttgggtaacccgattatttggtcaaagagtacggtgaaggattttaagtttttaaaggcgaagatcttatctaagattgaagggtggcgatgcaaacttttgtctcaagcggggagagccacccttattagaactgtggcccagagcgttcctatttactcgatgtcttcttttcttctccctaaggttctttgtagagaacttgatcaagtgattcgtaaattctggtggataggaggaggagataaagatcgttatctggcccttgtggagtgggatgcattgtgtcttccggtggaccgagggggtcttaatttcaagaaatttgaagacatcaatttggctctcctgacgaaactcgggtggaaactcgcgtcgggtgagtcctctctttggtgtacggctttcaaggagaaatattggggcatgagtttccattctttttggtcctttatgctgcctagaaacgcctctttcggagctcggggtatcttggcaacaagagatctgatcaggaaggagacttgtttcattattgctgatggaaattcggtggatttgtggaattccccatggattccttagttagattggaactctttcagaactgcctttaatccaatgatagggccaacctcattgaaagtgtcttctctgttgaatgcggagggggaatgggattctcagggcccctataggtggttggttcctagtgtggcaagctctttacatttagttaagaggctcccaagttcacagcaagatcttcttgtgtggaaggatgcgactgatggggttttttctcctaaggtgccataccagtccattattaaacttcggggtaataactctgatgagatttgaaatcgcatttggaagattaaaattactgagcggctgaagttgtttttatggaaattgggcagggatgttcttccatttggtaatctgcttcaaaggatcttgggtaatcctgtaaactgtgtgttgtatggtgacaatgtggattattggctgcatttgttctgtcattgcccgttggccaaggccacctggtttggtagtcaatgggcgattcgtggtgagaatttgaacttttcctgtcttagagattttgttttgtggctgcttgatccaggtttcttaaggggagcaagcaaggaggatagagaggcattttccaggtttggtatctgcttgtgtgatgaactttggaatgctaggaaccgtgccttccatgatcaggtgttttcgacgtgtatgggagttatagcaagggtaaattctgcttgttcgacaatggtgggggcctgggaagctccggctctgccccattctcagttctgttgggagaatggtatggatcggatcaatggtagaagggctgtgtttgtggatgctgcttgtaaggatttgtgttccacagcgggtattgtggttacggaggcagatgggagtattactagggctctctctgtttagatggcaacgtcttttccgctagaggtggaaactttagccttatatcatgttgtgttgtggtgtctctcgaagggttggagccaggttgtttttgcaacgaattgttaatcgctggagaaaggaattcatggcctttctgctccaaattggcgattggcgaagtcgttttggcacctgctagaggtcgtggatcaggtctcagaggctgagtttgtttggctcccacattagaaccaggtggctcacaacttgtctcagtgggcttttaatttctcttttcctagtgtgtttactatagaggacttggcccctcttgtggccatgtagactgtttgtttggctctgttttagagctttcttcttaatatatgatgtttaaaaaaaataaaaaataaaagtatgttctattactatttttattttttaattttaaaaacaaaaaaacataaattttgattttttttttttttatttttttaatataaaaaattatgaatatcatttatttatttttaaataaatatataaaattataatgaaaaatcaaataaaaaatactccaaagtaagactaatgagagagaagcaaaagtgaaaaaaaagtgtttttaagatttatttttaaaatttattctcttttgttttttaattttaaaaacaaaaaataaaatcagtcaccaaacacaatttctatttatattttcaatttttttttttttttttttttgaaaattactctttgctttggcttactcggagattaaaaaacacatattataattattaattcaatgcacatgactgtatctgttatttatttattttgtagggaacatgcatatagccgttaatcttggtatgattatcaatagtggcctacctccattgcattgcatggttagtgttcttattatttaatataataaaagtaaaattaatttatgaagagctaaagtctatctgttatttttttttcctgcacattgaaatgcttcaccaaataaagctaaagtaataatgacaaatgacccatacccatactttatattattcgatttcattgaatgactaaaactactttatattgcataaaattaaactattaaacaagtaaccttttccgcataatttttcataaaaattttaaattatataaatatatagaatgagagcactatttttgctcttacccataaaagcattttatttcagttttaattaatttaaaataaaggtgtatagaattaaaatgaaatgtaaacatgtaattaattattttattattaatttatttttatttttaattagcttttaaaactgttattgttttttataaattaaaacaattattcacaaatgaaaataggatcattttgccaaagtaattattattattttcctcctcttcttccttcattttatcatttctttaaatttagatattgtgtatgtataaaatagttttttagattatctttagagcatgttggcatgactcaaaaaactaaccaaatcaaaggatatatatactaatcatctaataatttttttcatattcatttctattttttttaataaaaataaagaatttgattaaaaaaaaataaagaacaaacaaacaacaaagtaagaagtaaacagttacagagtgttcttttcttattatttttttttttgaaaacttaatttattattattgtaacataatatatgccaattgaaaaaaaaaaaaaactctttgtacatgggaaggttggttatatttttcatatatatttttataaataaaataaataaaaattattaatcctatatgagataccctattataactaaatcaattactaccatcagattataaatcaaaggctataaaaatattctcacaaatgagagcaaaagtgatgctctgacctaaggagttccctaaatatatatatatatatatatatatataacaagactgctactactcgtaaacggtagaatcaaatcgacaggttgagaaatagccaagggagttgggttgattgggacaatagcttgctgtcactgagtattttaactctttgtttcagtcatctggagttaattgtcaagtagtcatagactgtgttgataattcaatccttgacattgcccccatgtcgagttccgccagttggttataggagaagaaaaaagaaagacaatcttctaaatgcaccctgataaaagttcggggctagacgacatgatatcggtattttatcgaaatattgatcaattatggacagtgatgttgtgaatgtagttcaaaagttcttctccataggggattttgaagcatgttgtggtgatgctaatattgttttaatcccaaagaataaaaacccagaggacatgactcagcttcgaccgattgctttatgcaatgtcgtgtacaaaataattatgaaagtctcggtgaatcgtatgaagtcttttatggattgcattgttgctgacacccaaagtgcttctattccaggacatctcatctccgataatgttcttatttcttttgaagtgcttcattatttgaagatgaagaggaaaggaaaagagggttttatggcattaaagttggacatgagtaaagcatacgacaaaatagagtgtaatttcttagaggctatgctctgtaagttgggatttgagcctggtggatccatttactgttgaagtgtgtgtcttctgcccattataaggtggttcggggacgaaatccttttaagggggggatagttgtaaagcccg

SEQ ID NO: 16199 - DNA, 6270 bp, Cannabis sativa
tagtcttggtcagaagatcgaactgggctcttttcggttaaaactgcatgtactcttcttcagaaagaaaaactccagccattcggttccaataattttggtttttggtgtagactgcagcaattgaagatcccacccaaggtcaagaacctactttggcgtgctatttccaattgtcttccgacttgtcttcaactggtgactaaacacgtgagaatctatgcaatatgtccagtttgtaaagcccaagccgagtcctattgtccatgctctcctcaactatccttttgctatgtcatgttggcgtatgctaggtatcacctatgacccgaaccaacaactatcttttggtagttggtttgagaaaatacttagaaatcttgatgaggagatcgcttcacagttagctatgctatgttgggcaatatggaaggcccaaaaccaagtagtatggaagaaaaagatatcctcaagaaatgaagtcattgcatcagcacaaataactcttgatcattggcgtaaggctcaagataacatttccttatcttctttattctttaaatttgaaggagatggggctgagtgttggactaaacttgacatgaataacatcatgataaatgttgatgctgcactctttaatatatactttccacatattgaaataattatattaaaatataggttgagatagtactttttttaaatccaaacaattaatgatgtagctataattctttttcaaaaacatgataaaaatggactttagaaaaaaaaaatttaagtttttgatgattaaaacaaaaagaaaaaagaatgtactcaaaaaaaaaaaaaaaaagtgtcactgaaaaaaaaaatgactaagaatgtgggtgaagcttaagaatagtaaatctctatctattattttggaagcttcttatataattcacgtcatttcataattataatttcctttgttatttctataattatttttcaaattaggtatataattaaaagaaccctattagaaaaactaaaaaaaaacattaaataaaaattggaccctttccttgggctctgtgcaatagatctgcctgcacactaataggatcgggcctgcatagcaatatctcaaagtaataaaacttgtttagaagagatcatctatatcccaatttatgcccattattatcatatttatcgtagggaattttagtcctacaaactaaaaggtaactttgtagatcaaaacttaaatacgatcatattttcaactaacaagacccttgaagtcaaacaaacacaacacaaatttatcaacattaattagtcacatagctagctagttactaagtttttgctgttgtacaacaagaacagaagcattactcatgaaatctgtagacgaaagcaaatcccccacaacaccaagttcaggaaactcactccattcctcaagacctgaagttaagatagagtgtagattgaatcttcttccaacaataaaaagttcgaaatcatcagccatggatctcaacttagtagccgtttcagtcccatctttaaccatttcctttatataaccaacatttccatgaccaacatcactattttgattataattcagaattatctccttaagcacttcattatcaagaaccgtctcccactgctcaagttctcgatcctcattcacactcacaaaatgtatgattgttaaggttatgcacgagtccatgaccatgcgcttggcgaacgtgacagcctccctatcgtcgctcccgcccaagaataccatggcaacgcgatagggagcttgtctcgacaccataaactcaacagtctcagagtgtcctcgatcaacaaggacagctacagagcaaggagctctctccatcacactacaattaatagcacgaacagtgaggttttctgactcaatagttgtcccatccagagaccattttctatgaaatgggatgactatcaatgaggctagcttgtccaaagcaagagtacaaatatcttcatgcatgtattcggtgggggaaatcgcggtgaagacgttgacattggccgcgccgtggttctccctttggaaatgtgtgaaggagaggattatgttttcagagtaggagtagttggagagtgttttcttttggagttggtgagagataaagacgggcgtggctcggcccacgagctcgatgagatggagaatgtagaccgaaattgggttgtctttggtggggcaagagacatcgaggaggttcatgagggctggggtgttgtcttgtctgttgatgcatgcaacaatgcgaagctcggtgtcattggtggcagattgcattatgtttcgcttttgatagcctgcgtattttctcatggggttgtataagtaacgaacggaaattggaaccactattgcggtcaccaaaactgttgccatcacaaaacaatacacctctaattctataacctgcattgaaattgcaataagttcaagaaaacaaaacaaaaataatagttaattatgtattagtatattgtaattttaaaatttaaaattaaattttggttgatatcatcttttattttaagggtattgttatttgactttaaggtactcaacaccatatgtatcattcaattattagttagtagtttctcatattattattaaattaaaatttataggacacgatattgaaatatacatatcagctgttatggtgcttggttagtgttttccttatttttagtgtacgtttcacaaaaaattaaatttagtgaaactacacattatttatcatcatcttttagtcgcacaaaaccaaacttatattttcatttttaatgagcaagaaattattgtgatataatgaccatatgttatagtggtgttgctttcaaattatgttgtgattaaataatctaaatgttgaatttttctccttccaatatattccaactattagttatactccagttaaaaaataattggtacagatatacataccttactatctctagcaataccataggaggccatttccacaacccctttataggacataataaaggcaagagctaatccatcatttaaaggcatcctactaagcagaggaggtatcaaagagaaaagaaactttgacacaataatcacaagcacaagaagagcattggctttagccactttggtgttgagattgaggtcatgtgggtcagctttgatcatggccacagtcacaaagataggcatgaaaaccccagaaactaaaggatcaaaagtcttcaccaaggcagaccctaatggaggcccatcagggacagcaaggcccaatatcataggcccaaaaataagtgtcatatgataccaatttgataacatggcagagaacaaaagtcccaaaataatgatggaaaggtaaactttttttaccggtctaccctctggggtttggctaaccatccatatcatggctggtctggccacgtagataacaaaaacaataaataaagataccaaaacaaagtccaaaatggctaaccctatagacttgtcccacaccttggctagagtagccaaagctgtgagaatcacaccaagtatgtcacttatgatagaggaagacaacccaagacgaccaagctcagaattgaatattttaaggtcttcaaggagacatgctatgacaggaaaagatgtcaaggaatgtgttgttaggacaaacataagttggagattctcttgtttgtccagatcaaaatggcgactgagcaagtattgtgcgcccgctcctagaaggagcggggcgatcatggcgagagaacctgtgtggaaggccttagagccagtacggaagactatgcttaagtccatcttgactccacttaagaaaatgaacattgtgtatgcaaagagtgagattgtgcccaatatgtcttggttgttgagtcgaaatatcgagttgtaatacttttctatgaattgtgctgcgacaccttggcctaggacaattccagcctagttatatgtaccaaaaagaaaatttcttagttgttatgtatacaataaattacaatagaaagtagttaactttaactatattgtttttttagtttgttaaattttgaggccctttttcctttatattgattgtatttgttttgctccataggacaatagggtgataatttatactttttctcctattatttattaaattaaaatgagtcaaacttaatggtaataataatttaccatttttgttgcattttttcattctaaataggttttttttttttgttaaatttagagaatttatttataatcaatacaaaattatattttattggttaatttgtccatccaaaagcaattgaacctagctagactattttgtaaaagaattacaattatctaattaaataaaaagtagatttagctagaaacttttcctcctttatcaatactttaaattctattattaccttcactctccataaatatatttcaatgaaaagaaaagaaaatccaaaattatattcataagtcaaacaaattaacttaccagaagttcagcaacaaacattggcaagccaatcatcttgagaaaaaaatgagaaatttgagtaatacaaaagatagaaatcatctcaatctctaaaactggcattgtatagttttgtacaggcaatgtcacattgccaaaaggagtcgatacattaagttgccatgcatcacttttattccatagcccaacagagtgagtatttgctgggaaagctgtgcatcgttttataggtactatattcctagcacttgtattaaacaattccatttttctttttctttttttgtgtttggcttgagagaaaattatgagctatataggtatgaaaaaaaaacttatgatgagaactcagaattggaataatataaaccaactcatattgcttggggtatgatggttaatgttgtttttttgtgagtaattattattagaattattactatttttagtgtaaccccatactctaattttgagagtaagtagttgtttagctaggtatatgtgtgtggccagctttaagttttttgctattactaattaaatttatacttctctctaactgtttgtttttattccaacaattaaaacaaattgaatattattaattattattttatagaacaaaataatgtgtattatacctatactgttattatttatttgttttgaaaagatacatactgttgttatttactaaatattttattcttcactttaacttaatgaatatatacaaaataagatagattcaaattctaaaatttttcaatcaaaagattaacggattatttgataagaaattcaaatatatctacatatataagaaacaaattattattgagttttattgtgaaatattgcgagacaaataatatgatgtgggatccacaatacaacaaatataatatttaagagcgatcaattttgagacaacatcaaatcgcttctaataataagaatatgaaggacggcaaatgaatgtcgcctctaaaaaaatttgatttttttaatctgtccaacatgtcgcccctaaaactattagaagcgataaaagtcgctcctaaaaagttaaaaactaataattgcaaatagacaggaattttcccgttcatactactaggggcgacaatgccttgccactaacacggtcaagacattaggggtgactttgtcaccctaatagtgtgcctattaaaatcccaaatctccttctttctggagccattttacattttccttttagatttctctcttcttctacaaaaaaaatcccttcttcaacccaaaaaaaaactctattaacaatttcaatccaaaaaattgagcaagaagaaaaagaaaaaggaggtgcaatcataagcgcaattaactccatacaagtttgtttttatttttagaatttttttttaatttattagttttaatttagggtaatctacagctttggtatactttaaataaatctaaaatagagttgttttagactttatttgcaagtatataaagctatgaatttgttaataattgtattaaaatttagatttttaatgtttgtgtatgtgtgagattatatatttatacaaatatatgcgtatatatatatttaatagttgtatatatgtatatgtttgtgtgtttatgcatgtataattatatatatacactaagcttttcatgtacttgtaattcactttcaatttcaagt

SEQ ID NO: 16200 - DNA, 11183 bp, Cannabis sativa
aagttctattatttgtgatctcatgttatgaacataatcatttccaaaaaataaaaataaaaaaggattatgaaaataccatgaaatatgataactttaatgtgttttattcctccactcctcaatagtaagatgacaaaaccaaccactgcaaatttgaataggtaaaaacaatccttattaaacaatgaaaagtaagaagctaactagtaataaagattaaaatatgcactaaaatatcacatccaaagacttacactaaaaaaaaaatattgatatttttgttacatatatcattataatagattgaaaacatacacaccaatctaaaattgttgtttttgatcaaaatggttccaaataaaattgtaattatgtggatattaaaatatacactaaatattacatccaaagacttacactatatatatatacattatacatatatatataatattgttatttttagtacatattttgttacatgtataatataaattgttgtttatgatcaaaatggttccaaataaaattgtaaaaaggtgatgttaaaattaaaaattgtatctttatcactaagaatcactatacaaaaagattacatctttaaataatcccatgatcccataattattaatgataatatcatattgatataaacatataaaatagcaaaaaaagaaagtatttttcttttgattttcatattttcccatttctttttctcctttacgtgccgccccattctctagaaaaaaaattacagctacccaccatggctgttgcctgtttcatcatctctgttctaaaaatcatttctttttggcccaaaagtacatagcaaagccaaagattctctctttttccacatttgctttcattttcccttgcgattttccttttcttattcaatctctctctttctctctggtccaagctggattgatagtatcaccttaataatctctgtgcttagaaataaaaatctctttttttttttattcttcagattcttcttggatttccaattttccaacttttgaggtgagtttctttatgatcatattgattttttgagttgggttttgtgttttctttagtgagtaattatttgttttgtggatctatagtgttgattgattatcataatttgaactatgtaggaattttttgacacaaaaaaatgggatctttaatggaaattggagtacggatgaggaaattggcaatagtttcgatcaaagcttgttttagatcagttaaatatcatccttttcttgtgggtatggtgttgtttttgatgtttatgtacagatcatttccatttctgttttctttgtttttgtctgcttcacctgttttggtctgtactgctattttgcttggaacccttttgagttttgggcagtctaacatacccgaaatcgaaatcgaaaaggaggagaaactaacacatgatgttggttctcttagagctgttggggtttctgggaatggtacaattgttgttgataaagatgagagctttattatagaaagatatgttgaagatgatagagaaggagttggggtaggagtgaagtcttttgatgatgaaagggttagggttgagttggagactgatgttgattcacttgatcgtgtgccactcattgatgagagttcaagagaaattcatagtgagattaagggtgagattgaggaggaagatgagagagagtttgttgattttcagtttgaaatgaaaaaggaaacttttgaggaggaattgagagttgaagggggtttgagtgatgagaaaggtgttgagaatgagtattctttggttcaagatttgggggatgagattcttttgaaggaattcgctaaatctcttgaagagtctcttagtgctcacaaggaagatcacttggagttggagtcctcttcgcctggtggtgggggtgatgatgatgataaagctggtaaaaataaggatgaggatgaagatgaggatgaggatgatgatgattcctcgtattcggactctgatagagcggagagttcatcacctgatgcttcaatggctgacataattccaatgcttgatgaattacatcctcttttagatgaggaaacgacgcaggctcctcttatatcccacgacgagtctgatggtgcttcggaggactctcatcatagtggtgatagtattgagtctgatgcagaatctgaaaaccatagagatgatgaggtagaagaggatggtgtcgacgacaatgatgaagatgatgaagaagaagaacaacatgttgggaaggaggatgaaagtaagtctgcaatcaaatggacagaagatgatgaaaagaatcttatggacttagggacttcagaactcgaaaggaaccaacggttggagaatctcattgcgaggagaagagcaagaaaaagctttagattattggctgagaagaatttaatagatttagatagtgttgatcttcctttcaatgttgcaccaatttcgacagctagacaaaacccttttgatgctccgttcgattcgtatgatcatatgggattaccgcctattcctggctcggctccttcaattttgttgccaagaagaaatccatttgatcttccttatgactctagtgaagagaaacctgatctcaagggagacaatttcgagcaggagtttttgccttttcaccaaaaagacatgtttcgtaggtatgaaagtttcagcatgggaccgtcggggttgggaaattcgagacaagagaagcaaaacatcaagtggaagcctgttttcgtgccagaacgaatggcttcagaaggaacaagctatcatccatcattccagaggcaatcaagtgaacttagtgagtcaaagttgagctcagttcctgatacagattctgtgagttcattggctgatgcagatgagaagagactcattattgaacatgatttttcgaaagaagaactactttccaccatttaccaggcttctgatcttctcgaacggggaagtcgatcgtctgaagatgttgaatcagtggatatggcacaggcttctcaaagagatattcaacatgatgatgatgaagccaaagatgatttaggggaagtggaagatcaccacgaaatggattcgaatgtgtctgaaagaggagaggcagctgctcatgtcgaaccagaacaagttggcagagaggattatagtagcgggtctagcttatcttcattatcagaagtggatgaaccaataaccgatatgaaaaatgaggacgattcaccaagtttcggggtcatttcagcagaaccttctttggaggagaatcagaataaggaccctgtttatgatataagccccccgacggctgaaaggttactctctttatcctctgtttcatcggatttgcaagtagaaatgtctgaagtaattaaccctccaacctcagtagaaaatgttgttttgtttgaatcccgagagtcacctgtttgtgaagagatggattcttattcccctaaggtagatgcaggagatgaaattccattagactcgggtgaagttctagcttcatctggagaacctgaggttataaatgaggaaagacaaattcctcacgagcatgataatgcgttcttgtcaaatcgtgatgttgaaatccccattgcagtgctccaagatgaagatgtgaagttggatacaacagtggctttaagtgatcagatatctttggaagatctagttgccactccacaactggaacatcaatcttcaaccgttgctgagcaggcgtcggtttgttccaatctgtcttctttagagtctgaatcttttgtggaacagccagtggttcaagaggaaatggttcaccttgatcaggatcaaatccagttagatttttcatctgaaagatcattggtagaagaagagacattcaaggatgaagtcattcaacatgtaatcgagcaatcttcgatgatccatccatgttcttccgagaatgaccataaattggatcatccaacacaagaagaagaaattactcaggttgaacaggaccaactccactcatcatctgcagatgcaaacaatgccggtcaagtcaaggactttgatgtgatggtggcttcttcgaaaactgattatgaagacacagcttctgtagaaaagtctccatcagaattggagacacagcaacctgtggatgaagaatgtgctggtggtgatcatggtattattgatgtaagtcatacaactgttttttttttcttgtttgacattttttcttttggagttttgtgcctgttttttctttcttatatgttaaacaaaaatggttttttattcgaaactggtaaagattgtttgttctatcaagggtctttaatgtttttcttatcaaaagcatttttgttcatagttttgctaagtacttttgatgtcatcaacggttgatcataactatttcgatatcttgtaggaaccagctgttattgtggaaaagactaacgaggaggattcaagtgtcgaggacaaagtttcaaccaacttaccttctgagacttctgattctgctgcaatcccagctgacattcttgaatataaaccattctctagcgaaattgatctgaagaatggcattctcgatggaactgataatgataacaacactcggcttttggtagaagaatatgtcaaggaagaggttgatgaaataaaggatattgatgaagagttactgtctgagttggatacagttggggatttcagtgtgaaagaatttgatgagccaccactccctaccaagctgatgctagagcaagctaatgttggaaataccagccccgagctgatagaaacaagcccggtattaccagttcttgaagcaaggtcacttgatgatattgatttggcttttaagcaacttcatgagggagcagatgttgaggaagtgattcttcctagtgtaattgaggagcaaaagattatggaagaactcaaaagttccgttgaaactacttctgaattggaagttgttgaagctcgatctttggatgatattcacacggctttgaagcaagtctctgaaagtagtcccggtgagaataaatcagaaactgcttctaatgagcaagtcattgaagctcgatctttagatgatattcaggcttctgttgagcttcccccaacacccttgaactctgagaataaatcagctgaagttggagtaaatgaagcaagttcccttgaaatcgcttctaatgtgcaagtggttgaagctcgatctttagatgatattcacatggcttctgatgagcttcccgcaacacccttgaattctgagaataaatcagctgaagttggagtaaatcaagcgacttcccttgaaacagcctctaatgtgcaagtcattgaagctcgatctttggatgatattcacatggcttctgatgagcttcctgcaacaccctcgaattctgagaataaatcagctgaagttggagtaaatgaagcgaattcccttgaaaccgcctcgaatgtgcaagtcattgaagctcgatctttggatgatattcacatggcttctgatgagcttcctgcaacaccctcgaactctgagaataaatcagctgaagttggagtaaatgaagcgagttcccttgaaaccgcctctaatgatcaagtcattgaagctcgatctttagatgatattcacatggcttctaacgagcttcctacaccaacaccctcaaactctgagaataaatcagctgaagttggagtaaatgaatcgagttcccttgaaaccgcatctaatgtgcaagtcattgaagctcgatcttcagatgatattcacatggcttctgatgagcttcccacaccaacaccttcgaactctgagaacatattagctgaagttggagtaaatgaatcgagttcccttgaaaccgcctctaatgttcaagttgttgaagctcgatctttggatgatattcatacagcgttgaagcaagtctcggaaagtagttctgatgagcttccaacacccttgcactccgagactaaatcagctgaagttggagtaaatgaagtgagttcttccaccgaaatggaaccagaaaacatagcaactggtgtcaaagaaggtagctcgaatgctgctgatgaaccgaaacatgaatcctcagtttctgctgatgaaccaccaaatgcaatgacggacgaaactaaagataagtcaattcctcgtaaagcaaaatctcgttcgagttccagctcgagctcaagctcgagctcaagtgattctgagtgagaacaaaaatggttaacacttttgcagcttgggatttttctttttattatttatctatgagtatcagtttttgatcttggtagtgtggttttctttggtatttttttgattggtttcttcaagaatgagttttggtttgatttcttgaagtttgaaaaattttcccatctcttgtttgacaatttgagagtgagttgttcagttttattgagaagaaaaaaaaacatgtttatagttgttgatattgtacttatgtacattgtaatttattttttcctttggatgtagatgttgagattctgatcctataaatatttgttttttctcttttcccttgattttatttttccttaactcacaagtaattgattcttgtattgattgcatgaccaaagttgttaatcttgagagtgaaagtttataagggcaatcataaagtggaacttattttcttttttaaatgcaatgattgactttacaataattttcttccaaagtatggtgagttgaggaagaaatagattatatacaaattgagatagaagcttcaataagactttgcttttatttatttaaagattaaattagttgaattttacaaaaatatctttgttctacaaaaataagttaaattaactcataaaaaaaatgagctctaatttttattatatgcaaatgactaaaaaaatatatttataaaaatacctatttcatttttttcccatatagtttgctaaattttataattcgaatcgagttatcgtgtatgatccaaattactacaacaacaaacatgcatatcacatgtttctgatcaaaatcaacaatccttgtaaaaaaaaagaaagaaaaacaaatgaattacaatgtaacatgttttgttaagattgttattacacataagattatatattctacaaggttagtgtctatacactaaaatctaatctgaatgagccaaacaaaatcaaagttaagctcaagtatcagactgcttttgctttttctgtatcggttcctccgaagaatttccaacctgcaactttataattaattcagaattagggtgtgtttgaaagttaccataactgcaattttagacagatgaaaagcgaaagcctacgaagttgtacatgtcaaatagtaatttcgatattcattgttatgtttagcagtacagttagtaatttacaaatgaaataaagcctatacatttttcgatatgcttgtcttagagaattaagttttttcaaattacttctaattagatagttacaatatagttttcgttccaaacaagtctaacatggtaattctcactaactcctccaactgtgttgcagatttggatggatttcgggtattcatggctaggtcgatgctggcctaaccagtatgcctctagttccttatgaggctcagctttaagttctttttttcttttcttttctcctagactgactctaccaatattgtttctttcatcaaggccaaacaatgtaaatgaaaatcgaaaacatccagcttagcttaccattccagaaagttgatcattaatgtaagtcaatgatctcaacatagcatcaagtgtatctttagtgagttgaaacttcacttccacttcacctgaagaagatttcaaatagtcttgcagctaccaaaacaaaatgagaaaatgttttcggtgtaagaaagcaaaaaaattatgcatccttatgtaaactatacaaacagataagagaatgatagacagttataaattatctgcaaacctttagagagataattgctactttctttgcttggtctgagctgcaattttccatggtccaagtcatcgacttgaggttcggaaaagatccctgcagattagttgaatagccatttattataaccaaccaaatgctcatttcagttcagctatagattgattgtatgtgcttgtccaaagaacaaaatacaataaaatcaaacctccaacaaaagaaaccgaaaccaaaaaacaaaacaagtaagagattcattcctcctaccatgttttcggggacaattggtgtggttgcagctccaataccagtctgatctaattgagcaataggatcattctggcgagccgaagtattcgacgaaggttggaaaggtgtgaaagtttgtggtgtgctcagtttatcatgatatgaaacattggtccttggcaataaacgctagggaatttacaaaatgaacaagagcataagaaataagaaactaagctattaaaatacacaagcataaatcctgcatattcatcttctcatttagctcactttagttgacaatttctcattcacctcataactattttaattatacaaatattcatttttgatgtacacatgtaggagaacacaaatctacaaagatctcacactaatttactaatcaacctcactcaaaagtgtgctaaaatgtctcattttaaaaagtcgcattaatccaagaaactttaagttggattaaggataaggaatggctgatggtggttcttgagacagattgtttagtagcggttcatgctattcacagtcaattatctatgagtttgatgtttgctctagtagttgatgattgtcgaaaactttttgatttgtaggtctctttattgtttatttatcggtctgctaatagaattgctcatagttttgctagagtttctttttcttgtccaaatcgtataatttaaaacaccctttttttctttctttctaattcagaatggaagtatagcttaatctcaacagggcattgtgtctactaaagatagactcttagagagagctgaaattgaagcaaatattggaatttttgtacattcaagctgaaatttttttataatgtaatttgattcaatgcaagagtttcaatataatccactacataaaacttagtagtgaaacacaattgagattgagattagagagagagagagaggaacctgttcctttgaaacatcttgtttccactgactctgatacttctgaaacaaaatcaaaagaattctctgaagctcaataggcaaatcaggtggaacaaccttaagaacatcatctccactaaaatttccataagcacattttctaatcatacaacgaagacatgctaaaacctgttcaaaaatcacaaaagagcaaaaatttctttcacaagagcacacaaaaaccaaaacccaccaagcaaaaagctccatttaagaagaaaaggaggaaattgattacagggtcgaggtctgagagagaagggagattgagaagggtcttgaaatgagacttgtcatggtgaccacggagaccagtcttcctggtttgccagagagctgagattaattggtcaagggcttcttctgacttcacccctgacagcttgtgtaattgctgatacagtgagttttctccaatctccattgttgtcttcttctttttcttttcttcttcttttattatatcactttaggtacctcaattttttgtttataacactttagtcctcatttttctttgttttgtagcacttatgtccctaatactagataatattttccctctactattatacttgtaggattttgttctcttaattatttttttgtaaaataatattctccaaattatggaaataatctgggaataattgggaatttctctcaaaggttatattttgagatattttatcgatatagctagaaatcacaggtatataattacagtataaaaatcttatttaattaaactaactgtaactaagtataataactttaaatactcatacactagttcttacgaatgtacaatattaaattttattattagataaatgtaatttttttttttcgttttataataaattaaccctcaatcagtctcacgtggagaaacattaaaattggcataagttcatcaaaacatgtacaaaacttgttgaaaatagtgaaaatatttgtatatcatcatgacaagttcatcttattatttttaattacaataattatgccataatttaggaaatggtttatgagttagtgtcaagttattcataacaaatacaattaaaataattaagaaactaaaaagttaacataagttaattattaaatacttataagattcactttaattaacttaaaaaaacatgataatatctcatccattatagaaacattataattgaggcattttgttagattcatcgacagaaattgtattatagcaaccaagtgttattatataattcctaaatattaataacagacagacacgaatattccacaaacccaacataaaatcgaaactaaaatcattaaaaacacaaactctaacataaaaaaacaaaacacataacatgaccatcatggaaaaatgtctactactactactattactacttacaaacaaaataaagaattaaaattgaataaaacaaaaataaatagtaaataataaccaagcaatataaagagagggaactggatagagtcttagccatgcatgcacccatgcacactacatgtttgtaaaaaagaaaaccctaattctctctgacccacccacatggccaatgtagagctcaacgaaagcgatatccccggccccaaaacccgtccgtgctcaccgccacagacaccacccgtcgagcttgacctagccccacaaaaaaactcgtattttgaccataactctttcaatacaactcggaattggacaaaattcaacctttctggcccaccgcccacatggccaaagtagagctcgacgaaagcgaaatcccttgccccaccgcccgtgcacgctcaccgccaccaccagaagagctcggccgagtcacaaccctcgacatcgg

SEQ ID NO: 16201 - DNA, 9716 bp, Cannabis sativa
tattatataaatatataattagtgtatggtgaccttaaaacaatattcaagaactttaacaaaatatttactttgagacttgggtagaaactcgtgtttataacgtattataaaataatataaaataaattaaaagaaaagaagacgaagttgaatagagaaagagaaacgaaatgaaaatttcttaattatttattctaatgcggtgaattcttatttatattaaaatataactaaaataatgaaaaattaaattaatgtaataaaaaaaaaatacaaccaaatattaatagtgataattaatttagtaatttagatatcataaataatatttcataacaagattaaattttttaagcatttgagtggagtatctattttttcctttggaaatagaatagttatttcataaaaaggtgaaaattggaaaaatattcgaaagttcaaaaataataaaagtatataacatagttatatatatattcacagcaaaattggaaataatatgaaaaaatcatacacaagattgagtacgtactgaattttttagagtacactacacacaaaattattagttctaaaacaaacaatacaaacacacacacacaatcacaataatagtgcccttaaatttaaggtgctgggtggttataatatataagacatgcatgcatatgcatacaactctggccaactaatatatattcatatatatggtttattattaattggcaaaataactaacacaaattataattataagcatattacttaacaaaagaaatcaaccatatcccatttaagtaggccatggttcatggtgatattgatttgatcactattatgatcttttttccctttaattagtttgatatgatcaatcaaggcaaccagcctgctggcaagtagttattcacgcttggaccggctgtcacaactgatattgtatctgcctgatatctgtaattaatcatatataaatgtcaaaatcgacgattattaaatagattatttggataaagtatgtttttattttttctttttcttccattaagttacttaattactcaaccagtacacacaaaatgtattgtattattacttccatgattgaattctagtgagttttaattagtactttatatatatataggattattaattagtacatacccaatttgtaatgtgggctcacagtccaaagggtgataaaacacatcatgatgagcctgctgttgatgagattgccgcccatactcatcggcgcttggattaagttggagtgaacttagttggtaaccttccaccagctgcaaaccacaaacacattatagacacacacacacatatatatatatatatatatatatacacacaacaaatcaaatcatatatatatatgaccaagaagagttgaaataatgttgatgtacagttatcaccttttgtttcaggttcttgttagtttcgttaagaaaatgttcctgcatacatatatagaggtaagaaaattcaattttttttatgtaaacatatatatagtgtggcatattatataaagcatatttttcatactttacgctgaagatcggtgagctgatctagcatgcattgggtctacattataagacaaaacaaagtccagagttagttcatgaaaccacaaattatttggcactttcaaactgggttttcctctatatataaaaatgaaataaataattataaatgagttaatatatatatatatatatatatttatatataaataaatacccgcgttgatctgatctgcttgagtgacgtatccagctgtctttcaagtgactcgagctctttgctgcttaagtttcctagttcttctcccataaggtttctacggtggataactaacatcagatgcatatatatgcttacaatattacaaaaataaacatctttaatttgcagctaattaatagctagtactgtgtatgaattaacctgtgattccttagcagagtatcatagcgtgcttttagcttcaaatactcctgttggctactcagttcctatagttttagaaggaataatattataatcaatatatatatatatgcatataatatatgttagaacaaatgaacaatatagtagctaaattagctagtggcgcacttatttgctagttcatctcaactaaattacctaaaatgtcatgagctacttctagtgcaatttctcgtgcatgttaatgtaaagatatacagtatctatcttaatacagaaagatcataggaagaaaagtaaaaattaggcaatatgaggtaataaggtagattactagattattagtttatttatttgaaacactaataatgtggattgtaaattcagtactggttagttagtttgaatattcttgattcgtactatttctttgatatatacagtaattgatggtttgttaaattagaataaagtaaatagttgtgatttgttttaggtgatagttttgtaatgtgtttagtgactagtgtagtatgatgatgatgatggtagtatggtgataactttacagttggttgtgtatatagtagataatagtttggcttagaagaagattgtatgagaaagtagtaagctttattaatagtttggatgttggttatacaatttggaatcattgatgaggtatttatagttgcttactctttacattttgtggttagaattatattttctggattcttcttttactagaagaaattgtatcaatacacatctaaagttcgcatagctaatattttccagattaaatcttatctagaaattacttaaggttcttatagaattttttcttcaaatgtgtagaaatttctagactaaggtgttttaaaaaagtgtagcacattctctaatacttctcattggtacaaatttttataacaacaatcatgtctcgtagtagctcaaattttcctcttggtaacgcctttgtgaaaatatctgccaattgttcttcagtcttgcagtgcttgagctctatttctttgcttgcttctactttcctgataaaataatatctgatgcttatatgcttcgttctgctatatgaaatacgggattctttgccattgttgtagctgatatacttacgcaaaagatcattataacttcttcttgtaattctcctatgccttcaagtattcttttaagccatatagtttggcttgtagtcatagctgatgtaatatattctgcttctatagatgatttggcaacagttggttgcttctttgatgcccaagaaaatattccagatccaagtgtgttcttcatgtcgtgaactgatcctgctcagtcactatccgtgtagccaatcagtttagaatcatttgtaatttcgtgccaaataccattgagttttgttcttcacaagtatctgaggatttgcttggctgctccgtagtgaacttgacttggatcatgcatgaagcttgatagaatgctaactgcgtatattatgtctggtcctgtagtaattagatagagtaggctgccgattagactttaaaattttgattcatctatttttggtgagccatcttctttcttgagagctttattgttgtgtaatggagttgatgcagtcttgcgtccctctattttgattttcttcaatagtgtctccgtatacttcttttgtgagatgaagatcccatcttctttttgagttatttcgatcatcagaaagtagagcattaatcctagatcgatcatcttgaaactcttcatcatgtcttctttaaatttcttgattattttctcattatttcctatgtagatgagatcatcaacgtataaagagacaattagtgtatcattcataccttgtgtttttatgtataatgttggttcacttttgctcctcctatatcgttgtttagtgaagtagtggttgattatactataccaggcttgcggagcttgctttaagccatacaagcctttttttaacttgagaactttatcttcttgtccttgcaccacaaaaccttgaggttgctctacatatatttcttcttcaagataactatttaggaatgccgagttcacatcgagttaaaaaatcttctatttattctatgtggctagagctattaaagccctaatagtgtcaaggcgtgctactggagaaaatatttcattgtaatcaactctatactgttgagagtatcatttcacaactaatcttgctttgtgcttttggatagagtcttctacgttgagttttgtcttgtagacctacttgactcatgaactttctttgtcatgttgtcgatctacaagctcccaagtctcattattttcaatcagttttatctcttcattcatggattttctccatacttcttgttgttgagctacttcaaaactttctggctctgtaagtactaggttgcatgtctcatagatcccagcaagcagtcttgttcgccttactggtgagtttggtggggattcaatagcttgtcatggtttttttgttgttggttgagtaaaaacttcattttgatcaagttcttgtcttggtggtagaggaatattgattgtctttctttcaacttcttgtgtctcccagttatatgcagcatcttcatcaaattttacatttagacttattattagtttatttgattctaagttgtagactcggataaccttttgattgagtactatagcctaagaagattcattttttcagtcttctcatcaagcttgccacttttctcttttggaatgtgagagtagcatatgcagccgaagactttgagatacttaactgatgacttacgtccactccaagcttcgttcggcgtcttattctgcacgactttggttggacatccattgagcaagtagactgcagtgcttactgcctctgtccaaaatctttttggaagacctttctctagtagcatggctcttaatgcctccataacagtcctatttttcctttcagatatgccattttgttttggtgcatatccaaaagtgagttggtgctccatcccttcatctttacagaacttattaaattcattagaagtgtattctttgcctctatcacttctaattgtcttgatataatgtccactttgtttttcaacacggactttatttcttttgaaaatatcaaaaacttgcggcttttgttgcataaaatgaactcatgtcattctagtaaagtcatccatgaagagaatgaagtacttatttttgatcatttaatggagtgcgcattgcctcgcagacatctgtatggatcaactgcagtggctttttggctctccaagctttgcttgacgaaagaagttgacgatgtcattttccaagcatgcatccttcgcaaactgtgttgatctccttaattgttagtatgtctcgcatcatattcttctatttgaggatctttagcccgtgaaagttgaagtgaccaaaccttctatgctaaagtcacgactcatctgtttgcgcttgtattgccacattgcttccaagtgcatatctccattatatgggaaagtatctgttatttctaatttttacctttataatttgaaaggatatattttgcttatcatagattgtgcaagaatctccttcaaaatgtaaagagtaccctttttcaataatttggccaacaatatgtagattttgattgatgtcgaataccaaaagtacatcattaatgtatctcttgcctttttaaggtcaatggaaatagtgcctttaccgactacttccatgaagtcacctaatcgattttgactttagtcttggatatgtcaagactgcaaaagatgctctcattttttatcatatggttactacaagcactatcaagatgccaagtatcttctccttcttctgatgcagcttggcagatacataagagattactttcattatttttctcttcgaaaaaattagcttgatggaatttctttaaacgacaagtttttttagtgtgcccaattattttttacaattttggcactgtggttttcctttaaacaagtcgtctttctccaagtgactttttcttttacaaatgccacatggaggatacttgtcgttattttctttttatttttgttgtatctttttcccatcagcttttggtttttgagaccacagattgattttagactgaagacattttcagcttcactttccttatacctttcttgtctactttcatatgtttcaagagagcctattatttagttagtgatagagtttctaagtctttagttttctctatcacataaataattgaatcatatttttctgtacaagatattaatgtcttttgtactatatttttgtcagaaattatttcttcataggctcccatttgatatactatttctttaattctagaatagtaatcacattatcattcattttaagattctcaaaatctcttctaagcttttgtagtctaactgtgcgtaccttaactgttccttaaaactcctcttgcaccgtgtcacatgcttcttttgtcgttgttgcatccatactccgtgaaaaaaaaattgaatgtcatagcttgctataagaagtataatgcatgagaatccttttgttgattatcctctaatgccttcttttgatcttccgaaagagatgtaatatcttccagaatagcgatttcctcttcgataatttttcatagttttctacatgaaaaattggaagacgtagagaagagtggttggactccaaactcatgttgatggactgcgcctggagtggaagtcagagacaaagtatactacatagatgggctctcatgaaaatgatagagttgtgaaatcttgtcccaaagggaagtactagttctcccacaaagaggtcgtgaccagcaaataagtgggctggggcatgagtctcaggaaaggcaatttatgcaagcggtctatggttcttgcttttgataaaggggtctacactagaatagaagatatttaataaatcaaacaacagcagttggatgagcccaattacagaaagaaagtaacaaatatgacaaaaatataggttctatggacagagtgtgagctagccaaagagttcggataccactgatggcttgttaaattagaatagagtaaatagttgtgatttgtttaggtgaaaattttataatgtgtttagtgaatagtgtaatatgatgacaatagtagtatggtaatacttgataggttgttgtgtatatagtagagaatagtttggcttagaaaaggattgtatgagaaagtagtaagctttattgatagtttggatattggttacacaatttagaattcttgatagggtatttgtagttacttacccgtcgttagaattatttcttctagatttttcttttactagttagaattgtatccatacacatctaaatatttctagagttcacatggctagtatattctacattaaatcttatctagaaattacttaaggttcttagataatttttatcacaaatgtgtaaaaatttctaaactaaagtgttgtagaaatgtgtagctaattttaatattctaatcgtagttaagttggaaagtcaaagagaagccatatatttcacttttcaaagatatcaatttatctcattacaaacaagcatatgctatacatatttctaacaaataacatgcaagtaacaaacatgatgtgtatatatataagataatacattatttatgcaatctataaaccaaaaatataaatatatatatttatatatataactaataattattattaccaaggcttctcttgcagacacgttaggctctggagctccatagttgttcttctgatacctttccagtgtttttagcatgctgtgtataaatatatgtatatcatcacaaaacctaaattaataaatgcatatattatttcataataatctcctcacgaagaattcctagacatttgatcacaatgtaaactaataactatatcacttcatataacaacattttgaataaggattatttaaggatatattagggccaaacttattacaagtatatatgttctacatttggtttatggtaaaaaaaattagacttatatattgcatcaaacaaaattaagatagaagatcaaatcagaccttttgtattaatatcttgcaatgcaaaagatcatgcgtgtttgtttcgaaaagaataatagatggttgaatattatatgttgaaaaccatattatatatatatatatatattcatatagatagatagataaatatttgtgccaagagtataagttgtactgaaagtgtacctaaatttatatttttacagaaaaaatatctaaatcaatttttagttccattgtatatacgtgctctactagatgcaaatgtggaagattggataacatggatttttatagtgaaaatttataagttatctaagtacttaaattttttcaacataaccatatttaacacaactttcatatttctatcgcaatatccctttatgcaaatcaatcacactattatctaacagcggagttaataacatgaatgtgtaactaatgttgatcatattcttaatgtaaaaaattaaacttggaattgagtatcacttatatatataaatacatataccaaaatgatgtgcatcttgatagaagcaaccatatttataccaaaatggtgtgcatcttaatgaaagcaacctcccgagcgaggtagtttgggatcggttgcgaggcctgcatgattaccgggcattaacttttccggcctcctgaccgatcccactatgacatgtttgggaggatccttggaacgctgcatactagctagttgttgagatttacttctatctttcaaaagtttcagttttgaaaatgcaataaaaaaagttttactactacaattaacacatttatttttttatttttttgtaaaaaaaaaaataaaaaacagaagatacaagtctaaagaggcttgtttcattgattttactttagcactcatcaaaatttagttttatctttggttttattaaaacatcgtagacaaaaattttaaaaaaaaaatgattttagaaaatctgaaagcgaagacgaaaaactcatttaattgaatagaagcgtctttagttattcccaaataaccatagatgtttctcttcgattaattagccttttcatctttggttattcccaaataactaaatacatatctcttcaattaaatggccctttcgtctttcgtctttagtgagatttaatctggataatgaacaatttcttaaaaaatgactccttttatgtgcttaaataaataaggatataaatataagaagatatatgcctcaacaaagaacaacatgtgttcttaaagaacatatttctcttcaactaaacaacatataataaacaaatgtagatatgttatatatactatataagacatctctaactatactttctaaacacactctttagacttgaaaaaataagctctaaccatacaaaaaataacaatttctataataaaaaatagataaggagctctcaaatatagagagctccttattttttagctaaacttttttaataatattttaataaaagcactataattttttttattattttataaaattaatttatatttgataaatttaaa

SEQ ID NO: 16202 - DNA, 17382 bp, Cannabis sativa
agaaacaaagagtgaaaactaaccgaaaatacaacccaaaacttagactaattttagcctaacacaagctatctggtcaaaattataatataatcaacaataattaatgtaaaaaaaattatagaatggaatattgatggtatattcatggtttggtttctccatgaattgatccgatgaatggtggcatcaagcggaggctaacgttgagggcttgaaaattttaggttagagaattctaaatagaggcattatatagatataaatttcaaaattaatattaattaataaacatactaaaaaatgatcaatatttataaaattaataaaaaaatatttataaacatatgtggagaatttttaagtgtactttctaatttattaactaaaaaatgaatcaatatttataatattaataaaaaatatttataaacttaataaaaaattaaaaaaaaaaagagaaaattaaagaaagaagaaatatatacatttagagtaattttagactattacatcacctttttattcatctttttcatatatatatattaaaattaataagtaacttataatttgcagagaattttaaaatgaagtaaatatctaaaaaacttaaggataaaattgtaatttcccttaaataatacaatatccaacctgctaaattttaatcttgtgacttcttcgtcaattcgtcgaatttctactgttatcaatatttatcacaattaacattactacacaaatacaaggttaatttcctataaatatgtctttatctatatttacatattattctacttactaatttttcatacctaaatatatatatggatcattacaaaatagttatacaataatttcttttaaaataaaaataattttataacacatttttattttttaaaaataaaatttaaaaaacaaaaatttatttttacttttgtgattataaaaaagcgtcgagacacaatgtcgcttttttatttgtcttgattatggattacttaacgaggatgctgctccaagcctcccactccaaaggtttcggattccacccaatgtgtaagtctataaaacttattaagttatgtgatctagttatcttttacaagggaaatgcaaattcttttcaccttattcaaaacacctttaagaggttttgtgactccacgggtctcacagcaaacaaaaaatataacattcacttcggtgggattaataagataatcaaagagcagcttcttaacatagttcaaatggaagaaggttctttccctttgaagtacctcggggtgcacttgagaccaaccaaatggcaagcctctaattctggagttatcctaaacaaagtttacaagaacctttacaattgggcaactcgaaatttgtcttttgcaagaagaactactcttatcaacactatacttttggggataagaaacttttggatgggaatatttatcttacctcaaaaggcggtggctgcaatagacaaatgttgcaaagattttctttgagattcgaatggaaactggagtaaggttcatcttgcttcgtgggaaaaagtttgtcttcctaagaagtatggggggattaaattttgagaaggcaagaaataaaacatctatcattgctaagtttctttgggacatttcgaacaagcaggacaacttgtgggtgagatggattaatttcatttatctcaaaaaccaagatatatggttgcttcttgtgaaaagcgactacatctggtactttaagaaattgctgaagataagagattccacagacaaagttgccttagattttgctgggataaatggaaagtttaacgttataaagttttatattttccagttgctaaggttgattatgttatagcaatttgacataaactaagtattcccaaatacaagtacattgcttggcaattaatcaacaaccaccttcttacttgggtgaacttaaacaaattcttgaagctttctaactgtctttgtccagtatgtgagcttgaggaagagaccccccaacatctcttctttgattaagaaaattaaagttgttataaactcttggcagggagtttgtgtgtggctgatcagctatgagttctggagataacaaggcacaacttcttcctccttggttgttgctatcaacaatgcaatttgttatgagatttggtgcaaccgaaatttgtgtgtctttaacagggtcgacccaagctttgggcagcttgggccattgcataaggccccccatttgtaaaggcccatttgtttataggaagagttttttttttttttttttattattataaatatattaaaaaatttatatttgaaagtttagaaatatatcttaaaaaaaaagaagtaaaaaactagcaatgaaggtcttaatgtacataatttttatttatttatttatttatttatttttataaaaagcctaattttaatcttttgcaaaggtccccaaaatatttgggccagccctggtctttaaatatacttgtcactcggtaattaccatttgtaaggccataaagttagctacaaaaatctatatttttgggtcttaatttggctaagattaaggctatgtttggtgggagggagggtgagtaagatggatggagatgttaaaaatgatggagagtaaaatggatggagagaattgttaatctcctttgtattgtttggtattaggtgtgaggtaatgatgaagaaaaaattgattagtaaaataacaaaattgtccttttaaaaataaaattttattattttttatgggtagttattgtattttgtaaaatttgttttgtctttttctacaattaaattttgaaggtttggagggagaatgtcttcctctatctctcctctccctccttctcttccttttaccaaacaagtgatttagtctttctttccatcactctccctccacccctctccatccacccatctctcccccctaccaaacatagtctaaaaaaaaggaagcctttattgttgatgtaattagaagactgtagatttttttttttggtattagttttttccagccactgctgctgtactggtttgggttatgtttgaataaaaattttccttagttcaaaaaaagaataaaaaaataaaaatattaccaaagactgactaatgaaatgagatttaaatgattcattttgaaaaagttattcataaataaactaaaatagaattgaaaactaatatttttttttgttgatagaggagaacccttaattacaaaaaaatcctcagtcataccctaccaaagaagagggtaaaatgcacactagtttgtgagctagtagggattgaaaatttgatggggttccaagggtaaattcgtaatttcaaccccattatgatatccgcgaattgcaactcatccaccaacattatattttatatatataaaaataaaaaaagctttttctttaatttttaacagaaagaaagaaagaaaccatgtaaaaaaaaatatatgaaaaaataaaacgtttcggagttgcaggtatatctgtcaatcttttgctttatttattcgtttatgtaatttgataagctaaaattacagattatctctcttcctgtgtttgtctctctagctttgttgttgttctttttttcctttttttttgttcaatggggattcattatctgtaaattaacggaaagtttaacaagtttcctgttctagatatggtgttattcagaggtgaatttaagtagaacaagtagtcagtggctcggaaatctggcattattatttggtgtattgtgttctgaacaatatggctcagaccaactgggaagcagataaaatgtgagttctagtttcattgtttcttggttgatttaggttcttgggtttctacttcgtttcttgttttctgttttgtttcttcattcttcttctttttttttttttttacatttatcattttccattgaatgttccatctgtggtgtgctagggttttagttacttaaacattatttaggttgtgctagcattacctcatctggtattttaacattatttagggtctatgatgctaatttgggattctaaatgtgtgtttcttttaatgtgtagtctttgctttaaaaattgacttttctttttctactattataatatataatatactatgaattaacaggttagatgtgtacatccacgattatttagtaaagagggatttaaaggcttctgctcaagcattccaagctgaagggaaagtgtcatcggatcctgttggtaagtatcttaagttgaatgtgcttgaatgcctagatcttctctttcagcatattgtatatgtatttttttttgggtttaattggtttggattgtggggcgttggtttacagctattgatgctcctggaggctttctctttgaatggtggtctgtattctgggatatatttatagctagaaccaatgagaagcattcagaagttgctgcgtcttatattgaggtttgttgcataatcctacacttaattcactatgtccattgatgcaaaaaattactgcagatgcaatgtgaaagtagcatgttttacaaggttgtccttcaaattattgtctcaaaaactaattagatagcttctatttaacctcatggcattaatgaatatggcagacacagttaattaaagcaagggaacaacagcagcagcagcagcagttccaacaacaacaaccacagcaaccacagcaccaacaacaacagcagcagcacatccaaatgcaacaacttctgttgcagaggcatgctcagcagcaacagcaacagcaacagcaacagcaacaacagcagcagcaggcaccaccacaacagcagcgaagagaagggagccacattttaaatggtactactaatggacttgttggaagtgatccgctcatgcgacaaaatccaggaacagctaatgccatggctacaaagatgtatgaggagcgattaaagctgccttctcaaagagatcctttagatgatgcagctatgaaggtagggatgtagttggtgattgttttgaggttttgagaattgacaatgtaaagataataaccagcttggatttttctttctttttaatatattaatgtttttagcagcaaagatttggtgagagtgtgggccaacttttggatccaacaagtcagacctccatattaaagtcacctgcaacatccagccagccatcagggtatttttttgtttttgtttttttacttttttaaatcacattgcttatgtattaaattgatgcagatgcagtgtgtcgtcgttgagtttagtttatttatgattcttattgatataaattaaattcttcaaaattaagaatttttgggcacgtcattatagagcatgagtgggcaacatgcaacgagagcaaaatatttgtcataattattgttcagataaccactcattaagttaggcctaatttagctactggtatttaatcttgccattaacatttattgaattaccagtaaccttttgcttttcaggcaagtattgcatggttcagctggagcgatgtctcctcaagttcaagctcgaaatcaacaattgccagggtccaccccggtatggattctcatctttctgttttatgcttgcaacttggttagcttaacctctgtattgttttgatttatgtggattcaggacataaagcctgaaactaatccagttttgaacccccgaggtgctggtcaagaaggatcattagtaggaatgcccggtattcttctttaagttcttcatccattgttagcgatagtgacattcctttgaatttttagtttcatattttggtactttggcatctacttattctagtttgcagcgtcctattattaccattcaaaaactttaggaatacatcatttatagaaattttaataatactgcattattataattattatcatactatcatttctggaaattctaatagtatttgttatgatcattagcggcagtcaggcagagctaacttgtatgattcattgtttcagggtcaaatcaaggaggaaacaatttgactttaaaagggtggcctctgacagtaagttttatacgctatatttttttgttgccatcacgttgcgacacattaaattcatgaatacggcctagtgtagtagtattctccatcaaaatatgcttgaccctgaggctagaaattttgaaatatacttccacttaatttttttttgcttcctttctagggtctggatcatattcgcactgggtttctccagcaacaaaagccttttatgcaggctcctcagccctttcatcaacttcagatgttgacaccacaacaccaacttatgcttgcacaacaaaatttgtcctcaccatctgctagtgatgaaaatagaagacttagaatgcttttgagtaaccgaaatttgggtcttgtaaaggatggcttttcgagttctgttggagatgtggttcccaatgttggatcccaacttcaagggagtgggggtcatgttttgcctcgtggagatacggatatgctgattaaggtttgtgctgttctctttcttattttgttgctgtgtgtgtttctacaccctcttccaaatgttaccattttgatttttcaactttcttgtttgcagttaaaaatggctcaactacagcagcagcaacagcaacaacagaacagtacactgtcacagcagctacagcaacattcaaatcagcagtcacagagttccaatcacaatccacaccaagataagatgggtggtgctggcagtgtgaccatggacggtagcatatcaaactcctttcgaggaaatgaccaggtacgttttgttttagctcttccctacagaagtcttcaattatgcttatccatcctcatatatcttcttttatttttcctttctgcattattatatgtgcattattttgtcaaagtcacaatcttcttatatcatgttttatcactttagaaaggaagcttttaacttcagttgaagcagcagtcttagtgtagatgttaaaacaaacattagtttttctaactgtttgcgtgcatatgagtaggtagaataattactgaaagtggcattttataaaatcaatcttgcaaagaggcgtatgtaaaaatgttgctggatcattttgatgagcattatacttattcggatctctaacattgttgctgtaattatgttttaagggttcaaaaagccagactggtagaaagcgaaaacagccagtgtcatcttcgggtcctgcaaatagctcaggaacggcaaatacagctggaccttcaccaagctcagctccctcaacaccttcaactcacacacctggggatgtgatctcaatgcctgcattgacccatagtggtagttcttcaaagcctttcatatttgcagctgatggtactggtactcttacatcaccatcaaatcagttggtgagtgaattcttcctatgcttttatttgcgaaaggaattgacagttgcatgtattctcatttgtattccattttggcagtgggatgataaagatcttgaattgcaggctgatatggatcgatttgtagatgatggatccctcgaggacaatgtggagtctttcttatcccatgatgatgcagaccccagagatgctgctggtcgttgtatggatgttagcaaaggtgtgttaaggctattttgatcaacatcgttcctttattttttttaacctttgtgatgatgcacagaatggaaggttaagacttgagatgcctattttgttggttttctatttcttatccattgtagggttttgggttgatgatgaaaatgatatgttccactagaagatataagccattggtattgaaccaggaactaaattattttcactaattgtgtgcaggttttgtcctctacaagtatactctttccaatcaatctttctatctgtttgctattgttatatttgctttctagattatgagaatttacttgctattatttagtatattttggggggccttgattaattaaactccaaaggagagatgcatgagtttactgctggtctgttgactgaatgtgacggtattgtacttccagggtttacatttgcagaagtaaattctgttagagcaagcacgagcaaagttatatgttgtcacttctcatcggatggaaaactgcttgctagtggtggccatgataaaaaggtgagtgaattagtctctataactctatatgctgagctactaatgtaatggtgatgcatacttatatgtatatgtattttgtgaaatactaacctgaaactgctttatgattgaatgttgaacttcttttcctgattgataccgtggttaatgaataatgcaggctgtattatggtacacggattccttaaagtctaaaacttcacttgaggaacattcagcattgattactgatgttcgttttagtccaagcatgtcacggcttgctacgtcctcatttgataaaactgttagggtttgggatgctgacaatgtaagttcatccattcttatctgaatcataatgttcaagcgtattatttgttctcaagaatactttttaacgttttttaatcttctctaaagtgttttttttttgtattccaaagcattggaaagttttgctggatgatgtgccaaagtttttggttactccttttttattatttttgaacaaatgggatttaatggttgtttttacttcccacaaattgaatttgttgaaattttccaaagggaaaggatcataaatgggataaaatgctctgaaggtagttaacatggcattgctggtatagcttaaaattaggttcagctccaaggatgcgtatcagggttaacgcagtgatggataaaaagtgaatttagttatatttactaccgtggaaggtttttgctctctaatgaatccaattgttgaattcttatttctcagaagatcttaagtggtgattgtagttaaatagtgataacttttttcctgtgttatttgaatgagtaaatgaatttttaatatttgagtgctaatttttctctgttggacgcagcccggttattcactacgcacctttatgggacattccaacactgtaatgtcattagacttccacccaaataaagaagatcttctcagctcttgtgacagcgatggtgagatacgatattggagtattaacaatggcagttgtgctagagtgttcaaggtatatttcattaagtctttatgatattagagtattgacttgttctttttcaatgttttctcccttctaacagagtaggattgtagtgattgtgaatgattttacttatgtttattgtatgatatattagggtggtacggcacagatgagattccaaccccgttttgggaggtacctggctgcagctgcagataaccttgtatctatactggatgtggagactcaagtttgtcggaattcactacaggtttaatccgtaatattaatttagatacaactgagcattggcgtgtgaaattttattaccaacaaacaatgaatgaacaaaaataattaggatagatattatctttttattccacgtgttaaacaatgaggagtgagtactatagatagtgatgcaaagaatgatgtgacataagatgggcatctgattgtgttttgtaaaactaggtaatgtctgataaaatacatataagttcaatatttaagtttattacagcagggaatagttggtaagcttcttgcttttttaaggttatgttggatcatgattttattatgcaggggcatactaagccagtccattctgtgtgctgggatccttcgggtgagttacttgcatcggtgagtgaggactccgtcagagtctggtcgcttgggtcaggaaatgaaggggaatgtgttcacgagttgagctgcagcggaaataaattccattcctgtgttttccatcctacttatccttcactgttagttgtaggctgttaccaggtatttctatttcaattttaatctcccgtagttttaaacagagattcttagaaagcattgcttataaatttcgaactgtatagtaaataaaaacgaaaagcataacagtcttagaaactcaaaaacagtcttgccaatccaaccctggttaggagggtctagatggttgagtctctactagttttgctacaagttgtttcatgctaacactaaagcaatcgttgcagtcgttggagctctggaacatgatggaaaacaagacaatgacaatatcagctcatgaaggacttattgcagccttggccgtgtcccctctcacaggtttggtagcttcagccagtcatgataagtttgtcaagctttggaagtgagaccagttcctgcccccctcctactagtttaaccatacaggattagcttcttctcaggatcgattaaattggatgtagtagtttgtttctgcctcggttattcgattttttttcttcttaacgtcctatgtaacttctgaactttgaccaagtaaaatattatttctcttgttgtatttgtatccatgcttttgcatacctgtatttggttgctcaattaattttgaaaaacctgaactttgcttcatcctccagtttctatattatttgttgtttcgaattacataattgtataattttagggtgtgtatcgtgttttattgctgcgaaagggggaaagttctctcaataaaagtatcaaaatgttaacgcaaatttgcgtcaatgttagattctttaattatgatgaacgttgtgtatcttactttacatcctacatcaatgctctcttttatttattttattagaaaaaaaattgaacgtttatgcatcttattataccgaacttaaataaattatattaacattacttatcaaaaatatataattattatagaaaatgcgttttgtaataatgatactaaccccatgggagagggattgttgaaaatcaaatccaaaacttacactcaaatattgccttaaaatactaatttaaatgtttcaaacccatctatgaatgaatgatttattggcttctcacctttatatttattttctctttttcagatttaaaactaaaaatctgcaaatttttaatcttagtgatgttttgcaatgcttagtgatgcttttgtgatggtgcctttacaaacttgagatttttggtcaaaaatgatgataacacgatgctttaatgatgatattgtaatggtaccataaaaactcgattttagactaaaataacaatattaaacaatacttaacgatgttgtaacaatcattttgtaatgatgccataaaaatttgatttttaaccaacccaataaagcaatgctttaactatgtgttggcgtggcgatggtgccatgcaaatttgtttcttcgacttaaaagatggtaaaaaataaagagtaacgataatttacgatggaatttgattaaaacattgttgatgcattagtattcactcaaatgttagttttagatttttttttctacttgaggatgcaataatctttcacataaataattgaaatcttgtattttatacactctagatgaaggattcaacacatttctatatgtgtcaatttcaaatttattattttaccaaaaaaaaaaaaatcatctcaaacaaacatccaagtagatagtgaatcgctaaagttttaatggaatttcaatacaaaacaatagttatttatcataatatttttgccaaaaaaattaaattttcttgatgccatcacataacaattatcaaagtattattttaccgttgattttggtcgaaattaaaatttcatggtctaaaattaaattttaaaatgataagcaacaatgattttcaatggaatttaatgaaaattctgctgatgcattactattcactcaaatgtcagtttgagagaattttatctgtttgacataatattattctagatgaaataatttaaattttgtattttatacactccaaattatgagtttaacgtgttcaaatttatttttttaccaaaattaaaataaacacaaattcatcaagcatccaagtaaatacttatgcatcgccaatttttttttaaaatatttcattgcaaaactatagttaaacatcgttttaccatcctatttttgccaaaaaagaaaaaaatgtttttgtggcggcatgcaaaacaatcattaaagcatagttttactatcaattttggttgaaaattaaattttcatggtacctgttatccatgattccaaataggtgacacatgaactctcacggtggcccaccacatgtatcgagcccattacttggccaaagtagttcaaccaatcgacccacctattgagaataggcaaaactggacgggtggtctggatctcatacctttatttagtaatgaattcggacagtcgatcgcggataggaacttcatacctgatatgcaaaccatatttaaatccaagaaggatgccttcatgggtcatctgggaacgagatacgaaaaggcatttgggatagcttactatcccggaggtcgcctacgtggcacccctctaacatgatccttaatctggtgacctatcccctctattaagacttagaaaagcacatgacaaaaataatatcatttttttaggcggacacccactacactgacatttctctctcccaacggcagctcacacctcatttgtcactgtcaatagtactatcatgtacgacatgcaactcacccaaattgggcaactcctagccgacccaatagctcaaaatataatgctaaataatgtattttacccaattagtgagttttattgtacaaaatcctaatggggcttgaaatcgtccggcccattcaacatatgttcttataaatatgacactatcttttcacgcaaagggttcgattctcttggttcacaaccagaaaaatacagtaaagaatcgtaaaatctttatagccaagagcttataaaactgcctcgtggactaaggttcattaatgccccaaccacataaaaattgtgtttcattttctttttcatattactttatttatgttaaatcttttattataatcgatttttaaaaaattcggtaaatattttggtgctttcattgagagatgaaaaaagattctgactattctttgtcatctaccaaaacggtggctactagaaacatagtagcatgcccaaccgaccaagtgggtccaaataatggtgaagacctagttgttgatgttttaaaccctcctcctttagtggatgcgaagaagcatcgacagtgggcggagatcctccccaaaacggtaattggctagaggacccgtacgaagaagacccagtcaaagaagaaggctaggaagagtactatgaggatgaacataggacgattatgacaaagaggaggaagaagaagactacactcccactaaagacccagaagtttctcgtttgaagcaactagttctagactaggaagctaagatggcagaacaagatgaagttactcaccaaatacaagaaacgttgtttcagttgtagacgttgatcataaaaaggggcctcaacctggaggttccacccacaaaccaaaatcaagctctcaggatttagttcaacaccaggttagcagtagctatggaaaagttcaaccatccctgtgccaaaacatctaagtcgctaatgaaaaaggaaaagccaaagtggttgatccccaaagaaaaatcattccaccaaggtctatgcgagtcaatatcaaccttcgaaatcgaagggatgaccaaaccctaaggctaagtcatccgaccaatctataaaggagtttcctacagggtaacaagacctgtactcagacattgggacctaatgcccaaggaagaaggattctcaccagttcctttgttaaacataaggatgatattaaggacttagatcctaaagaaagcaattcatagggacaacatgaatgcgcggagggaaaaagtgcaacgtggaagagttaggcctcaaagaggtgatttacgaaacaacatcaatgattgatttcggggatgaaaggtactagatgataatacaagaaggctaaaagactagataacaaccttgaaaaaggtgacagatcgactggtcagatgcaaagtggagatagatcagatcccgaagatgaatgtaacgccctaatccttagggacgccacatgtgtgcgtatataaactagtttataacaataaactagcagtttagataaattatgattagtaaaaactttaccaacttaatttaaattataaaatcatggcatagttcctttttacgattggggatttcctatttaaaatattacaagacatgttattacagtattattataaaatacatttaaagttcagaatatttgaaatatagttcctgataacccacttgctggataagctgatatgtacatttgctggagaagattcttgactcatggttgtccaaatgtctctacttattacctgcaccacataacgctcgtgagtcatagggactcaacaagaaaagtaatatcagtaatcatataatttattattcaaatattatcagttagattcagacaatcaggacccaataattacatattactcataagataaaatccaaatcactactaacatcagtcgcaaataaatatcggtataaaaatattcggtaatacaaaatcgttgtgctaataatataagtcattttcatttcttgataaagtgttcataatcaacattcgtacattactcccatgcataagtccaagtcaatactgacattcattcaaaatcaacatcagtataaatatttaatgatataccaatactcatttaataatataatttatatctgttacctcataaagtaacaatttcccgtagttgcctaatcagacaaacttgatgctctaaccctacttccacatatgtttcattgcctaatcaggcaacgcagatgccctaacctagcatctatatatctctttcattgtctaatcaaataatcaacaagtaggaaacttaacaatggttcctatttatagtcatgacgtttgatacctaacccttcggtatccaattatcgttgcctaattagacaatcttttcatcattatctaatcagacaatcttcacatcattgcctaataaaacaactttttcatcacataacggtaataaccttgttttaatctcaatattactcaattctcaacaataataattgcattataacatatcatgctatgtggtacaatgtacttttcttacctttaatctggattcatgcatgtcggccaacccaagtggagaaacactcccgatgatctcgaccttatgtcacaacaacggtaaactaataagtgtttatctccaaaatacttcattatattcgtataagacaatagggttttctactaaataccgtggtataaataccttaaaataaaacttatattttggctgtaaaatatataccttattgtagagctcgttgcaagcttcacaacagcatgtagaacgtctaaaatggacacccgagtgaaaagttatggccaaaatacaattttcgatcttaaaaaaaaactgaaccgctttattctgctccaaaaacggtctaccatgttttgccggaacgaaataactcaattataaacttctcaaaaccccatcaaaacctaactaattgatttcaaatttcatagaacacctatataacatctatacaacaattctaacgtaacagaactcaaaatcatgtcgttaaacaaaaagtgccattaatgctcaagctttgagctttaaaagctcaaacttgattcataactcaaaacagtggtaaagttatcacataagcatttgatggtggtggtgatcagttttggctcgcacgagagagaggtgtttgatatgtttttgtttttaaaacattttaatatatatacatatatattagataagaatcagattaataatactaataataataataaaatattattttattatatcttagccactaaaaaatttctaaccttagggtatttggtcaaccccgagtaccctaaaatatcttggtaattctataatcaacttatctcaataatctcatcaacattaataactaaactcgatgtgatatttttgacctctgatcgaatctctaagatcaccgaacctaaaaatatttttatttcacaaatagcttacaatatattcatgtattctaaataagtctatgtaattaataaattatgtttatttatccacttatgacacattagggtatttggtcaacctcgagtaccctaaaatatcttggtaattctataatcaacttatctcaataatctcatcaacattaataactaaacccgatgtgacatttttgacctctgatcggatctttaagatcaccgaacctaaaaatattttcatttcaaaaatagcttacaatatattcatatattctaaataagtctctgtaattaataaattatgcttatttatccacttatgacaaaatttataatttatgttgaactaggttagtaggatcataattctactcattactacctaattaatccataatatataataaattataattattcattattaggcttccatgatattacaaccatcccctccttatagaaattttgtcctcaaaatttacttaaacaactcgggatactgctcctacatctacgactctaactttaaagtcacttcttccattttgttgtttctttacatcacttttaacaagttgaattgtcttattccaaattactttttatttccagtccaaaacttggataggttgtttctcatataataaatctgtctaaagctcaaagttgtcatagctcagaatatgtgtcggatctaatacatactttttcaacatggagatatgaaacacatcatacactccggttagcgtaggagtcaaagctagccaataggctaactggcctacttactccagtatcaaaaaggtctaacaaatttagggtttaacttttctttctacgtatcccttttataggtgatactcaaagagatataatatctcccacttggaactctatatttccacactttgaattagtgtagcttttctatgtaatcaatgaggtgagtatacaactcgaattcactctatggtcttatatgtgatagtcagtagtcccgtgatccgtaaagggaaacaccgggtaagctgtgcaatcccacaccgcct

SEQ ID NO: 16203 - DNA, 4192 bp, Cannabis sativa
caaagcatgatgatttctatgaaatgaggagtgcgctcgcaagacaattaagtatcaacggcttgagaccaaataaacatgcatataatgaaactatacatattttgaaatgacaacaagtttctgcccactagatcatttaagactatagctatcaactttaaaagccaacacaagcatgacttcaatgtccattaatcgttgtcttagatttcactgattacaataccaaggcagtcactctttaatgagcatgaaataatttccctggtaagaagctgctttattaagcttaataaaattctatcccctccatccccttctttattggacttcaaaaaatctactattgtaattgttgtcttggcatccgcgtattaaaaagaagaaaaaaaaggcactaacagaggtgattagagagcaaactataagtttgatcatttatgcacacatatgtggttgtaccagcaagggttaagaaacaaccatactaaattcattcgacaaccaataagttcttcatagtacttactttccatgcaaacccaatgagaagccagcaagaaccacataggtaccaaacgccatgaaaggaatgtacaaatctggtgcatttatgtcataaattggtggtttataggaaagtctgcctccaactggctcggttattcttgtccaatgaccctagagaaaaacaataagtgaaaaaaaaaaaaaggcagaaagaatgcaaagaaaaaaaaaacaaaggatgactatcatgataaaggcagaatgtacaaaaagaagagagaaattagtacttaccctgtgcaggaatgggaatagaacaaccttcaatttgttcctcacatattggtcattcacttggaagtagtattgaggatcagagaaatacctgctaatctgttataattacaacttcaacaagttataaatgagcatgatgtctaaggtaccataagaaaacactctactgtgatagcttgaacaatcatgatcttttataaattttttttatttccctttaaatgattaggaagataacaacgatatcataagtatctatatgtgcgtgtattacacacatgtaaccaagtaattatgcacatatggctgcaaatcagagtaccaacttaagcactagactcctatgcgttgtcatcattctttcctacagaattccttcctaaatgaaatgaaattattttactattaacacatatataacttctgttaattaagtaatgaaaaaaaaaatgcatgccacggaatgaaagtccctaaatgcaaattacaaaaaggaaccccaatccacattcaaatcctgaaatcagataacaatagactttctgattaccaactaaaaataaattaccatttagaaaactattttatattttgattttgacaccaaaaacaaactgaatgcctctgatataaaaattggaaaagaattttgaagctaaatttatacataaaactaaagcacacttcataattgagtggaagtctcttgcgtaagaaactcgggctgggttctatccatggatttaatttttctttgtttctgtgtttcgctttgtggtttacttcaggttagtagtaaacgaaaattattttattgtaaccacggttttcctctgccataagtgagggttttcatatttataaaggggagagaccagtctaagacaagtggcttctttctcttttccaaaaaaataattgacaacaaaagtattcggtcttttattctttctttggtacatgaaatatacatttgagttaaaattttaacaattatatgtttcagatattaaaaaaagggagaaggaaaaattgcaggtatattcagtcataaactcgtatcagcattcagcttgcaagtattcacattttttcttcttcaatactttaaccataaaccacactagaactcaaataacaatttcaattcaatacttacattgctttgcacgtactcagaacttgaccctaaaattttctccccatatgcacctaaaccacctcggataagccctgaaccagccccataaaatgaattcccaaagggattaggctgagagatttccggtggtcttgacacaccaggctgggtgggaacattgttatacatctctgaaattaaacaaatgcacgcataaaaagaaagaagcatatttgaatcaggagaagctaacattattttctttcaaaatcaattgcaacacatctaagaatcaagatactaacaccaacagacggtatgaacaagagaaaagtagtcaggcatcttcattttttcagtcaacatctatattttgatatgaaaaaaataaaactcacaaggatttgctttggcaagtttggcaacatattttttttgggtgaaacgtaaaggttgagaagtattcaaaatgttgttcgagagaaatccatcatccacttcacttttaaaagcaaaacagaaatcatacatttgcgagcaggttctaaattctacaattatacctagtttcatatatacagccgaccatggtaaaaataccaccagattatttatcctctaattccattgagccattcaattcaatactttccttttaaaaaataaaaatgtacattccctacgagccaagaaagaaaaacaaaagcaatccaacccataacttgcatcgattttcttcaaagagggaaccaaaaaaattcagaaagcctggaatatataaaaaccaatcaaagagactcaaacctaagccatcaaaaaaaaatcatttcttttgattggcctatcgcctgtactgaaaagataacgaaattgaaaatcgataaaactacttcaaatgaatccgtcttacgccctaaaagacttcaataactcagacatcactaaatttcaatctcaaatcacaaacattgtcacttcaaacattgataaaccgaacaatcaagactctaattcaccaaattcctagaaagctcccatggatctttgaatccaaatcactcatcgactatatgtgagagcaatcccaaataagcatattaaatacaaacataagccccaagctttatagtgagagagaaagagaggaaactagcgatctggatgtgaacgtaccgttttctcagaggaggataagtccgaaaactggccggcaaagagatctaggtccggcggggactccggcgaaggcgtataagtttgggtcggttgaatctactgtgggccgtgtaagagagtgaaaatgcaagagaagagagaagtagagaagtttcacagcgaaacgcgccggatctatatctctatcacgtgacaagcacgtgaagcactgctgccttttacagtttcctttcttgcattgtgtccatcatcaagccaattgaccacctccacgtcgcaaagttcattcgtaagattctttctctctaaaaaagaaaagaaaaatatacataaaaatcaaaaatttaaaaaaaaaaattacaaaaatacttaactgttgttgttttttttcttttttttgaaagaaacgtgcattaattaactaattagatctcgcggtcattacaaaataagtcaaatggcaaaaaatcaacaagcaaacaaccaaatcgattgtgagaaaaagcatatttagccacattatgggcaacaaaattactggttctaggaatacaagtaaaaatacaaccatcaaaacatctagagagatccaagcaagaaaaaaagcaattatcaatctttcaacacgactccacgtagttgagagagtttatcaccactctcgagtcactctccatgatgatgaatctctggcctttgagctttgcagactctagggcaaaacaaaaagttgtcgcctcaccacacagcgcattcgcgaaatctaatctagccgtaaacacccagaccaccttgctcaagtggtccctagcgaccaccgcagcgcacgaactgtccaaaccaactctaacatcacaatttagcttgagtcaatcctagggaggagggctccagctatcccttgaaataggggtcacaacaggtaaaagagcgagtttcaaatctgcaaaggaacataggatagtgtcaatacatttagtcacattaggcacatgttagactttttatttgggcttacattaaatcttattggttttattaaaacttgggttgattggatagttc

SEQ ID NO: 16204 - DNA, 2009 bp, Cannabis sativa
aaagcttatttgagtattgatttcttgacataatgaattactttcattagcttttgttcttttttttttcttcttctgtcatgattattcaagtaaatgtatatttgttatggctaaattattgtctatttttctaacaagtagcttaaggtatatcaaatgaagacagacataaagcgtagctggaatcatgtggcatcattaccacatacaacaatggtcttgttttgagcttaatcaatattattggacagtttcactaacctgacttccatggcttcttgagaaaattttgaaatatgcatctggatatttccaagaccttaacttaataccttattactcttcaattacagcagtaccaaagtgaagttgattaataaaacaacaaaacataaagaacttcagtgatagtgtttatggatggattaacatgaaaagcacacacgttactcaaagttgttaatgtaaaataaaaaatgaaactgggcattgaagactgcatgtgcaagactcagagtctgactcagaggacaagcaattaacggttatagcatgtgggctatgaagaaataaagtaaccacatttatggcaggatttggtgcaggtgtgcctatacatggcaatgatggcattgccattttagcttttgcaaaatgacagaaaacaaaaacacaatcaacttgaattaacaattgtcaactaatttgctttatcagatgacaacaagtggatgtagaagagaagaagtaggatagagtgaagtgtatggtaaaatgtacaaagttctatttcagaattaattggcagttaatggagtaattcatgcatgttttatatgataattcatgagactctctaataatgattgcccacgatacaagaaaataattcatcattttaatactcctatcctgtccttgattcagaaactttagctgcagcattgaaagataaaaacctggttgtatagcttccactccactctttgctttctctagaatctgaaaataaatgtacaggtgccaatgtatgcaaaagtcattggtgatatgactaaaaacctgataagagagacagataaaagagaaggaaaaagcttatgcaatttaagcagagaaaaactatttctttgtactcaaggtgtggagtgcaggttccattccattcaaaaccaaaccaaaccaaaccattgctttgctttattatattcactgttgcctgaccttcataaataacatgcagagaaagattttttttttttttttttatctttatgaattttactctgctacttttacagaaacactatccaaggaatcatatagaggaagaagaaatggcggtgtggcagtaaacactaggccccttctgttccaattatgaattgtgatccccaactgccacaacaagaagaaatttttcaatccattcaacaagtaactaaaatttctatcatcattctaatctaaagaagctcaaagataacaccacttgacattagagcctaaaatagaacaacactgacaagataacaccactagactcaattgttttcttgcacatattaatatattataagaaaatttacatctacaaccttaaaatacatctcatttacatgaatgatgtgacttttaaaattatcaaaattactgtagtatatgtagtgttttcattttcattttttttttttttggttcacacgttgcagttgtatcaattctcaatgcttgtattaattctcttgccccagacgcccaactttctttttgttaactttacatatgtgtaatatatatttagttttaaaaagttttctctttcctcatttttttatatgtaaaaagattggtttggctatactaattaattgtttgatcttaagagatattactgcgatctactatttaaaggatcattttaatatgtgaatatttatatatatctttatatattaaaagtgtctggcatttcttggtttaacattcttggtttaacagaatat

SEQ ID NO: 16205 - DNA, 5903 bp, Cannabis sativa
tatgatgagctgttcttaaaatgggattattttaaaaatatttttaaataataaaaattttacatattttatagaattctgaatttttttttttatatttttatagatattcttcttataaaaagtattcatagtgtgaaaatatgatataatattgcgataatatgaaaataacattaaaacaatacaaaattataaaaatgtaaataaaaataatttgtaaaaatataacaaaaaaaaaaaaaaatctattttcagttgtattatgatttccatttcaaaatatgtggtgtgttacccaattttgaagtccatgctcttccattaataataaaataaataaataaaaggtccatatacatatactgatcaaacctattatatattgaagagggctctctactctctagtgtatgcaactcttttggcgccacaattttggcgggaaaatcagaaaggaaggaaagaagaagaaagaaaaagctcctaaaagtcgcagccatggcggacgagcaagacgcagggcagcaacaggtggaggaggagtacagtgtgtggaagaagaactctccgttcttgtacgatctcatcatctctaaccctcttgaatggccatctctcacagttcattggtccccttcgtccccacgaccccacaaaaccgacccatctctcgccgcccacaaacttgttcttgggactcacacttccgagggcatccccaactttcttttggtcgccgatgtttttctcccgaccaatatcaaggacaatgtttttgacgttaacgacgccaactccattattcccaaggtgcgttttttttcccctgttgtcattgttttgttttcatgtaatggatttgcaattgtaaggaaggaactactttctttctttattattattaaaaaaggaatagcatggaatggtatggtatcaactgtttgtggaaatgtctcagtggatttcaaaatatacatgttttcttttgtgtaggtggagataactcagaagatacaagttgatggagaggtgaataaagcacgatttatgccgcaaaaaccgtctattattggcgcgaagacgagtggttctgaggtggttgtgtttgattgtaccaaacaggaattgaaacccgaagggggtgactttgatcctgatttgaggttaaggggtcacgacaaagaagggtatgggttatcttggaaccccaataaggagggttacatattgagtggttcccacgattgtaagatatgtttatgggatgtgtctgctgtagctgaagacaaagtgcttgatccactgcatgtttatacggtaggtaatctagggaatctaacattggatattagttgccgtgacatttgttaatcatgactcttgtaaatttttcttcagggtcacgaaagtgtggttggagatgtctcatggcatttgaagaatggtaatttatttgggtcagttggcgatgactgtaaattgatcatatgggacttgcgcacaaatcagagccagcagactgtcaaagctcacgagaaagaggttacacatatagaaagatataaaaggagataccttacaaatttatatgattcaactttcaaagtgatttttgctatgtcatgttttcctttttgttttgactattaagcatttttatgtgtacaatgtatgggataaggggtcagaaaagtaagatgattattttcaatagataaaacaagaagtactacttataattgatttggggttcacggtaacaaagaaggggaaattcacgtaaaaatctgtattgtgataatccatggattctaccttttcatagtagtgacaatatttttggaaaaattaaatttttatatttttcctcacatttttgttttttgttttgtggatggtctcaggtgaactatctttctttcagtccattcaatgagtggatcttggccacagcatcttcagacacaactgttggtctgtttgatatgcggaagataacagagccattgcatgttttgagtagtcacacgtatgtttgtttgcctcagtcgactctttattattctcctgcatagtttcaattcaaaaccactgagtgtcctgtcttttttatctttatattgacttactgtgttagttttgaatgtcctgttggtctgtttttgagtgtaaggaaaaacaactattactcatgccaatttctttatttccagagaggaggtatttcaggttgaatgggatcctaatcatgaggcagtgttggcatcttcggctgatgacaggaggcttatgatttgggaccttaacaggtacggactatgatattataagctaataccttgcattcaatcgtattcacagagaaatcactgtagacactcgtatctcttctcccctatccttccaactaaatttgtgttatgttgccctcaggattggagatgagcaactggaaggagatggtgatgatgggcctccggagctcttgttctctcatggtggtcatactgcgaagatatcagatttctcttggaacaaagaagagccatgggtcatttcaagtgtagccgacgataatactcttcaagtatggcagcttgctgatagtatatatggtgatgccattgatggctagtccaacgatctcgtctatattgcctttttttttatttggtcacctttggactccagacttgagaatagccttcgttagttattgaaagaataggtctttgcagcatgaacttcgttaaacatatatttgtctctgcaaaatatcgttgtctttttatatttgggtgatttttttgttgtcatgttctagtcatttttgctagcatggttggtgttaaaagattgaatacatagatttcttcagacataaattcgcagttaaaatttactttatcgtattaaagatcactggagcagattatttaaagggcaaaaaaaaattaattttaaatatacacatttgaaaacatatttacataaaattactttttaattatattaaatgtattaatgagtaaaaaaaaaataataaaaaataatttatgagcgtttgcctgtctcttgtgctctgaggcagttaatgttcattatggttttacaattattttattcaaacatgttttacccttagcagtttacaacctagtttttggtagttactctgttttgttttggtgtttcgaacactaccaattgtttccttttgaaattctgtttgtttctatcactctttctctgttgaaaatggatccccttgtaaaatgaaagcgaaaatttccctgactaaagatgaagaagcagtttttgaatttcatgattctgaagctgtctctaaagcatctgttgatctggttctgtatgcaaaggttttgacaaaaaagaaggtttggttatccacattgcggaaccaaatggctgaacactgggatggtagatttcctgtcaaagtatcataatcttcagacatgtttttattaactttcggttgtgagggtgacaaaattagagtccttgatcgtgaaccattccactttcaaaaccatcacattgtgttgcatactccagaagttggtaaaaatttcacttcggaagatctcaaattcactcctttttgggtgcaaatttatcgactaccgttccttagtaaaacacagtccctggctgctgccattggcaacataattggagagtatgttgatgtttttgaagattctttaaatgaaggttggggacccttcttacgaatacgagttaaaattgatgtttccaagcctttaaaaaggggaaggatgatttctttatcgcatattcaggataaattttgggtagatttccgctatgaacggctgcctgagtattgcatggggtgtggtataatcggtcacccttataacaagtgccatgtttatctggtaaaactcgacaatggagtggaacctgaccttgaatatcaaccttacatcaagggatctcctcttccgacttcaagttatgatcgttataggacagatttttctaaaggcaatgcttggcctttgttgactcgtctcgccaaaaaaagttttacttctgctattccccaattgaaccttagaggaatgccccagccacgaaattttcattgtggtgaatcttctcatactactgttgctgatccaaatgtaaacaatattggtggccatatttctttgattaacagaaatcataaccaaggaggttcaatcactattcccaacatgaatcttcaacagccatctgtctcttttgtaccttcacaacttaaccattcatcaatgtgttctcctcaaattgcatgtaacaagactccccacaagactgctgtagcatccacaaaagatcacctaaacaacttcacagatctatctgccatatacaccccgatggtctccacatttcacacaaacaactgtttttccacttacccccattaattaattctgtggatgttcactcaattaataatccattgagttataatcacacttccccctttttgatttcctccacatctgtttccactttggctagtgacacattaaacaaccaggaaaatgtcaatccgaatttgcaatccaaacgacagaatgaaggcatttctctaagacaaactcttaaaaaggtgtcgagccaactcgccaagtgtttcaacttcacccttgtcacttgaagatgaacttcaccaccatgtttctattgactctatggattctgatggtgctttagacaaaaatgcggcggctggtttccagtcccgcaatcagccatgaagttcattagttggaatactcgcggatcggggaacccgagagccattcgcaaactccgtttgcctgtcaaagagcaaacccccaatgtactttttatgatggaaacaaagttagctactaattctatttctcgcattagaaatcttttacattttaatcatggacttgatgtccctggagtaggttttagtggtggtcttatgttactttggaaagatgatgtcgatgtaactttgcaatattttaatacaaatatctttgatggttacatggttgtctctaatggttctaaatgccactttacggatttttatggggatccttctgtagaaaaccgacatacaacttggactcttttgaaaagatttaaagatgttgctcctcttctcccttggatggtcattggtgattataatgagatactttcaaattaagacaaacttgggggtggactgcgtaatgaaaaacaaatggatgatttttgagagacttttgacacctgctctttgcaccagcagccttttgaaggagacaagttcacttggattaagggtataaataatgctaatgctcttaaagagcatttggactggtgtttcaccaatgatcattggaactccacttttaaaccaatgacaacgtctcatttggattactactcatcggatcatagggccatagctgtttgtgtcaattatttctcatcaaactaggaaagacaatctaggaaaacaagattcagatttgaaaaaatctggctgaatgaaccagaagctgcctctatcattcgtgcacattggtcagaattttctaatggtggaacagaccaatttttgaaaaacttgcattcctgtactaatgctttgcaacaatggcatgttagaaagtttggaaatctgaaaaaaaaaaaaaaaagtatttccaaaatgcagcagaatgtttctctgctgaataatgcagcaactaaaaatgattcaacaatgtttgaattgaaaaaaaatctgaagctatcctagatgaattgctcgaacaagaagagacttattggcatcaacgatcaagggtggattggcttcaatgcagtgaccagaagactaa

SEQ ID NO: 16206 - DNA, 8500 bp, Cannabis sativa
atatgtatgtgtatgtgtatatatttctgtagcactataatacttgcaatatcagctttttctgtaagctgatcaactgtttcatcatttacaaccaaccactgccaatagctatattcctatactatgatccaaaagaaatttaagtaaaagaacgaaattgaaaactgtggtatctttgcaaaattaatgggagaaaaaaaaaatagcaacctaagatggatggataaggagatgacttgcattgcaatagatttgaaatacattatgaattcatggagaaccacctctttccattcttagctgtctttagcttcatcaccagttcctcgcgctgagattcaacctcggcgtatttaaggctcatttccaaatagcgctcacgaatgtctcttaattctgcctctagatttgactttatgagttcatacttgtctttgggaactacttccccttctggtgtggactttttaggagcatcttggttctctgacaaaagcctgtgaagtaatagaaacttttattgagaatttgtacacaaaatcttcagaaataagtaaaattttgcatgctttagaagccattagaccctataaaatcaagtaaaaagaaagagaaaagaaatgacattgcccatttgtctttttcaatattcatagaaacactatcaaggaatgaaagaacgaaagtagaccatgtgtagattaacataaggtccctatttttattttttatttttggtattactcacctatcaagctcagatttttgcctgttactttcttctaacgccttagcaagctgatcctcaagtaactgaatctttgagccaaggtcagctccattactttgatggcttccattaggaatttcacatccaccaccgttctacaatgatagttgagacaagataagatagaagtttataaagctagattaaatcattcacaattattccccaaatggtttcacaaatgaatgaaagaaaagaaagcctaacgttgtaaaaccaccaccaagcttttggcttcaggctacactcattgagaagtgcaggttgcaggagactcatagggtattagactaatgattttgactctctaatgtaatgccatatctagagtgatacaaatgcaggtatgagtgaagactctagtttgttatgtagcagactattttgcaacatcagttattgaatcaatgtagaattttcagatgtcctaacctctctttgaacttgtgcgcggtgagaatcctttttaacttcatgtaccaggccattccttctactatcacgacgttggttcccactctttgtcatctcgttctgttaagttcaaacactccaacaagttaatttctataggcttatcatcaaatgtcaaatcttaaacatgaaaataagagtagatttagtacatacctttgagatctttgcagtttcatggactgtatccactttggcatttttcctggaaacattttgagacttgcgactgctgtgctccctctgataatgtttttcttctttcataaatttaatttcttcttcaagggcttcatattttctttgggactcatctctctcttcctgatattgcctgttttcgtgactgatttgatcgagctcttttttcatcccagcatgtaattcatcatgttctaataaagcactttgcatcagcgaaatcttttcctccaatattgagatcttctcaagtaaatcattcttctctgccttcagattcttgcattcctcagatattgtattgacggatgccttaagtttctctttctcaaacttggttgcatcaagttcaatcttgaaagctacaagttcaccctcgagatgagataacttctgcaactgaaccttcagacaggaagattcgtctgccagtttttgtcgttcatgttcagtaactgtaagcctcttttcaagatcatttacactggcctttagttttccttcacctgatttgtagtactctaataactttgatgttttttcatggtcttccatcagcaactcctggttttctttcgaagcagctagctcactagagagacattttaacttcaattcataatctttttgcttgatgctgagctcattctcattttgtttatatttagactgaatttcatggacttcagattccagttttgtgttctcagcgcgcaatctggatagttcccgcatagaatcagaagctatcctttctctttccccgtgaattgcggaaagtttctttaccagatgttccacctcttgctgaagattctctgcttcatttaccttctccatatacatctcatttaacaagctctgttcatgattaaatttctctttgtgcctcaagttttcatcaagaagtgcatctatttctgaagttaggctcttctctttagaggaaatctccaccagcaatgaagacagatattgttccaattcatccacttttctggagcaatttgtgaagcttttatgtgattcctccaactttgcctccaaaagggaacaatagtcctgcaactcccttttttgcttcctcagttctccatttgattttctaaaggaattgcactcttcagtaagtctctcaacagtagaatgtgactttgaattttctcttttcagatattcacattcttcaagagtttcagtcatctgattttgcattcttttaatttcatcttggagtgtcataacatgagatttggaactctgtaaatccaattgactggattcttgctcacctgccaaatactttagttgagcttccagactagttacaagtactgacagctgcacattttctccttcaagctctgataaatgaagctcaatttctcgattaccagtttgaagctctgaagacattctttctagtattttattagcagaagcttgggaatccacactgctggtaattaccaccaaatcatgttgcaaatcgttaaaactcttagaggtgacatcactttcttgtagcctgacttccatgtgttcctgtagctggatgttttctttttgaagttcacaaaccttagcctctaattcactttggcaatttctgagaatcaaaatttccttttctctagacagcaagttcatctgaagtttctccattccagacttctttgcagccaattccatatccatttctgtcaatttactttctaggtccatatccgagcacttaggtacatgaaatgaaaaaccgtcatccttcgctgtctcttcagcatggtttgttttcaattttgggttacttagttggaattcaaatctggtggaaggattagtaaaacactcactgtgttcaaaatcatcagaagtacttctcctattcaaatcattctttgattccttgagcttgaacaagagttccaagttttcttcagtcagctcgttgcagtccctctctaactcctgcacctttcccttcaagacttcaatctcactaatcagatcttcatcacaatcatttgctgatcccatttttgtggaatgtgtgagattgagagactctgataactttgctttcaaactgacaatttcttcttctttatcaagtaacttacgttcatattcggcctcaatatccgtacaggtttcatcgttgagattccttcccttctctatctcttgatttttctcctccaacgcctgttctagcagtttgactttaatgatcaaactcttttcagactcctgcaactggtggagctcatatgttacttttctattttcctctatagcttcttcaatggttttctcagcatcactaaacattgattgtgctgctagtagattttccatctctattttctgtttttcaattgtatcttccagctcctggagaatagaaacgagctcaatgtttgattcatgacttttcttcagctgaagagccagattagcattggattctttttgaaacttcagttcttcttttatttctttttgagtatgaggcaagccttcgtactgaggcaacgaatcctctggcgacatttgtttttccgtcgatctatcaaatgacaatttcagttgctcaacttctttcttcaaatcatcacgttctgcacaggctgctgagagctccatgttcaaattagactgaagttttgattgctcagtaaattctgtcttcaatatatcatagtcaagcattagtttccgggcattcctctcccacatcttagcttctgcacgcagctcctcggtcgtatcttctgcactagttgtcaaagaatatgctggaaactcttgccttgaattcacagagtgatttcccgactccatgatctgtgaattaaaagatgactgcttcaaatggtgactatcagaaggataactgccatgggaaacagagttttcagaactaattgaatcttctctccttatgctgcgcacttcgctatgatctctaagggatatattttcctcatctatggaaccttcaactgagtcatagctttgatgcgactctgatatagaaaaacttgtttcctgcaagccataagcaaatgttgtcatccatggacatgggtttcattattcaaatcatggatgtctacacaactctatattctcaaccaaactaatagatactgcactataaggcattgcttgttgttttaagaatgtaattttaattctcataggtcaataccaatatcttcaatattttaatgatcgaattgaatttctcatagatagtaagcttttataggtgtctccttttccaatgacatactataaaatctcacgagttgtttaaaaatagcacaacataaacagaaagttgttgtgtttctttctcttgtgagatcataggaaaactgctcatgagataaccaggctatgagaaaacaagctaggcacaatattttataggcatgcaatgcgaagaaatatatcggtggtttatatttacgcaaaattgtacctaccatatacatttttaaatatatatatttataaaacacccaaaagctcaaagttatgatgaaatgacaatacaggcaattacgagagttaaatgttatgataccctgctctcaggttctcctggatgagatattaagcggtaatctttggtagaggagctaaaactccttgcatcagatccagatccatccgacttaatgtccacatcatgacaatttccatttgatttctccaaatcaaggtttttctcttttgaataatcatccctggaaagacatatacataaaaaaaaaaatcatagtcacacaaaaagatcagttatcggattaagatctgaggaataccacgaaataatagtaatactagcctggatttaattcgtggtgttaagcactgaatttgtccctgcaaatcagagcaacaaccaaaagaatgatatttctaaatagctgctttatgaatttcttgtgtaatcagagaaacggaacatgaaaaaaaaaatagtaatattactaacaataatagcaataacacatatgacattatgatgatatcattttcacacttgacaaacaccttagaataaatttcatatacatgtaaatattgcattgctgtttcttaaagtattcataattgaacttgaaagtgaacaaataaatcgagattggatagttcatcctaacaagaacaaatagaccaaaatgaacagaattttggtgataaggaaatatggtggtttaagccagacatctttcaatgtgtgaactcgaatttgtatcttgagaacagtgttcgcaataatactttctcaaacttgaagaagacaacttgagaatctatgggtgtggtcttatttctaaatgaagcataacatgtaaacagtcacaataagaaaaggacagagcaaaatgttttcagagtctagcattttcccagaagcttcttagttgattgtatttaatcaaaggcctttccaagctaccaaaagaatataaactcgatttttttaatgcaaataccaatttggagcagcgtgttggtgtaaacttacttgtaaaattgttccataactgcactttttgagtaaaagagagactggtacagaagcagttgtactagtataatttgtcatattaagtgtagcctcaccaaggattccagatctagccgatccctgtttaaacattcatcaaaaattgttgatcttagcaacaccatcgaatcaaactataagaaataaagttgtaaagttggtaaggaaaaataaacttaacaaaactacatttgctaatcaatcaaaataataacaaaattattcaaaattattcatcttagcctattagtggatccaacaaactaaaagaaagttgtatattgtaattgaaaacaatattatattttctagaattctaatcaaactaaactacattaagcaaacataaaggaccctataaccgtcaaacaaagtaaacacaagaaaacgtaatgacataccatggaaacaataaacttgtagagacaatcctccatcacttttgaagaatcatcttccgaaacccgaatagattctgaaagagtttcattccattgacaacttccatttcgcaccagggctttgctcgtttttgaaactgtttttccagtttctacagagacaacagacacaaccagcttgtcccatcctttgggaacctgaggccacaaatgtaatcgaacaattcagtatccccattgatccaattacaactggccgatttagaacagtactcaatctttatattttcctcataatcattaatatcggtcaaaatcccccaatacaaatcacctttcatttgtaatgaaaaagcccaataaatcataaggtacattgccataaatcggaaaaaacatctcatctaaataaagtgtaacatctcattcatataataaacccaaacttattataaatactttcactttcaagaaaggaatagcgaatacctgaagggccttgaaactggagaatttaaagtcaattttagtccctgatttaggtggctgcctgtgcctatgtaatctcaacatttcttttttctacctcttcttcctcttctgttgctgtcttcctttcacgtctccgcccaaattttctttctcaattacccacttctcacaaaccgaacagcctcattttcttcacaaccaaacactaccaaccaaagaaaagggagagaacgaggggcaaagaaacacagaatgacacttctcaacattgatcgatacaaacaacatttttagagagagagttagctagctggtcattgttgggaatggtgttattttattttcctacattccttagagtttgagagagagagaaagagtgagtagtgaatcaattcaaagtcgtttgctgttaaatatatataaatataattataataaatatatattacgctagacgtgtggtgcatggagaaggccgtgggagtactctacgatctaaaagtcaactcataaattggtgtgagattgacctgactcgattcttattggttggagagtggcgagagtcaacgagcgtaaacaagactcttatttagcgccgcacgatattacaattcggacgtacctgtgagtgcgtgagtgactgataagaaagatagaaacaaagaaacagaacgcaaaaagtactcctttcatttctttctgaattgtgaattgtgatcattattattattaaatattaggagaatatttctgataacacccaataagttatatatagatataattaaataaggggattaagactcatccattatatgtcctttttcgcagatgaattacataacgtaaacgcaaatataattattatagcatcagtatcttatattgtgggtcctttttaccatgagattgtagtatagtgtgtgattatattgtattgtcttgtaatatatattttttttttcttttttaagtaaattctgaagttttattaatttgcaaactcagtcaaaatgaaccaagactaaaattcagtagaaacagtcttctcactgaaaatttaatctaaaaatgaacatttattaaaaaacaaagacacattgtttaaagaattaagtaaaaaccaacactcatcaacaatcaatccaaaaagagaaagattggaactaaggatgcacacggggcggagaattggcggggagtgctccccttatcgccatcctcgttaaagattttaattctcattcccgcttattctccataagagatgaggcagggactcccttaatggaggcaggaacgggccgaaaaatcccttaataaaaaaaattaaaatttataataaaaatttaaatataaaaaaatattaacctacataaaaattaaaatattacacattacttattattcaataaactaataattatcgaaaacaaaaattaaaattcataaaatggatagtaatatactaaaaaatacaaacataaattataaattataaaatattactagaaatataaaataaaatactaaatgggtccccgt

SEQ ID NO: 16207 - DNA, 13404 bp, Cannabis sativa
agaagaagaaacgcggaaaagaagaaatgtagagaagagaagaggtgaaggggaaggtgatcccaagtgtggattggaggaagatgataatggtgagttagctttcagcttcaattcaaccctcatcataatttatgtataaatcttccattacccaattcccaaccacctcaacccatcatgacgaagaagccattgccaaccctttcttcttcttcttcttcttttccttggctcttactcctcattttcctcctcttctccggcttcgcaaccagcttcaacggcggccaaatagtctctgtatggcagcatcaccatgatttcaagtctcccgccaccagatcactcatgtcctttcaatcgccgtcggtattccttttctttgttgttttcacatacaaaccctctatactttctctctttctttaatgttaattatgaatttgaaattgaaacagtgaacacgagcttgaggatgaggatgagcatgggacggctttaaaggctgctcttgatgggaaaattcacttggtgtggaagaacagtaacagagtaatctggtctttctcttcaggaccaccaatttatacttcttaccaggctcctccttcccaacatgctaccaccacggttcgtaatcaaaataacttccatattgaatgtggggatgattggaacttgtatgcacaccatcaaacacttggaatacatgtatgtatattatgtcttccctcttctttcaaaattcaaactttatatattttttttttctttaatttaattccttaaaactaaaaaaacttgtagaatttatcgataagtatagaagatttcataaaagggactccttacacattagaggatggagcagttacagttgggtccaagaagactactgtgtttgaggttgatcttagaactggaaaactcattcacacgtatccatcatcatcatcatcatcatcatcctcattgagcccagcagctcaacatcatcctgtgaagcttatgcgtctgcaaatcatgaggacagactatacactcaagtcatttgttccaagctcccacaaagaatcctggaatatgactgttgcagagattggagctgctttactttgtccggatgttgatcaaccagttggtgaatctcttctcactttgaaagttaagaacagtcatgaaatcatcagtgatattgccttgccactacgatgtcaaactaaagtacctgttttccgctacaaaaatcatgtgttgtttgaatttcccagcattgaaatgctaccaggaaaggcagtgctcccagaacatgcttcaagaccaatgcttcgtgaacaaaccaatgatgatggtgattattcaagtctagaagatgagcatgatagtatattaagtaagagtaacttatttgattggtcaactgcgttgtctcttgctttgtttattggtatagtagtgggcatagttatctaccaccacgctccaatgattataggaaaggtttggttgtttaatgagcagactagaaattcaaattctagagcttcaccttccaagagaaagaaatctaggaaatcggaaaagggcaagaaagaattgtctgaaaatggagatgatagtgaggacgtatcaggcttagacctaaataaacttttcgactgcggtgctgatgggcgaaggattggtaaacttattgtttcaaataaagaaattgctaagggtagcaatggaactgttgtgcttgagggaatgtatgaaggtcgctccgttgctgtgaaacgccttgtccgagctcatcatgatgcagctgttaaagaaattcaaaatcttatagcatctgacagacatccaaatattgtgagatggtatggggtagaatgtgatcaagattttgtttatctttctctggagcgttgtacttgttccttggatgatttggttcagatatacttaaattcttctcagaattcagcatccaccagcgaccatgctatgggatctacaactgattataatgtccacttggagtcagtgaagaatatcatgccggatgttattttacggaaaccaaatggctatccatcgcctttatcactgaagttgatgaggtttgttcaggacagtttattgctctttaaatttgaagagaattgagtctcaagtgtcaatttttgtggttttttttattaatgtttttgcatagacattattgctggatggcaactattgccacatatatagcaatgttcatggaatggttcagtagcatattatagaaatataattgatttatcattgacaaagccttagggatggtaaaactgcctctgaaactagtttggatacaattttgaagtaatgatttttttttagttgtgtagctattatctgttacctttgtagttagattttcttttatctgataagcttttattattgcagggatatggtttctggacttgtgcatttgcatcaactggggataattcaccgggatctaaagcctcaaaatgttttgatagttaacgaaatatctttatgtgcaaagctttctgatatggggataagcaaacgccttgatgggaatatgtcttccttggctcctcacgctactggcaagtacctccaatattcttttaactcttaaaacagtaccaaagttaggatcgcttatccaagtatataggtttatacattgagaaaaactagttagaatgtgcatcaaattgtagtataactctctttggtctcatatgtttgttcggacttaattgtaggttgtggcagttctggctggcaagcacccgagcagcttcttcaggagcagcgacaaacacgagcagtggatttgttcagtttaggttgtgttctgtttttctgcattactggcggtaagcatccatttggagaaagtctgaagcgtgatatgaatattgtggaaaataagatggaccttatcttggttgagtctatgccggaagcttttgaccttatttctcgtctattgagcgcaaaccctgaattgaggtaataatatacttcccttcaaattaagagaggtgtagaacagtgcattgcttaatagttccattactaaaatgctgtctggagtagaagtttgtatcacttttggaacaacttagttaggatttgtatcttatacatgaacttagtagcaaaatgaaattttcacattgaacatacttaatttgttatgattattttctctctttgatgaaaaatcttcttatacttgctaggccaaaggcatcggaggtgttacaccatcctttattctggaattccgaaaagaggctttcgtttcttcgtgacactagtgatagggttgaactagaagatagaaagcctgagtctgctcttttgaaagaactagaaagtattgcacccatagcattgggtgggaaatggaatgtaaagatggacaaagaatttatgatgaatattggccaatacaggcgttataagtttgacagtattcgagacttgctgagagtgatgcgaaacaagttgaatcattatagggagcttccaaaagaaattcaggtttataatgttttttgctcttttcaatatcatatttaagcaacttcagttatgtaatccattttctttttcttcaggaacttttgggatcagtacccgatggttacaacgactactttggaagtcggtttccaagacttttgaccgaagtatacaaagttataagcaggaactgtaaagaagagaaatgttttcagcaatatttcgagacaaaagttgagtaattccattccattgaccccttgaaaacttggaaagtgaacaatggcagaaattgtggtgggaaatatatgttactataaaaaaaagtgtgatgaaatcattgagcaaacttgtaaaattttgtacatacacataacctcttatctcaagtaatgtaatcaatcttaattaactaactctttatattcaatagaaggatttatttattacagatgaaatgtgttctagttgtatgagggatggccttgcttttctttttcaccaattaacaggacagatttattatagccagatcattacagtaaacatataagatatgtactaatagatattgaaatattctatacgtatatataaaattgatgatcatgcaaattatgcataacaacgttatctccatcatcatttcgcttagcaagtaatacgcatgtacatttacatataggggtggtacattatgtactctaatgtcttcattaaatgaaaaattaaaaagtaatatcacatgggaaagaagtagagattaatcaaaggaatccaaatccaatcataatatgaattaaagaattaactaattgaaaggtcaactactctgaattagatggtacacgtgtcattaccccatcactcttacaacctattctctttccactccaaacgctcctccctttccttttcccttctcctactcgcttggtctctctctcttttcttttcttcttcatcctcttcaatcttcaatcttcaatctttcatttcatgaaaaaaaaaaacaaaaatgaagaacctttttggttaataaaaccagcagagtaaaggggtcatcttattctttctttctttcttaatatatatataattataatatgacaagttgtgtgtgtatggaggactgatatgatgatggagattactacaaccactactcacgaggaggatcctaatgctaataatgctaatggtggtgattctttagagacgagtaatcacagcagccaaatcaataacagtagtagtggcaaacccccaagaaacctctcccttatgcgccattgcaccagctctgcatttttgcctgattctgtacctaacattaccatatatacattatatatattatccccttgttgagcttctttctttttgtttatgatgttattgatgtcattcattttttggtaatgtaggaatatgatgtggctagctttggattcaaatcaccatctgaggagaaatcaaagtttctgcctatattccgatctggtagctgttctgagaaaggaccaaaacagtacatggaagatgagtatatctgtgtagacaacctctctcaacatcttcctccaccacattccttcccttctccagccgcattttatggggtcactcactctctctctctctcaatctctacatatatggaaggactatttctcattgagataagatgtaataatatatgttgttgatacaaaacaaacaggtatttgatgggcatgggggtatagatgcagcctcattcaccagaaagaacatccttaacttcatagcagaggattcccaattcccaaatggactcaaaaagtcagtgaagaatgcttttgtgaaagtggaccatgcacttgcagattccagctctcttgatacttcctctggtaccactgccttaacagcccttattttgggcaggtgatcagttactgatcaacttcattcatataataataataatcttaaatgtatatatgtatacattgcttgcttacatatatatgtataaaatgcaggaccatgctgatagcaaatgcaggggactgtagagctgtgttgggcaaaagaggaagagcaatagaactttctaaagaccacaaacccaaccgcacatcagaaagactcagaatcgaaaagcttggaggaatcatctacgacggatacctgaatggccagctctcagtggcgcgcgcccttggggattggcatatcaaaggctctaaaggatcattgtgccctttgagctcagagcccgaattggaagagttgttgctgtcagaagaagatgagtacttgataatggggtgtgatggtttgtgggatgtgatgagtagccagtgtgctgtgacaatggtgaggaaggagttgatgcaacataatgaccccgagaagtgttctagagcgcttgtcaaggaggcgctgcagcgcaacagttgtgacaatcttacagtggttgtggtgtgcttctgccctgatccaccccctaagattgaaattccaaggtctcacaggaggaggagtatatcagctgaaggcttggatcttctcaagggttgcttgaacaattctgtatgaaaaatgaaactatatctttacaaaacatttggttttggtgtacatgatgaggctttgatctgctaggacaatttctattcttcttttttcttttcttttcatttgctcctgttgttgttgttgttttctatttattgagtgatcatatatatatgtgatcactcctgtggactagtagacattgctaataataattgtttgtaatcatacatctaaagcaaaaggcaatctaaattttgttctaagagtaaaatatttgctcaactttgtttttttccttcccctctttgtggttttggtgctttgctgaaaataacaagataagggcaaacaagtcacaagaagaaaccttgtgttgtcttcttatatatatgttggaagttctcacaagtcacaaggcttcccttccttccaagatttctcttttgaaaagtgataaaaagagagtttgttttgcatttggtgcttttgtcttgtgcgtatctcaagtctcaacataaaacacccatcacatgttttccattgcaagtagataagttgcttatatatatatatatatagttcttccagatatttctttgggatcatgtcctatcttcaaattggggcctgttcttttctctaaatttcaatgcgaggagtcgacgatgtttggaaaacaaatgaatgcgacaccttcaccttcaccttcaccgacactgatattgacttcaacccaattgctcaaatttctaacctttgctttgcaaaataatttataatctcaaaaagaaaaaaaaaaaaaaaaggaaactgttgtgcatgtgtagtttcaatgtttttggactttattaggcgagatgggtttgcatgcattgcaatgcaagtggtttttaaagtaaaaaaaaggagaagattttattggttttttaagtaaaaaatgagaagatttgattggttttttaggtacagctttctttttttaaaaaaaaaaaataagcgtattaccattaaataaacaaactagacctcatggtcggtcattacataataggtacagctttcttaaatatggtgagatgagattagctactccaacacggggccctccccctgtccctgtccctgtccatgtccattgcccaagatgccaatttggatttgacttgttatttttagaccaaaaagacaccatttttatttccttctacctattcctttgcagctttgctaatgttatctacaatcttcttcttctgaatcgaaaagctcaaaacttgttttcattcaaaccttagaaagtaataataataatcatggtggtatttgataagggagcaagctcttccacttcatctctacccagagaagacaccccacttctgggcaagcctcgtcgtctctcctcccaattcaagaccttcgccaacgtcttcatcgccatagtcggctccggcgtcctcggcttaccttacgccttcagaaaaacaggatgggtcttcggcgctctcgtcctcttctccgtcgccttccttacctaccactgcatgatgctcctcatcgccacgcgccgccggctcgattcccttctgggctactccaaaatcgcatctttcggcgatctaggctacgccgtctgcggtccacccggtagattatccgtcgacatcatgctcgtcctagctcaagctgggttctgcgttagctacctcatcttcatctccaataccctagctttcctcttcaattaccaatttttaggtctgggtgtgtccccaaaatccctctttctctgggcttgtttcccattccaattgggtctgaattcgattccaacccttacccatttggcccctctcagcatttttgccgatgtggttgatctaggcgccatgggggtagtgatggtggaggatgtggtcatctttctaaaccaaaaaccagctttgcaagcatttggggggctttcagttttcttctatggtctaggagtggcagtctacgcttttgaaggtattggaatgatattaccattggaatctgaaaccaaagacaaagccaaatttgggaaagtgttgggactatgcatggcattcattgctctgttgtacgggtcatttggtgtgttgggttactttgcttttggtgatgaaaccagggacataatcaccaccaattttggtcaggggcttgtgagcacactggtgcagcttggtctgtgtgtgaacctgttctttaccttaccactgatgatgaacccggtttatgaagtgatggagagaaggttctgtgattccacctattgcttgtggctgagatggggactggttttggtggtgagcttggtggctttgtatgtgcctaattttgctgatttcctatctctggtgggaagcagtgtgtgtgttgttctggggtttgtgttgcctgctttattccacttgattgtattcaaaagagagttgggttgggttggtgtggtcttggatggcttcattgtggctattggactcattattggagtcactggaacttggtcctctctcttgcatatacttgcccccactgaatgaatcctgatcaaatgcagtctctttactttgagagctatctgttttgaaattgagtcaaaagaatcacaatgaaaagaaaagggttgtcttgaaatgctgtgtggtgtactagttcttttctgcaaagtgtccattattatgcttcttttttatagacaagcaagcaagtgattgagtgagtgagtagttttgtacattttacttttttacattccattccaaagcataaattaatgcttagtagttaagtttagttttaagttattttgagttagattttactttttgtgattggttggttgaatgggatatagaataagggaagttatcttgtccattatcttatcagttagatttttgaaatgtaaagttaaagctctttcatttgattatgattatgattatgatattatgattgtgattatgattacaaactaacaaacaaagatgcaatagcccaatgtaggagaagattatatgataatatataatatatattatagtatagctgagcaggtatggtaaggtggtggaagttatccataaaaaatattagaataatcacattaatatataatatgttgtgttgtccttcacctaatgaaagaatgaagcatccaaaccgaaagaaaatgatctttaaaggccacaatagccccatcatcttctaccttaccttgttctctatctaatatggcctttccatattgcacactattatattacacccattagtcatacatacataccaataataataatgaatacataaaaaagtaaaaagtaagaatggaatggaatggagtggagtggagggagaaagaggtaaatatatataaggaaatgaatatgagccaccttggaaagcaaaagccaaccaaaattaatgtattaaccataaaatgaaaaagaaagagagaaaagtggagaaattaaagagaggctttgtgttgaaggctacaaattaattaccatttacaaacacaaaaaccaaaccaaacatttttcatgcccttttgtttttacattaaattattttttaaatattttgttttaaaaaagaaaaggttattagcttgaatttttttagtatatgagaaaatatgtgaaatagttaaaactagaaatcaattttccatttcagaaagaaacttcctttccctttctctttcattttctctctctttctctttcgacgatcaacaatcagagaagatcaggtgtgtttcagagagatgtcttgttcatcttcatcagggtccgatgacgacgacgagggcattgactcttacagaaaaggaggctatcacgccgtcagagtcggcgatcaatttaacggcggccgctatgttgctcagcgaaagctaggttggggtcagttttccaccgtctggctcgcctacgataccacctcctctgtactcctctctccttctctctctgttttgtttatttgtttaatcatttccttgatcaaagttctcaacttcatcttctttttttttaattatttcattaatggatgctaactggtaaaccgttgttcgttattggggttttccattttggaacttcctttatatatcatgagtggatccattcaacaaattcaacgattattattattattattattatcttcatacatacttgtggattattatttgaatagccctgaaatttagattgaaaacttattagggatcgattcgatggataaactaatatatatggatcttagctgttcaatctaaatcctatttgcttctgaaagactcaaactttaagcctttttccgaaaatcatctgttaattcaagtttttagatccttgatcttcattattatacgtttctgttttgtagtgacttgaattttctacgtgcatgcacgtgaaactgatccttgaaggaaaatacttaaaactttaggagcatttcttgttgaatctgaatctagtattgattgaatttttttggttaatgtttttttagagctatgttgctcttaagatccagaaaagtgcagcacaatttgctcaagctgctcttcatgagattgaactcctttctgccattgctaagggtgacccttcaaattctaaatgtattgttagacttatcgatcatttcaagcatgcaggcccaaatggtcagcacctttgtatggtcctggaatttcttggagatagcttactccgcctaatcaagtacaaccgttacaaaggcatggaactgaataaagttagagagatttgcagatgcatattgataggccttgattacttgcatagagaacttggtataatccactctgatctgaaaccagaaaacattcttctattcaacaccattgatccttccaaagacccaattagatctggtcactctcccattattgaaaagccggagggaaacccgaatggaggagttaccatgaatattattgagaagaagttgaaaaggagagctaggagggcagttgccaagatatctgaaaggagagcttctatgggaggacaagctccaaaatctgagaaaactatggatgggattgatgtaaggtgcaaggttgtggactttggaaatgcttgttgggctgacaagcagttcatggatgagattcagacgaggcagtatagggctcctgaagttattctgcaatctggatattccttctcagttgatatgtggtcatttgcttgtactgcttttgaacttgctaccggcgacatgttatttgctccaaaagatggacaaggctttagtgaggacgaggtacggattgctttctctaccttcatacttaagatcttcaacctataaaacattttctatagactaaatatgcagcaatttggtgttttgaaatggtttgtaatcattgttagtttatgatgttcgttactagtgttagctaattcctaaagcaatgatttttcaacatgataaatttgaatcattgccactttctgatcttcctttgtgaaatttgtattaagctgttgtcatttatatacttatttatccgaactgcatgtcaccatattttgatttaagcatgttcatggttgaaaaaaaaagatcttattgtatgtgcataaatattctcatcatccatagtcaccattgaactttactgtgatgatttcaggatcaccttgctcttatgatggaacttcttggaaagatccctcggaaggtattcttcccctccctttgttgttgttactactttcattctgtcattggtgattatcacctcaagtggagtggttggctgtgtgagtatgtatatattattgtttggtgtatcacatgcttgcatttgcaggtagctatcggaggagctcgctcgaaggatctgtttgatagacacggtgatctaaagcgaattcggagactaaaatattggtcactggataaactgttgattgaaaaatacagattttcagagagtgaagccagagagtttgcagagtttctttgtccagttctcgattttgcaccagagaagcgaccaagtgcgcagcagtgcctgcaacatccatggattaatgcaagcagttcaggtcagagtgcaagtaagaaggaagcaactgtggaaaaggtgaatgtcgggatgagcaagcttcagcttaaggtgggcaagtgaagaagaagcagaagaagggatgagaaggatgtaggtggtggtgcagtccctgccctctccttcctccaccttcactctagtctactctatatcacattattgattgattgtgttctattttttgtttgttacacactgctaataagatttattttttgattaactataaaagatgtaaattagtattgatttttgtggggaatgatatcagaaaaagagaattttgactatctgttctatgatactataagagagaaaagtgaaaaccagacagacaacacaaccagttttccacatgctattccactcacctttcttcagtgccactgctattttaattattaattattaattattgcatcacaggcacactgcttttactttttattttgtgaaacaaaaaatgaaggaaaagttatggtggtggtgtggtggcttcaccatcacagacactatgaaatgaaatgaaatgaaatactgtaaaaaataataaaaatataaatatggacacactccatgatttcaaaccaattgttggatccaggaaatatgtaagtataaggagcacgtggccaactttaaagttggctttttcataaaattaaggaaaagaaaaatcaaactttgggattagtaactagttcaggttgatccaaaatccaaggctcagctgttgtgtcaaattattaaggacaaccaatgaaaacagtgtaagtgatgttttgttctaaattattgcacagaatccaaccaaaccaacttacgtttaagaaactaactgtgcatgtaaaactgctgatttatttaactgtttattcaattaatggtaaaatattattattttaagatgtatgtaataatgtaaggccaaatgtgaccaatgacataatcaatttaagaaacaaacaaaataaaatagaaaactgaaaacaatccattaaagtaggagtaggagtagggtacatggggtcttctctagttctcttgtttctttatgagatttttacacctcatgtcaaaattgacatcttttttacatttttatcaatacacggttttttaaa

SEQ ID NO: 16208 - DNA, 4243 bp, Cannabis sativa
ggaaggaaatgtgatgtttataccaatttttgttgtgcaggaattaagaatttggtaaaacttaagctcaactttttcatttgttctgatttcccaaaatttacttggcatgggagttgtgacagtttctagctctgcttctcgaacccccctaggattaagcacaaaattctcaagtcatggattcgcacccaagaagcccttgattgtggcatttaaagctgataagcctaataaaactacgttggtttcttctcacgaaccaataattttgcccattgaaccacacaaggagattcagaacagagtaaggaaagctaaaaaaactaaaaatcgagtgaaagctacagctaccgatgaagtttctactagtaccatggaagtggattacaatgaggctgcggccaagctggaaaacatttacaagcttagccctgcaacaaccgatacagatgtggatgcggatggtgctgatcgcttgatgagtagaggccgaagaaggaagagaaaggttagtgaaagtgatggaaaaacaggtaagaacaccagtgatactgtggttagaaaccgttcaaggaaggagagaatgagtcttgatagtaggattgcattgaaaagggctaaggaagagaatgaggttgtttcaattaaaaagaggaaaaacagttggaaaggaaagaataatgctgagaaagttgttgtttcagtaagaaatagaaaagttgctgagactgaagatgagaagattcagaagcttgttagggagtattcgacttcaactgatttggtcagcttggattggaagaaaatgaagataccgccagttcttccttctacggagcatacttggttgttcaagttaatgcagcctctaaaggtaaggctttaataaggatatgaaaaatatgagatgaactgatgaagtattcctcttgtgtcgatttttttgagtatgcctagttttggctgctaataattacgtttctcaattcaggaactcctcaaagtgcaagagaatttgcaaactgctatggggagagagccaactgaaggcgaaatagctgaagcaactaatatgagtgtggttgaggttaaaaaacaattggaaattggctgggctgcacgaaacaaactcattaaggtcagcaagacattatgttgtgctccttgccttctaccataaaggcatcttgaatctatgccttgtacattttacctctttcaattatcatgagtttatgctgccatggcagtttagttggaaaggaaattgactgatgattgttgtctctgtttccagcacaatcttcgacttgtattgtttgtaatgaacaaatattttcaagactttgcaaatggtccaaaatttcaggacctttgtcaggctggagttaagggactaattacagcaattgatcgcttcgaaccaaaaagaaaattccggctttccacttatggtcttttctggattaggcatgccatcatacgttccatgacagtctcaagctttacccgtgtttcatttggcctcgaatctgtaagaccttttcctatctaagctagacttttttcttgttagaaagtctcacattgacaatatgcgggaacctcatacatcttagcatttattgttaatatgcatgaactacttcatttattgtcaattgattttgaaatgaaatcccatatatcttagcatacaccattttacatcacattgtttagaataaaaatagctaaaacgcctcttattagaatagtctattctactttctcaaccacactgttttaggggaaactgcaaatttgttgtactttaagttgagaagaaattaggcaaaagaatgcttatcaaacataatgaaaacactctcacggtccttctcattcaatttatgtaggtaagggtagaaattcagaaggccaagcttcagttgatgtttgagcttaacagattaccaacagaaaaagaaatagttgagagggttggcatttcacccgagaggtacaacgaagtaatgaaagcctcgaaacctgtttactctcttcattcaaagcatgcagttacacaagaagaattcatcaacagtattactgatgtcgaaggtgtggaaggtgatgaccgacgaaaaccagctcttctcaggcttgctcttgatgatgtggtaattacttaaattatgttctataactaagcatagaaaatgaatgagctaagcattgtatcttgatttggtgaatgctttcaaatcctgtctttcagcttgattctctaaagcctaaggagagtttggtggtgagacagaggtatggattagacggtaaaggcgatagaacactaggcgaaattgctggaaacttgaacatttcaagagaaatggttaggaagcatgaagtgaaggctctcatgaagctgaagcatccagccagagttgattatctgcgtcgatacatggtctaagcgcagtcccttacattatgtgcctttccaaaccaaaaactataactgtatattgatgtaacatagtatatatagttatagtatatatagttccatgtaaacataaggtcaagaatttgggtaaaaaggaaaaaataaaggaagaagagagattaactagtgaatatagaaattttattataccatgtagttttgagaaggctgttaaactcagattgcataacatggatgtaatataattatttcctctgtatattttattttttatgttatacacacatatatagaaaatctttctttagacagaaacatgtgtgggttctttgtgttaccaaaatgcaactttcttttcgttcaaaatattggatatgtattttttgttatgtcaatatcacaatgatttttgttaaaaaatattaaaatgatttcgtataaagaaaaagaaaaaagaaaaagacaaactcctaatacacacaaacacattaattataatgcaacaaaacagtgttcctctattcatcttcttcatataaattaaagggggtactttctcggatcactaccctacatatttatttgcaatcaaaactaaaaccaacaaagtattttcaaaaaaataaataataagttggattactattcaaagactttatgtagttgttgatctgacaacaaacatgatggtttgagatttaattttgtaatagtttagatttgaattggtagataagaaggaataagtgtttaataggttttgtgataaaatagtgtaatgatgttgatgaacagttggtttagtatataacaattgtttcacttagaagagataattgtatgtagaaagtactttattgatagtttatagctttttggttttggatgttggttacacaatttagaatttttgatgaagtagttatagtcgatcactttacactgtggttagaattatttcttctgtatccttcttttactaaaaagaattgtatccatacacatttacatgtttctagagttcaaattaactactatattctagattaatctaatttagaaatcactaaaaattttaaataattttttctatacatacttgaaatattttagagtaattactattgtaaaaatgtataacaacttttaatgctcctccttagtacacattttggtaacttcaatcatgtatcgtagtaggtcgaatttttctcttggtagcgcctttgtaaaaatatctacaaacttttcttcagtcttacagtgcttgagctctatttctttgttaacttcaacttctccaatgaagtgatacttgatgcttatgtgctttgttttgttgtgaaatatgagatttttcgctttgctatagctgatttgctatcacaatagatatttgtagcttcttcttgtgattctctcatgtcttcaagtattcttttcaatcatatagcttggcttgtagtctttgctgctgcaatatattccacttcaactaatgattgtgcaacagttgcttatttctttgatgcccaaaaaaatatttctcatccaagtgcgaaagcatgtcccgatgtgctcttcatatcgtcaattgatcctgcccaatcactatctgtgtagccaattagttttgagtcacttgtaactctatactatatcgttaacccaaaaactttccctggtgacgtggacatcaatgtttgacacatgataggaaagataatatctcggagttgagcagagtcatagcggtcgaccggtccctgcgcccaagttgactttggg

SEQ ID NO: 16209 - DNA, 3225 bp, Cannabis sativa
attagggtgctagtttgttgttgctagccaaaaggtaatacctttggcttgttttttttagaaattttgttggttttttagttttttaataatgttgagctaatgatatgggttgtgtttaaaattctgagtttgtttatttatttttattttaaagagtgtcatgctaatattactgttttttttggtttgggttgcgatgttttttcagttcctctagctctggcgacaactattaatgttgggaatgtgtttttcaatgtgatagggtattgtttgaagaagttatagttttattgtcaaaatttatgggggcagttttgtcccatgtggcttgcaagaagtattttgtaactcatggtttggcaaaacatgcccttcggttagacgatgagctatctgttagattatatttttccaggacctagatttactaacaagtatgtttttaacatccttatataaatctctaaaatgatgaaatttaaacacatataaagtatgagaaactttatattagttgcagcgggaattaaatgatactgtaagtagcttagtaaatataattctacatccagttggtttgacccttgggtcccaaccgggaatagtcaaccagagccactactggatgcaacacaaggtgctaatttggtgaatttcttcatcaatgatgatcagacttggaacgacagaagggtcaggcaatggtttcaatgtgaggatgcaagaaacattttaaacattggcctaccggcctttaaacaagatgactcgtaaagatggttgggtgagaataatgggttattttccattaaatcagcctaccatttgatcactaatcgcagatgtgtaggcacaccacattggatatggaaacttatttagaataaccccattcatgttagactgaagcttctctggtggcaaattatgaataatgctctccctactcgtgaaagaattacaatggttttcaatctaccttcaaacctatgtccaatttgtgataagaagagggaatcatcttttcacttattatggagttgtgattatgcttcagcagtctggttcggtagctgctggggaatcagaacaaacctcagtcaatgccgaaattgtgaggaatggatggactggtttggatgcaataggaacagacctgttgatctcagttttgatgactttatgacgggtgctttgtgcatttttgaggttatttggaaggcgtggaatgaagttattcatggcggccaaataatgtagatatctatggcaattcaaaatgctcgtgtgcgcttcaatgatcacttggattaccaagtaagaaactattcttacaccattgccaggatggatgacctgctacactgatgtgtccattggatctgatcactcttttggagcagcagttttcaaagactcaaaaaatcaaatctgtagcgtagttatagaccgattttctgttacggattcagctttggccgaggcattgatgctggtgtgtgcagccaagcatgcagtgtgtttggaattcacttccgtgaattttttttgtgataatgaatgtgctgtggcaaacatcttggaagcccacggagtacatcataacataaatttagatggagtttctactcagtttagaatcatctttgcccagcttgtgaattgggaggtcaaaaatatcaataggaaggagaattttatggctcataatgctggaaagtgggcaaaactcaattcggctgttgaggatattaatgtgaactccatggatccgaaggtgtttgaagactataaggagtggtgtcccgatgcagggtaggtgtcgactgatgtttcttctcaagttgcctggaagtttgctgtccttctgtggcgaattgggtgcttgggaatcctctttttattatgggtgtgttctttgtttgctgttttagtttgccagttcttagttgttagtttgtttgtgtttggttgttttggggggctgagccctcgagattacttgtgttgctttatgttaacttgtgtacttgcttgttttcttttcaatgaatgggtgctttgcactccactttcaccaaaaaaaaaaaaaaaatagaattaataaatatgattatttgattgatgagactcaataaataatctaatttattggagctcaatgttataggttcatggttcttgagttacctttataccatactattaagggtatgtatgtcacaaaataaaaaagaaagagaatttagtttacaagtgcgaaatagtaattatttattttataataaataattaaacacttttgtctggacaagataaggtgaagccactttgtctattaaaggtggtgcaccacaagtgtcttgctaggacaataggtggcgccacctacactgtgtaataacattgtaggctaccataaaaggtggctccattgggtttgattttggaataatttattgattgaaaagttaaatatttatttaaatttaaatttaaaaggttgttatagatatttaatattgttgagatattctctcaatgtgattgagagattctctctattcggttgagatattctctcatatgattgagagattgtctcattcggttaggacaattatttaaatataaacatcttaattaattaaaatccaaataatagatctattggtcataattaattatagtggtataatcctaaatctatatgtatgatatatttaagaaatttaaaaaaaagttagttgtataattttctctccttctctattactgttcttgctcatgagttgagactaaaagcaaaaccaagttattttgggaatcctattagccctcactaatttttgagggagatccttgggatcagtacaataataattacataaatacataatttagtactgaaaaaccaacaaaactatgatcacactttcaactcatcaaaatgtgatctttgagtgatatttaagaacataattgttgtgttcttcaagagaggggtgacacacaaggaagggaagagaagtgagaatattagttttctaaattgacaacaatttgttatggaaatcagggttacccaaaacaagtctaccaaaggtcctatttatagaaaccaatagagtagagagcaagcaagacaattgcttccttcgtattggcctaggcgcctaacacaattcaaggactgtgtttgggcatcgccccactaca

SEQ ID NO: 16210 - DNA, 3724 bp, Cannabis sativa
  modified_base (1354)..(1360): a, c, t, g, unknown or other
tttcaatattttacaccaaaccacgacattaacccagctacctcagacccaaacccaaccccatatctcataccccgaaattggacccgaatccaaaccaaattgtgaacctgaattcaaacctgaacctgaacacggaccccaactccggacccgtatctaaggtccggggctgggtctagcatccagggttcggggtctagtgtctgggtccgattcagggtctgggtctgagtcagggtccgggtctaggtttggttttgaggttagagtgagagagagagaggggttgaaattaggtttcttcaattagagttttttaatattctatttatacccaaatgtgtacagttgtaattaggataattttttttagattttttttagaaaataaataataatacaataataatacttaataatactactaataataataataataaattaaaaacaatttgttttagttttttttcttttcaaaatgtcatatctaactatgctcaactaaaaactttttaataaagttggactagaaaatagacctagaaaatagaccaaatttaaaaataaaaataaaaaatatatatcgccctcactaccattttcctagttcaacaatgttaaactaaaaaattcctcaaaatatttttattttcaacactaattttattggataagaaaaaaagacattaaaaaagtttttgtagtagtgacatctacccaaaaagttaaaatataaattaataaaataataatcataatatattataacatgcattcaatattaaggtatattatgaatcaaatacatcatagcttcatatttctcttttcccataagagagaaaatttaagttaattattagaatattattacttattaaggtcagctccgcttatcaagggtttatctatgtataagatttttgtgtatttgaaaaaaaatctatacacacagctttttgtgtatatatacacaaacatgctaatgaaagcggtgttcaaaagttctaatataacacctcgttagctttaaaaactcatcgaaatcagaaatctttgaagcaaactagagctagccatcacttgaattcccgatcaagttatgccacgaaccaactcaaagcatgcaagcttaaacttttgaaaaggaaataaattcctccaaaattgttttgtaatatctttcactttcatgcttaacagttacatagtctaatcaagttattatgaaaaaacaaattaaaaaaatagtgtcgtaattataagaagtatatgagcattgttattgggtaccagtggtgtctagcacccttaagacgtgttgccttgcgattggctagcgatactnnnnnnnagttattatattaaactatatgggacccgatacttaattagactaatagcgatattaacacataagagagtgcttgacaccagtacctgcctttcagtatttctccatatatatatatatatagttatccaaattccattccacccttttcaacctagtctattggtagatgcgccacgtagtaattataggcatgaaaacttaagcactattagatattattagagcattactaatactattattgggtactagtgatgtctatcacctctagacctctagacatgtcctttatgattgattaactatattcctaaaatttattacattaaattatatgagaatccgatacttagtttgagaaataataatattgccagataaagtggtgttagatactactagttctttttaacattagtcactctcatgagaatgtgtatccaaataagacatgggcccatgatctacttgacaagcttatgaggctatatatatagctttattatatatgccgttcaaacatgcccccagccttccctattaattcccttgatggtgttgatcattactttcacaattatacaataatgactttattcccagatcgttgaacatgaaaataaggcatgtaggaaagcaacactccaactactactactcctcaatatgaccaacaaatcatgcataaaaagtgaccttgaattcatttttttcacttttcttttctcttttttctttccacgtaccttttgtcatttcatctctctcactccacaatctcaagtctagtgccttttaattatgtaatagctagttattaattaattacaacatagtttatcacccttaatgatttcaaatattataataagcctaataaatgcattagttcaattattagtacaaaacgatcgtacgtagaagatcagtagtttagatatataatcttaaaaacatgcatgcagatcaaataattttctttattattttttttgagaaaaaaatgattttattaattattactacgaagttgcaattgataacctcagcatgcataatgagttcaattattaatcagtgcatatatatatatattaatatacattgtattcgtacgataaataatagtgaagtgcgtgtgaacccagcctataacaaatagcttcttgcagtgtttgatttatggatgaaaaagccaaattttatggatctcttctccatcgcacatgtttataacatatctatttgctgacctgcgatatttttggataaggttataaggctatatgtggatcagattttggtatgatatgattacattttgtggtatagtttatccaaataaaaagatctataaaagatattcgtctcatggaaagacatcatctagaaggacggtctctccatccgaaagtagtctctagggaagctagtctgcctctagaaaagtgttccggatggttagttgtttcctcctggaagggttctagatagtcgactttaactgtacgtttatccctatatgagaagttcatttagtgtccaagaagcgtgcctctcattcgaaattcgaaattaagaactttatcttgagctgatgtggagataatgttacgaaagtttgttaagtcgttactgacttaacaacttaattactacaaccattgacttaggaatccatatccctgatctatactcatcacttgcaaggggtgatttttttttggagtgactttgaggttgaagattaagaatgcacagagagattgaaaggtagagagagagagagaggtacgaataaaatagaaagattggattttgagatttgtatgaagaatattctgtagatgaagaagattcttaggtaaaagagtagtgagagataaacaccttacaagaatcctaatagagaatcaatctcgactgtaatataccttttttcttactcaatcaataaaaaaatttcggtggtgtttcagaactggagtagagccatcaatctataggacttgaatcgatatatatcttggtgttaattttattatttttgtgctttatttgtttcaggttttttattactctgttctaccctattttatctctgattcatggttcaatttttttttattaatcttgtcattgttaatcgttttgtgatccaattatagttgatttgattctgcatattagttgtaatttttccacaaatcagagcttattgatcaagagtgtagaatcaagattttgtccgctgtatttcttgaagaaacattacatgttgtcaatgacgagatttgaattggagaagttcgatggaacatgagattaattcacattatagagagaaagtttgaaaggaat

SEQ ID NO: 16211 - DNA, 2968 bp, Cannabis sativa
gtggcctatactataggccacagttttaaaccgtagcctatactatagcccacagtttaaaaccgtcgcctatagtgttataggcacggttttaaaccgtcgcatgcagtaaaattttcaatttaattataaatttaatatttttcaacaacgctttttgctagtcattttgctaccaaaaaaaggaaaaaaaattaaaaaaataaataattctactcttttttccatgcattaattaatttttatgaatttatataatatcactaattagttaaggtaaagtataaatataaattaaaaatgaacagaaactgaaatatatgcaaactacttactctaacttacataattgttagttatataaaagtatttgattgtagtgtaaagtataaacaaaaaaaaatttgatcatcataatagcccttgttgcaccgtttgtgtttagacgcattcaatccattgatcacggagaagattcatctcatcatttaaatacgggttgctcttaccctgcaaaacaaaattgaaaaaaaaatatataataattagtaaaagaccttgtacactacactacactacattctcttttgaattgataactctttattatcaattcactctaagtatatgaaattgataattgaacgatataacaaggtaaaggaggaacatcagcaacttctcaacccaacatcagagataaaggtattttgactatatgacctaactgatatatatttagaagctatgtatatatatatatgtattcaaatatataattagttgtttatttgataaaaaaaatttgaagcagtactatcaatgattttatattatatatatacactcaagaattttggtttttgttgctgcaaaatataaataataattggatattgtcaatcaagagatgttatttcaaagttattcaaagatagtctctctgcatttaactttataaagagttaaagactgcaactttatatatttctctcagcctttgcatatttcatgtggctataggtttgttatattctataaaatagatagatcaggaagattatactatgatgttataaatataaatgtattaatggttggctggattgtgtaaaaacttggataaatattatgcgagaaaaaagagattctctttctttatttgtttccccatatgccaatgtgtgtatacatatcgaaatcatgttatatgatgtgacaaaattacaaagagtaaaacagcatacttcaaactaaaaatgacaaaagaatattaactgataaatgtgatgaatcttataaatttagtagtgcacacaacaacaagtagctcgaaaataacaacctttgcacatctcgaagtagtgcaaaaaagtaaaaaaattatactttgtaattgatgtagaatttccctgagacggtccaagcaaaataaccaacacaaagtcaaactatttaactcagatgccaatgagaaaacaatgaagacaataaaatcaaatctcaaattttattagttacagatttgaacacaatcaaacttctaatttgtcatctatacatagatgatacctataatcattctccaaatgagtttgagattgaccaaccaatagtgaagtaattgattatctactataaaactttcattttcttataaatattgatcataattaaaaaatattatagaaaaaacacttcacaataaacatttatagcagtagtgggagggggtatcgataggcccaatatatgttggtagcaaaacattgatcataaagctctctttctctctaatttcttgtcttgggtttctcagacaaattcgattttttatttggtgatcacagtgtttttcttacagttttcacattgcttttgacacgttgaagcctaattctgatcatatttttcatcactacatcttctctattattactgctatacatatattaatcaaactactataacctctttaccaattaatatatcattcatatttttcttcttcttctcaatgacaagattcactcattttcacaacacctcttcaacttcaattacaatggtaattaactcatcacatgatcgaatatcgatctcttttctcattcaggcaagctaataattaaggtaattaattattgacttttaagtatgttttaattgggtttattttttgtagagtggtgtaatgccgtttatgttagaatcaaaagttagacttataatggggttgccgtttatgccattatcttgcagaatacaacttatacagggcaaggtcaagaaaaaatcgcattctctccatccaaaacccttttcaagaagaatttaaaaacaaaaattgaaaaatcaaaagacaattaggccagcaatccaaactccaatcacccaacttttcaaattcattcactctaaactaatttcatagagcacaaaaatgattttgattcaacatattttcctctgatagatatagtaatttttttcattttttattcctaatcagatgttgtaaacaccaaagctaagttcatggtcgaccgaattgtaagaagagagaagctcacctggtgctagggacgtttcttgggacttctagctcgagttcagtgggcaaacccagaaacccttctggcgctatcaaaggtcaggtgcgatacatgactcacgagaggtgggcattgtgattgtgaacgaatagggtcagcaggcgtcgccggtagtggcggaggtgcaccgccggtgatagagaaagacccgagtgagtgactgagtgagatcgagggagtgagagacagggagtgagtgagatgcgagggtttgatgtctgtcttatggtgagaggcgcgagagttttcattttttagccgtatttgcgacggtttagaaccgtggggcatagttttataactttttttttaaaatttttttctacacttttaaaccgtcgcctaatctatac

SEQ ID NO: 16212 - DNA, 8435 bp, Cannabis sativa
gatgaaagaagatgattacatattctagatcattgaaaaattgagagccttttattttcaaagaaatttttgttaagattatattaaattctatattccatagtaggataaggtgcatgggtttgttgctttgcaataaatgagaaggactgtagtatagtgcaagttatttgtatagcaaagatgtttctgctactgtttattaaattatctgaccattgaagctgaatgaagatgataaggaaagagaaaatgaaattgtaagaggaaagaagaatcagaacaaaaaattctatattatgtactgcaagcttagtttagaatccatacaagagagctacatatagagttttcagtacaacaattatgagtaacaaacttcaactgaattatttaggaactaattatactaatagagacacttgagtaactaacatttcaagttatttgctgccttaacagtctctagagtgttttgagtttttttttctcttccgaaaattgtgatcaaaggaaaagttaattggaatttacctttgaaaacagaaggcattactctgtgaattattactattcattctcctattccaagctcacacatttatcaaatttactccactgtttctaatatcgaaattcttgttggttagcaatatttgttttctgttgtaattctaatccatgcttaatatcattgtgtttttctaggattttcagaaagaacttgtaagagcagcagaatccttaacagccataggaatgaaacatattgaaacaggttaaatatggattggactgtaatgggtgacattttctagtcatatggaatatgattcgtaccttgatttttcgtggttatttattattattttttttaatttttttttatggtaatcaggaaccaaactgtctgaggattgttgtagatatggatccgaaaacatcgatgactacatattggcaaaagctgcatctatatatggtgatgcccgcaagcatgtggaaaaagaacaagaagaatttaacaagctgctttctttacaggtacacatatcagaaagctatattactatattattatatgaagcatttgagtttacttgttgattcataacatcaaccatattcaaattgattaaaactgctctggaatgaaaacaaatatatttgcatccttgttacgtcattatttcgtatagggtggcaacgttgttatttttaatttctgtggaatttattacacttttgatacttactaagggtcataactttctaaatttattatgatgcaatgcactctaaatgataagataaaagttcattttctataagattaattttgatacagaaacatgatactctgttctgtatgcttccaggttttagatccactgagagccatggtcatgggtgctcctcttgaagatgctcgtcatcttgctcaacgatatagtcgaatgagacaggatgctgagacacaggtaccagaaagaaagttggcatttcagtatactagttaccgatcatctttaaaactttatcatgtccttattccttcgtattttaagaactcatattcatattgaccattaaaagctaacaggcaactgaggtttccagaagacaagcaagggtaagggaagcgcctattcctgaaaatgttgcaaagctgcatgcagcggaggcaaaaatgcaagaacttaaggcaaacatggcagttctcggtaaagaagcttcggctgcattggctgctgttgaatcgcagcagcagagactgactttccaaagacttgttgcgctggtttgtgtgctcacgattttagaaataaacttttagattaaattttttaatggttctggaattgatgtttacaacgatgtttacttacccttttgaaggttgaaggagaaaagaattatcacctgagaatcgcttctattcttggtgatgtcgaagctgaggtcaattgttaaatctacttaacatttgtttgcaaaagcaaaactactttatatgtccaaacttttaacttggtgtggaaattttctcagatggtggtagagaaacagcataaagagtcggctcctcctgtgattccatcagatagtttctccgacaagacatacttcttggccgaggtatgttatctgttttgaacttatcactttataacattacaaagcatgcatgaagaattatagtcatacagaagtactatatagaataacaaactgtatgcttacttagctggacacgcatgtcaacaaaatgaactatttttttttttcgggattttaggacagaataagaaacatgtagatatcgttttagaatatttgaagaaagtatgaacatgtaataaggagaaaagtaccaggttcaacatgttgatatttattgagaaattaataagggaattcgggaaatatggttgtaaagatccaaagaccagattacgatgcaattcgcttatactgattataaccttaaaacctttttttcccaaatcttgcaggcggtgcattcgtttactgctgcttcagacaaagagttgagcttaactgttggtgactatgttgttgtgcgaaaggtaatctttcatccccgtcactttctagtgtcgaaaatcttttatttttgttgctcgtttcaaattttctttcgaaatgtcacaatagccaacgaaccaaactaagattagaacaaatcacaacaaataggctatatggtttgagaagatggctaataagaaagtatatatatgttaacttctctccttttctttcttcaggtgactccgtctggttggtcggaaggagagtgcagaggcaaagccgggtggttcccatctgcatatgtcgagaagcgccagagacttccaacaaattctactgaagtttattgattggttcttcctagttctattgttgttcacattcatttttttggccttcatttcaattcaaagtttacagaacatggtatgtgtagtatgtttatgtgtatattctttcttgtatacattcattctttttgggttactcttatttcaaaacacttgcaaaaatgtggaaaagtttgtttctttggtaatttttacttaattatttttttaaacagatcaaaatatatggatgaaatgaacaaacctaaatcaaaattctcttttctaattaatgacttgaattcactttcttctgactctcatctcaccattctaattttctattaacttttctttattccttttgtaaattttttgctttataattaaaaatgagcaatgatttggtatgatgggaatatatataaatatggctgcactaagtactcttaatatatcattttggatttgtattttgtaaaagttactaattagatcttctatattttgttaaatgataaaatagactctgtattttctaaaattgtacaaataagatcccgaactaattttttatcaaaataaaacttaataataattcaatctagagatattatgacaaaacttgttatattttctgtatctattttgtcatttaacaaaacagagcgtttaattagtaacttttgcaaaaaaatgcaaaatagtatttaccctaatattcattaaggtatatatgggtactattagaaaaatttgaggttttatatttaattttgttatctaattaaaaaaaacattcatttttacgtatttaacaaatttttggtccatacattcagaattaattagaaacttgttcagataaatttgatcgatatttttgtacactatatatttattttaataataagttcattaagaaaaaaagaaatcaaatttaacaactactcttaaaacacttttgttagaattttgatctgtctttgctacacaaactaagtaaaagaaaaacactgtacttgtacccccataatctttggctgggttagtaaagatttccaaactaaaacacaaaatattaaatatactatcatcttgtagaagtcatatgaagagctaccaaagatgcataggcaccttcatggatcttaatcaaggattcatggcgacccttctcagcgatcacaccgttcttcaccacagcgatgatatcggcgtttttaatggttgtaagcctatgagcaacaacaacagtagttctattcaacatgactctatccaatgcatcttgaaccactctttcagactcagcatccaatgcacttgtagcttcatcaagcaagagaattttcgggttttttagtattgctcttgctatagcaatcctttgtttttgtcctcctgataattgtgttcctctttcaccaactgaagtgtcatatccattagggagtgatgctatgaagttatgagcattagctgatttcgtggctgaaatgatctcttcttcggttacttctccatgttttccataggtgatgttgtctcgaatcgtttcgttgaaaagaattggttcttgacttactaaccccatttgttgtcttaaccaacttagcttgaattttttgatgtcaacaccatctagtgttacttgacccgaaagagggtcataaaatctctctattaagcttataactgttgattttccactaccactttctcctactaaagcgacggtctgcacattttgaacatttttcattgttagttaattaaaagaatttgacatgtttgtctgaccatatacagttagaaaagaccgaaaaaagtattacctttccagatgggatggttaaagacaagtctctaaagatttcaacattaggccttgttgaatatctaaagctaacatgatgaagctcaatatctcctgttatggttggcaaagtaacaccttcatcactactcgaatcgatgctaggtttgctgtcgagaattttgaaaatcgaggctgttgaatctcttgctttggttgaatcaggagccaaggcactactttgtgacacccccattgctgagattgttaaagcaaagaaaacctgaaaaacaaacaaaaatcaaaactttcaacataagtaaagaacagaacaacataagtactaacaaaaactcataaagattagatcttttttaccttgaaaacctctccaaactcagctttaccatgtttaacaagaacagcaccgatgtagaaacaaaatgcattcatacaatacatagcaaagaaagaaaatccaaagccaccaccactgactagtcctaatctgactccatgagccatagggccttcacattttctttggtacatttccataactttttcctcagcacaaaacgaggcaacggttcttatcccgcccacagcatcgttcgccacttgactagcttcttcatacataacctttgcatcagcactaaaccctttgatgaattttgtctgtaaagttccttggaggatcataattggtgacactgctaaaatgatcaaagccaacatccaatttgctgtgaatgctatcactaaccccgcgatgattgtcgctatgttttgaacaactagcgccaatgcatcgccaacaagggccttaaccgtcgaagcatcagttgacaatcttgcaccaatcgcgccactacatgacaaaaaaaataaaaaatcaaataactaacttaactaacttaactaacttaactgattctgttatgggatttaccttgaatttgcagggtcatcaaaccaactgatttcttggtgaacaactttagcgaaagttagggagcgaattcgttggattagtcttccaccagcaattgagaaaagaaaattctgaaatggaactgctagaaaaacaactatagccaataccaaatagatcagagcccaaaatcttgagtcttttcgaagcttggttggcgattcatagaacatgttaatagaactcgaaagtaaaagaccaaatgttgggaaaacaacaccatgaattgctgcagcaattgagccaagaatcaacactggtatctcaggcttgttaagctcgaaaagcctacttagaggaactttttgatcacttgttgatgtgttcttctcttcatcgcctctttcttcggtctcatgaatgctaatctggccaggaagaccgaagcctagagcaaaagagcggcgactacttgatgaagagcctctactaattgatcttctaagcgataatctaatgctgctcgattttgtcatggatttttcaatggcattcttgtcgtcgcaaccataaacatcttctgctgcttcattagctccttgttgaaggcgaacaagctgcgagtaagctccttcgggatcagttatcaactcatcatgagtacctctttcaacaatctttccttggtgcacaactgcaatcaaatcagcatttcttatggttgtcaaacgatgagcaacgacaacagttgttcggttttgcataactctttccaatgcctcttgaacaattctttctgattcagtatcaagcgcgcttgttgcttcatcaaggagaagaattcttggattctttaaaatggctcttgcaattgctattctttgcttttgtccacctgagagctgtgttccatgctctcctgccaatgtatccaaaccctgcaaacacatgtttcaaacttcaaatctttcatttcatcaaacataaaataatgaataagggcatttatttcggtggaatgactattcttattcctacttccactcctatcctgatgttttcatcccttttaaccaaaagcactattaggtagcgtttggtttggaaaaatgaaaatataagaataggaatagaatcaagtttaaaatgcataaaaaataattgataaaaaaatcattaaaatttgtctcctttttagttccttctatttactaaaataatgaaaaagttattctattataatagcattcattccaatgttttagattgcaaccaaacaaagaaatagaataaaaattattttcttttccattccattctttttctttgtttggtaacattgaaatgactattcctattctttttcccacttccactcatattcttatattttcattccttccaaccaaacacaccatcaggtgtgttcggttggagataacaaaataaaaaagaatcaaatttcattccattccttagtttagtcgcattgaaatgactcttctaccatttcagtgaaataacaatcccatttcaaaattggtcgaaaagtcattccaacactgttttcattccttctaaccaaacgtaccctttagagtaaaattttcgaaactcccatttatgtttttttcttatgagttcttacctgaggaagcttgttgatgaatttagcagcattagcaagttcaatggctgttttaatctcctcatcagttgcattatctttcccataagcaatattttctcttaaagtggctgcaaacaaaacaggttcttgactaaccaaaccaatcttttcccttatccatttaagctgcaaattcttcaaatcaacaccatctataagcacttgtcctgaatcaggatcataaaatctttccaacaaacttatcaccgtcgatttcccactcccgctttgtccaactaaagccgccgttgtcccactcgaaacatgtaaagagaaacccgaaaagatttgaacatctggtcttgcagggtacttaaagtaaacatctttaagctcaatttcacctcttatgtcttctaatactgtcccaacactgtcatatgcatcgattttcggttttcttttgattgtttcaaacattttgtaggctgcagcttgtcctgatgcaaaagcattcaaacttggagatgtttgtcccaaagacctatcaaaaaaacataagtcaaaaccaaaaaaaaaacataactcattgagaaaaacacatgtaaagttgtgtgtacttagtacttacattccaccagtcataattgcaaagatgacatttataacttgtccaccattgtaccctttttcaatgattaactttgatccataccatacagcaagtccataagtcccaaacacaatcaacaaaactacaccaagtcctatccctgaagccaaaccttgatgagccatcattttatatgcaatctcaatcttcttgttgtatttttcaatggctttcttctctccagtgaaagatgcaacctttcaacataaaaacataattaattagtactaattaacatcattattttaccgagcattgttatcaggcacctttagtgtttagcaccatacactaatatagaccaaaaaagacaacctatacatatgttgaattagtagtaatcgtgatcattattttactgagcattgttatcagacacctttaatgtttagtaccatacacaaaaatatagatagaaaaagagagcctatatatgtatttatatggtgaattagtactaatcaagttcattattttactgagcattgtta

SEQ ID NO: 16213 - DNA, 4448 bp, Cannabis sativa
tttagaattgggggttagttgtaaaaatctggccacttaaggaggttttgccgtaaataactcatttattaactgtgatcgggaaaatattgatcacaattttttcaatgactaatttacagagaattctcaatttaccaatttgatgttttgccaaagatttcgaataggtcgtcttttattcctttatattttggacgttatacaaaaacatgataattacttcatccagcgaagggatagaatggaaaaactcagtatatcaggtttgtaaaaagtaacaactgtatttagaatgttagcgtacggtgtgccgacagatgctaccaataaatacatcaaaatagtagaatctacaactttaaaaagtttgaagcgattttgttgtactgttgtcaaggtgtttagagcccactatctccgatcacctaacactcatgatgttgtaaggctactccacattggtgaacgttgaggttttctacgattgctaggaagtttagattgtatgcattggaaaaaaaaattacccaactgcttggggaggacaatatgtctgtcgtagtgggtccccaactattattcttaaagcaatagctgactatgatctctagatatgacatggatattttagtttaccagaatctaataacgacattaatgtgctagaagcatctcatatttttgctaatcttgctcaagctattgttccacccgctaattgtgttactaaagaaaaagagtataatatggtttattatttagttgatggtatatatctaagatggtctactcttgttcaaattattcattatccacgcggtccaaaaaaaaaaaaattatttgcaatgaaacaagaaacatataaaaaagatgttgaacacgcatttagaatattgcagtctagatttgcaattattgttggactgacacgtctttggaattaaaaagttttacatgatataatgactttgtgtattattatgcataatatgataatagaagatgaacatgatctaaatgcatcaattgaagagcgagtcaaagtaccaagtccataaattgagatagtagaagatgataatgctcaatttcaataatttcttgctagacatagaaaaattaaagataaaaaagctcatgttgagctttgaaatgcattaatcgaacacccgcgaaacgaatatggtagctcgcaaaattaatataatttaattaatcttttcaaatgtgtgttttaaatttgatttaatttattgcaattttttcgtcattaatgtaatattttttctctactaatgtaatatttatattattgcaatatgatattttaatttaatatgttttactaattttattaattaaatattataattgtagtgattttagtaagttagtatagtgttaaaaaaatattttatttcattaaaagttaaaatatataatataataataataaaaatataatattttttagtgtaatttttggtgttgtggttagaatgaaaatagtttttgacaccaaattatgtgtataggttagagatggtcttagaagaatgtggctcaatttaatttcctatgcctcttacttttttcttaaatcaatttctgctacaaactggtaagtaatactagtactctttatggagctatgtgagatgagtgaaaaaaatctctaattactcatggttgtagcataaactataaataattgagggtaaatgatttaagtctcaaagaaacgaagctcaatcatgaattcttgttgctttggggaataccaagcaatggccttggcagaaccaaggacctgcaatgcatattctagggcaattatgggctcttccagacctatattccaatcttggttcctcaaatcaacagaaattccggaatcaaccctcaaactaaaaggcccagcaatctgcaaacaaacaatgtttgaaaaaagtcaaaagaaaaataaattctaagcactgaatgcatagatatgcctcaaaatacctgctgctgaagggagagaaatgtatttgggcaaacagcttgaagggcattagaagttggctgctgagaattcacaaaatcttgtgctagccgtattgcacctgaaagaaattttgaaccagaagggaaatccagtcgagcatgaaatcgggtaagatcgaaataaggcttctggaagctcccatactgagctgtaaataatagagatccaaacatgtctgcttgtaaggcagattttacagagccagactggaaactatagcatctaaaaccctgaaaactttcttccaatcttcttggccttgctgaattctcaccaaaacaagctgtaacagcagcacctatatgcaaagaaaaatgtgatttacatataccattttataaaagttgcacaaaacagtttaggttcaaatttaagcattcgtaacagattttcatcctcaaatctccttgagactctacatctagcaataaaatttggcaactacatgctatgacaaaccatcatgcccaccacagattagttacagctttcagatgaaccagagaactgcttgattcaattaatggaaaagatgaaatctttattagtttgtactcttcttagctgagttccagaggatcaatgaaatctgtaaaagaagttggcaatgtcttaccaatgattcctgaagctgaaacacgaggattcaagagaaaaatatcatatggctgaaccatctccaacttcggtgcaatacttctccatagctctatatccttcttataggcaaaagcacctttcactgacaacccgggaagcagaatcgtgggtgcttgattgctcccattgccatcaaactgctccggtgagcccgaattgtggagcgcagaaaggtgataacttatgccagaatcagaaacagaagaagccaaatcaactgccactgaaaatggcacatcccaatagtttctatccttgtcaataaaaagtcctggccaaactgcctccacagttaaatcatgataaggaaactgcaagcatagaatgaaacattcttcacataaagcataaaagatataaatgtcatctgcaattagtctttacgctataaccaactgcaatcttagtaagtgctaaagctgaaagctattttaccttgtgatgaaaaactgctttctttcgagacaagtctttttcaacatatttatcaacactaagtagaaatgtatcatcaggtgttaaaaatagctccgagcacaaaccataagcatataatgacttattctttaagtgtcttccaattttttgaagccatgacgatgctgatttaggtttatctccactatgcttcatggacgaaacgaatttttgcaaattaaactgacccagcaatgtggtaaagctgcattgcatatataatgaaacccaattctggtatcagcctatcactgtaattaatccgtacattcaaattctgggtgggttaaagctgaagtccacaattgcatgatattatattctacaccaatatatgaaagcagaaaattgaaatgaaatggttaccagttgtcagcgaaagggatggtgagaacgcgttgaagattgaagccatcggcggcggagtaagaaggaacaacaggggcggccatgaatcgttgaaagaaatcaatctgtttggggcgggaaagcctagcacctctggataagcccaagggaagtgtgtctccgggaataggccgagctagtccatcgatggtggtcggggtggaggcgtccagctcccaaaacccacttccgtccattacccatctcagtttcctcatccttcctttcctgattcccacttttcgtgtatcaagtttgagctaggaaaactctgaactgagccaccactctatgtaagagttgagttgttttgagtaaacgacatgtcgtttttgaccttttaaggaccacatctatatatattttatatttttgcattctaaaggaccatcaatatttactcttaccactttatacttttcttttttggcaagagatacaacataataagtttgaaatattagcattccaaactagcttcccattagggtgggcaatttgtgtgtatagtttttgatcggtttaagtattataagtaaatgttaaattcagatccgatacatttattaatccagtagaaaactaaaatataagttcaatctatatataaataagttgacttgacgagacttatttatataaagaattatgtttaattttatcaacttatcaactcattaacatttttttcttaagaaaactttatcctttaaaccaatcaagtaaagatatatttgttgaaacttattttagcatgatcttatttattaatctaacatcatgtgtatacaatgtatgtatataaccaatttgaacacataaagttaaggattctcccattgagttgcagtaa

SEQ ID NO: 16214 - DNA, 1591 bp, Cannabis sativa
tcaaccatggaggcttctacattgttgcgagtaggtgggtcacctagtttcctagtcgcctttctagtagttaccatctttgtagatgacaaaaatggtggaaactttcttcaactctcaatgaaagtaccaaaatatttaccgagtctttgaaaaccgaattaagaaaacattaagctaaagaaagtgtgattaagaaataaatgagacaagacttttacggcttgggcattaaggagccttagtccacgagtgaattttattagctctgaagctagagtatatttcttacaagccttggcaaattatctaaccctttcaatgaagggaaaatgtcgtatttatagaccatatattgggttcccaagctgaccgaggccaattagggattttttatgaaaaattaagcccgttgatggtgtaaataaatttgaatattgactactaggttgagtaagtgagacaaaattatgggcataatcgtcgatcatatgggacagtactatttgatagtgacagatgggcgtgcatcatcgcttatgaggagttgatgtcagagttatgggtgttggataaataggtggcttcctttttcctgcttgccttcccaatatctaacacatgggataaaccccctgattctttaggattcttatcggggatgcgctagtaggattggtcttggatggtaggcgctccctaacatctctttgactattattttgggatgacccctaagggcctatatcctcatttctttgagtactcgttgatttgaataagtattaaccttctaggcctatacatcaaacatagctatggttgaattcaaacttcttgtctgactttattaatgggacaacctatcaattcacctaggcttagcgatttggcccataagctaattaggaacaattgaagttacatgtttcaccctcctagaaacacagataatacctttcttgttattttctagttttgaaggtcaagcactaggttggatgaaccttactgtagtaaattgaatgtcatcattaatttaaacccccacttcaaaacctttgttggtgggaggaatcttcgggttaagatgctactatcatggcttgcataaataagagggtccttgtatttaacgggtagcttattcttgctccaccatcttagcttcttggtctaaaactatctgtcttagttgtacaaccttaggatcttgctcatagtctaggtaatattcttctatatcatcctcttcatcctctatgtgagggttttcatcgtggcattcttcatgttgctaaacattttgaggatgtcgacctctcgcaactgatgcttcatagtctcttgtggtggttgcctgagaatctacgaaaagaggctgatttaggccaacaaccatggggcctctatgttgttgtgagcgggtgggtcacctggtttcctagtcaccattctagtagttatcatgtttgtagatgacaaaaatagcatggaaactttcttcaaccctcaatgaaagcagcaaaatgtttactgagttttttagaaatcgaattaagaaatgataaagctaaagcaagtgtgatta

SEQ ID NO: 16215 - DNA, 13211 bp, Cannabis sativa
  modified_base (43)..(49): a, c, t, g, unknown or other
  modified_base (460)..(460): a, c, t, g, unknown or other
tgggtggtggtggctgagggaaaatgagagagagagagagagnnnnnnngagagagagagagagagatgaaggtgaggttttttttgttttgatagaacggtattttagggttaaaaaagaattaaaagtatagttaaaaaatgtatagtaaagagaaatattttaaaaccatgtgtaattttttaacattaaatgtcaaatttccaattattttcttacattggatatccaatctatacgttttattattgaataaacaatataacaacaatgagggaaaattatattttgttttgtaggacaactaccttgaggaggcaatgaaaatgagaaatcttctggaggagttccatagaaatcatggcctccggcctccaactattcttggtgtgagagagcatgtcttcacaggaaggtttgactgaattcttttcaaatgtaaattattattattattantattattattattattataatttgctaagcttcaaatgtaatgattattgtttatcgtttctcctccctgatagttgtgtgtgttacatccatgttcgtacagtgtctcatcgttagcatggttaatgtcaaatcaagaaaccagctttgttactttggggcaacgtgttttggcgagccctctcaagtatgtagtacttatttgctttcggaaaataagcattgtttttattttgtttcttgtaaaattattttatttgtatagggctttcatactatcactataattataataataataataataataataataatatttttagtaataattttttagttataacataaattttttgtgattaaatataatttttaatcacaataaaaatttacttgaaactataaatataatatttagatacaaattgtcattaatttaattttataatcacaacaaatattgtgactaaaaacatacttagtcacaaaaaattgtgatttttacaactaatatctttagtcacgaactttttagtcacaacattgaaataagaatttataattagtcacaacattctcacttttagtcacaagttttgttctaggtagagtattgaatatttgtagttttgcaaattcgaaaaatcctctccgtacgagactaaagaatgtttgtttggcatgaaatacacatttagctaatggcatttgggtttggcattcatactacttcccaacattctttgaaccttgcttctcttatgattttttctactttctttagaaaagtgatttcttctgctattcttgaccttcgatggttcgattagggcttcgagtcgttttacctcggtctcctgacccctttactagtggcggtcttctcccccactcatggtaaacctatttcgcgcttctagggacgtgagttttttggtttttgtgtgttcgattagcaacaaccttatggaaggactttttttctccagggttgctctcccttcattcttcctcgtctagatttcttctcttaccttcatttttcttcttttggattgtcacgagtcagtggttatggcctatcttttgggggtttattcaacaccttgatttttatgcctccagacacgggtttttgttttgattgctgcgacacttttcgaaatcttataaggagtgtctaaaattttttcttgtaagctttcttgtttctggtctagttttttctctcttagttttgtttggatttcttagtgtgcaggtggatctgtgtttcttctaggctggcttatggttgtgttaggacctgtttgcacaccatctctttgttttaacattgtacgaattcaggttgagtggagctttgtctctttgcccttttggggcatcatctaacaacgtttcttgagattattttgactccttttggtgagtctccctctttttctagtgggtagttaatggggctttgctccttctgatctatattactctggtatgaatattcattttttggttgaaagttgttttactgggtacctattatggaggttctggcctgaaatgttagacagaattgggaaatgaacaacacactcagattctcaaagaccatgtgtgagatttcaatctttatttggtcattctttcaaaaaccatttttaatcacaatcaactggaacttttaagtgttaaactaagattttacaataaattggtgattggcgaagcgatgaggagtggtggcttgtgcctcctttggtctgaacaagttgaattggatcttgattcttactctaactctcccattgatgtgtttgtaaagtctcatgacatcgtttgttggaaatttaaaggattatacggtcaaccttcatcttttttgtggaaagatttttggaaacatcttgttcttatttcatgtacacacagtgaaccttggctatgattatgtgaatcattttcatcttggaagaaatgatcaatggggagtgattctcacctccaaatctcttactaaaaacaattatcattcccagagttagtgtaatgacacttgccttggtaacaaagaacaaattgagcttcattgatggtgattgccctcaccctagccctaatgatgaatgcaatcgtagtcctggagcaatcgatgcaagtcaccaaaattgtacaagaaaaagttgaggaaacagagggattgacaaccatggaagacttttagggtaataatatggaaggattaaatgaagctcaaatggtggacgtttctctaaacttagtggttagattgacttcttcggaaactatgaaattaattggtagtgttcatggccaagaggtaactgttttaattgatagtggagctacccataatatagcctcttcattagctaataatctcagtctacccatctgaactaccgattcttatagagttcaattgacttgagaattcaccaactgactcggagtctaataaatattaattaatcaccaatgaaaagttgaaaatagtaaataaataaaaagaacaccaaaaattatagaggttcggtcccttaaatattagtaatgacctactctacttttagttgtattgatattgagataatgtcttgcacatcactaaggaagacaatgaattctagctacaactctcaagatgcttacagagaatattgttcacaaaagtgctcttaaagtcgagataatgatttcaagtccctcttccctgtgaatacgttcactatttataggatgtagggaagaacatttaaggccacccaacaaattatagcccatggaccatgaagtaatacctagcatagcatagccgaaatgagtggtgcacaccctttgcaccatggaccatgaagtaatacctagcatagctgctaatctttgacatgctagagtcatttaaggccacccaacaaattatagtccagcgggataaaataaaagtaccctatccggccctgcttagggttggattttagattgaaataccacctgatctcgaagggagaaggctgttaacaacccatctgatcgtacaaaacaaaaagaacagacatatatttgatccccttcagagtcaattgtgtcggacatatcccaaaatagtttgctacattctttaagtacgattggagcagcaaaatagctccttgttctgcatggggtccacaccacaccatccaattctcaagaaggccatgggcaaggtactcctcaattggcgggtcggttggaagacccccaaccaagtttttagccttaagtttcctgaacctcctaggggtaagcgtggacggaggagctcccaagcaccgtccaactccccttttgaggcgaaggctccagaaccgctagctcttccactacatgatgaatcctaacgcaagaaggctcaccatcttcattgaaaggctcaatgggctcattgtatccccctaagcggttgtttgtgatgaaatcactgtctgtgactcgcctctaagcaggccattcccttacttcaggctcaacatgcctctcggtctggccgacctgtgtagcccatccccttgctatcagttcggtaatatagggatcaaatgaaggtactgtgcggtgggtttgtttttcttagccatgtttggatcctgaccggcataacgcgcaacaatgactacaacttcagcttgtaaaggatttttctttgaaggtgacgcacgtccttctggaatcgtgttcgggactcctagccagataatgtatgtccaagaagttggaaggaacttcctctaacctcggttcagtttccaaatgaactaactatagatctttcctctaatctgttcagagtagtgatgatgttgtgtctctggtacaggacaaccactattaacctcaaaatcaaaactagacgaagtgctatccggagaatctttagatgaggaactacctgctcaaagtgcaagctgatcctcaaaaagaagactaagaaagtccgcgttgatccggtattcacctccccagtaatcatgcgggtttatctgtgcaaaaggcaagagggaggtgaacatctggatagcttaaaaccactcgaatgacatctaactaggccgtcagggtaaaacaggccatatataccggctacgatgattaacaaatgtaaacatcctaatctacaacgagaaatttgtttttgagtttctaggttattactaaacttaaaatctcaagaatgtcgaacaaaaagaaaaaggaacctcctttccttttcaaaatagcaatattcatctagactaaggagatttcaagaaacccactacatttaagggtttttctaatgccccaatatgggggtgtctagttttatcaatggtggaatataatagagttgtagaaaatttgaatgaaataaagagagaaaggggtctcaaggaacaaactcactagaaagagcttggacgacaccgaagcgatgaagaagagacctccggattgctattgtatggtgaaaagtcgacagtggaatgaagaacaacatcgagtttcaagttcctgggaattttcttgagtttttctctctgaaaaatttctaagaaccatgatgaatgaaaaggttttaaagagtagaggaggctttatatagggttttcataaatgattttcccaaaaaaaagtaaattggaaaatcaattctcacaaaaagtgcatggggaagttgagaaagctagaaagtgtaatcataggggaatgtagccgtcagcacaaacccccacaatgtatgatttaaagccgtcataatgatggctaacatggatgggtgacccgtcaatcctgcacggaacattcggcaaagtctatcacgtgggactcacgcgtgtcagtatccaggtgaataccaaaagtccccatccaaataggtgttcacacaaggacttgtggggctaatattatcccaatttttttctacccagcacattcaatcggccagtacctatcctgagacttagggatagagctaaccatatcctttctttactggcctcaaaataaaatatttctaagtttgcaacgaaagagaacttcatcaagtacgacctctatccttctgcgggcaaaccttcaggttcctttgataaactttctaagaagaagaaatggaccaagaggaaagaacccaaggttgatttcccctctaataagctttctgagaagaagaaagaaaccaaaagagaaagggctgcctggaagaggcttgagcgaggcgaacccttggggaaggttctcattcttataagaccttaagaacaagaaatcgtccgatcttcccgcccagctatcgttgagggaaaaagcaaaggagtagccaatgaggaaagtgaggaggagtctcttcaaatgatgagggttttctagacaaccttttttggaatgatatattcttgatttgggggagggtacaaatttctccaatttatacttaaatatattttttctttagaataggtcttctaacttgtgtgcctttttgcatatatgtcaggggttttaaaatggggacgacatttttggaataagggaaaaattgacctttccttccaatattgatatacataggtttagaaaaaataatttcccttaagcataaataatcaaatttcccttttatattcaagcttatgatatctaaattatcttcccataaatcattccgacaatgcttttaatatttttcccattttacattggggatggtaacataaacttgtactttcattattaacaccttgttttgacaacatttatttgctagagtaaaacctacaattttcattcttagcgtatttcatttccataacaacacgatgtattctcttttttaatgatctaactttatttgatttgtgtagcctgaatgttagaaaatgtgttttgactattaaatactactaaaaataagtatagtgtgggagtttttgtaattttttttttttgagggggagtttttgtaaattgtatttattgttattattattgaaaatcttgcagagttcgcatgcactatggacatccggatgtattcgaccgtgtatttcacataactcgaggtggcattagcaaggcatctcgtgttatcaacattagtgaagatatctttgctggtgggtgtgaagttggcgattgctttttatgtgtgaccctatacttgattcgtagacataactgatttaattttcctgttaatatctaatttttgatagatgaaaatgaaacactgcagggtttaactcaacattaaggcaaggaaacatcacacatcatgagtacattcaggtttaatataatattttcttctgcctgtctcccgccaatagattgcaattccggtttactgatactttgctatattcaggttggcaaaggaagggatgttggtctgaatcagatttccctgtttgaaggaaaagttgctggtggaaatggggagcaagttcttagtagagatgtatacagactcggacaactttttgatttctttagaatgtgttcttttttcttcacaactgtcggtttctatgtttgttctatggtgcgctttctctactggtttctattcgtcaatttgaataagttgtctctgctttctagttgctgtaatctttttgtggtgatttctacttgatgcagatgacagtgctcacagtgtacatattcttgtatggaagggtttacctggtaacttaaatgtccccttctgctttgatgtccatactatttaaattgattctgtagctttggcttactaaagatttaataatgtggtggttgtgctggtgttcatgaaaacaattgttagagttcattcacactcataaaacatatcaatgttcagatctatacacaaatatgttattactagaatttatatctaaataaacttttgttgatttaaagagaataataacataaatagaggaagagtaccataatatattttgtaaagattatttttggataatgacttaggatttctctagtttttactcaggggagaagatggaaactagagtggttcttattttttcttatggaagatttttttggccaatacttttaggctttctctggacttgatgagcaaattgcaaagcaagcaaaaagactgggcagtacagcactagatgctactttaaatgctcagttcttggtccagattggaatttttacagcagttccgatgattatgggttttataattgaactgggactactgaaggttagtccaagtcatatcaagatcatgtcgttattaacttttcaaccattatagtgaggctgatttcttcgcgtaaatggttgttgcccattctcttgtattttaaaaccataagtagtttgttaaagaaaataaaattatgcaaaacgttttctgtaaatccgcgaagattataatatttgattatcaaaagatccaagaccatatacttttctatcagggtggggcattcaaatattattatatctaaacatttgaggtgaatttggtcattaatcatgctacatctgcaattgcatctgcatcaagaccttattctatatatatatatatatatatattatatatataattatatattttccccctctgttggatgttttctattctaattatttgtgcttttcttgacataattgcaggcagttttcagctttataacaatgcagcttcagctatgttctgtgttcttcactttctcattaggaactagaactcactattttggacgtacgattctccatggaggtgcaaaagtaagtatttatttgatactcttgattttctggttaatgaatttttttttttgtacatggaaacaaaatgattactcacattttttatattatcaacagtaccgggctactggtagaggttttgttgtctaccacatcaagtttgcagagaattacaggctctactcaagaagtcattttgtcaaggcgtgagtgatcattactttgcttatagaagctctctctctcccctttatatataaataaataaacgataagtaaattcttagaaactaatcttcacaggtttgaagtggctctgcttctcatagtttacattgcatatgggtatactgccggcggggctgtttcatttgaattgttaactatgagtagttggtttctggtcttctcctggctctctgcaccctttatcttcaatccttttgcttttaattggcgaaggtaaataatttactatatttgcttacatatgatctctttatgttattatttttatgattttctagctgtgcccttatactttctatgcatgacaaaacccttgattaacagagcagtggaggattttgatgattggaccagttggcttctctgtaaaggcggtgtaggagtgaaaggagatgatagctgggaatcttggtgggaggaagagctggtaccatactttgtcattacaatttgcatttttttttttatttatttctgtttttctgtttccagccatactgagatccagaaatttttcttctaaaataaaaaatttataatatatttgacaaaaggaaagcaaaaaagtgattctttgagatagggatcagtgaaacaatggagaaggagattgggatcaagttgaagaagagtaccaagatgggtagtacctttgagatagcgaaggacacgcttggctgcatgatgatgaaccgtggtaggagcatgaagaaattgacacagtctgttgacggtgagaactatatcgagacaagtgagagtgcaacattgtaaagccccaactaggctttggtattcaaaagtattattaggaggatctccatcgtaaatagacagtggagtgagagacataggcgtgttgacaggtttggagtccaaaagattcgtcttagtgagcaaatcacaaatatatttggtttgggaaagatggagacccgaagaggaccaattaacttggataccgagaaaaaagtgtaaaggaccaagatctttaattgaaaactttgtatttaggtaggagaacaaggaatcaatggtgatagaggaagagcccgtgacgatgatatcgtccacatatatgagtacaataatgacaacagtagaagatctatagatgaagagagacgtatctccgttgaaatcaataaaaccccaatccaagagagaagtactcaacttaagaaaccaagcacgaagtgattacttgagaccataaagggacttagataacttacaaacatgatgaggttagtccgggtcaacaaagccctcgggttgttccatgtaaactgtttcagtgagatcgccttaaagaaaagcattttggatgtaaagttgcttaatagtccagtcgtaggaaaccaccaaagagagaaccaagcagattgggttgggtttaatcactagactaaagtctcacggtagtcaaggcaagcccttagccacaaggcgtgccttgtagcattccacagtatggcattgagtttaatacaatagacccatttacagcgaatcaccttacaatgaggaggaggtttaacaagaatccaagtgcgttgtttagataaggtagtgatctcgatatttatggcattattccacttcaaatcggcgctagcttctcaaaaattggatggttcaataggaacacctacagccacactataaaataaatgcggcttatacccaatttagatcttgtaatcatgggatacaacttagaatgagcagtggtagatggatgtggactgtccaagtcaaccataaatgggataataggaggtgaggagaaagtggaggaagaactagaagaagttgtagtaggtgttagggtagaggactaacagggaaagagtgaaactgagaaatagatggagtgtgtataggagtgagaataggaccaggggagggataaggattggaagtaggagagatatttggacaagggaagggaggtgggacagtcaaatgaggagaaggaggaggtatagagaatggtaataaagtgatgacatattgaggtttagtaagtgggggagagagaatagaaggagtatcgaaagggaacaggactcattgaaaaccatataaggtgtaagaaagatgcggccagaagatggatgaagacagagataacccttgtgtttgctgttgtaaccaaggaatatacaaggggaagagcaaaactcaagtttgtgacagttgtatggaagaaggaataaaaaatattggtagccaaacattcgaagaagagagtagttaggaagcttttggtatagtagttgataggggctagaatatcaaaggatacaggtaggaagtcgattgattaaataaattgcggtagagaaagcataaggccaaaagtagagagacatatgagcatgtgctaaaagagtgagaccacttttgacgacatgacagtttttgtgctcagcacaacctttttgttggggcatgtgagggcaagagagatcatgatgaatgccttgttgggtataaaacttggaaagggtgtgatattcaccgtcccaatcagtgcggacagtttgtattgggctatgaaattgagtggaaactaaaattttaaaagtgagaaaagtttggaaagcttcatcttttctggtaagtaagtagaaccaagaaaaatgagtaaaatcatcaataaacaatagaaactatttaacgccagtgatagctgtaacaggggtcacaccccaaatgtcagaatgtattaattcaaaaggctttgaagcttaagatacagagttgggaaaaacaagtctattagatttgcctaattaatgagtagtacaaaaagttaggctatctcttttcgaaaaggaaaaattacaaacagataaaatacgagaaacaacttctagagatgaatgtcccaagcgagagtgccaaacatcgacagaggacgaagacaagatcagttgtggcatggatgagcggaaagttggcaaagatggtgagacccgataaatgccttggtcaagtaggcctttgaggaggatttggtggttgtcttggtgtttggcaaagaaataagtaggatgaaattcaacataggcattattaacatgacatagttgagacacacttacaagatttttagacagagtagggagtgataaacctggcaaagtttgagaacatgggaagtggaagatgataaaaatgcagagcccacatgagagatagaagccaacataccatcgccaattgtaatttgattagaaccatgatatggagaggctaattccaagagatttaagtctgaagtaaaatgatgagaagcagtcgagtccatatatcaagtggggttagtaaccgtattggaggatgaaggagttggtagtaggggagggttatgcaatggttgttgttcggtgaaataggcatcgaatggacgagatggaggttcttgttaatactgtatgtttttgcagtaatagcagaaagcaacaatatgacccagtttgaaacaaattttgaatttgggtggacgaggggttgatgggagcaaaggggtagaggatctcgagggttaagggtatggttggcgagggtgatggaaggatggatgagtggggtgggagggagcattagtatttaggttggggttggaataatggttgttggggagtttgggagaaaattgagaatttgggaatggaaatttggggcgctgcttagggaaaggtaagttggcaaggttggcttgaagggagtttatggaggtgattgtcatatgtctttccaggcaagctttgtaactcaaaagaacagcatgaatttcctcaactgttggtttaatgggacgagctaaaatctgtgtgacaaattcattatactctagacccaaacaatttagcaaatgcactaaatggtcttggtgtgaaatcgattctccaatagaggcaagagtattgcgtaaggatttgagttttggatataagcaaatgttgtgagaccttctttttttaggttttgcaacgttgttttgaaatcggagctcccaacaaaagaggcgatagtgtaagtgcattccaaagaaacctaaatctgttgcagtggagaagttcacaatctgtcccagcataaactcagagcgagaagcataaagccaactcatgagaagtttgttgtaccgatgccatgttgtgaaatctacgttgatttaggaggagtttgaattgatgaattaaggagggcaggtcgcggtaccatcgatgtatcctttaagctcatttgcaataatgttttgcatttgtattctccaaacgagataattagattcatctagcttgacagatattgtttgattgagaggggtatggttgaaggtaataaaagagatgaaagatacagatgaggggaagaagaaggtgttgcagcggctgtggtattagggttttcttggtttataatagtagggtttacattagagttttacatgtttgcttcatctttttgtggggtaaaaccggtactgggaattgatacgatggggagcttatcactgctctgataccatgacagaaggaaagcaaaaaaaaagtgatgctttttgttggaacattgatgaatattataacaaaatatagaagtattctagtgtgtgtgaagtgaaaagagtcccacatgggatatgaacccttatttacaagggtatatagagtgcaactttggcatt

SEQ ID NO: 16216 - DNA, 2636 bp, Cannabis sativa
  modified_base (52)..(59): a, c, t, g, unknown or other
gtttattttcatcgttttagaaattcatattaggatgttaaaaacatacttnnnnnnnnatctagatcctgataaaatatattacaacaggtccctgaacgtattttttgtcaaaataaaatttaataataatctgatctaaaggtgttatgacaaaactatttacattttttgtgttcgtgttaggaattgtcttcaagttgggtatattaataaaaaaagttgtcaaaaattaagctcaggatcctatttttaccattttggaaaatacagggtccattttgttatttaacaaaacagaggatccaatcgataacttttataaaacatagagtctaaaatgatatttactctaccagaaattgtatcaaaattcctatcttttaatcataaggcttattcaataagaatgcatctaaattcataattaactaaataattatactgctaataatttgttaatttttatatctaatcatacagttattatatattagatttgacctttcctaaacaatgtaaaatcccatagtttacatgacattttctaattttatagatcacgagagtactacttatcacattattcatacaaggaagaagtaaagttccctaaaaacaaagaaaaagaatagagtaatgtaatttaatgaagcggttactgtgatctccgaaagtaaacataatcattttctgaaattttaacatcctgtgtttgttgtgtgtatagcatagaattaggagttacaaaataaagggtgataatttctttaaaaggatatatatatatatacataatatacaaacaagctttctttcaaaaacatataccaacagacagctgtaaagagcaacttattataatttgttttgattgaactttgagaaacaaacatataggagctccagctagcatctattaatagcgtagtgtacttcgggtactgaatttgaaatctgctacatgtatatatattcaagaacaaaacaaaaggcctacacgtatattctgcaaattcatgcacatggtatagtaaggaaataatacaaaagatcccatattgtattaaaaaataagttgaaaaaaaaagtaaaaggtaaaattaaaaggaagtcactattttttttataaaagtaaatactcctaaaatataggctgtcttggtgggaacgatatcccgaatattatcctatcacagtggcttttgtgcgtttagaatttcactgtcgagattaaataggggtgctatctgcatggtcctagtccgttgtgattagggacggaaccataattagatggtagcggccagtatgtgttaatcatacaacataatcgatttaagatttatttgatgattgaaattcttttttgaattagtagtgcatatcgatgtaagaaatatcatgttaaagtggagttggacagagtgtgttctgcggttgtggcaagaaatcatctaggtagggtcatctggattcatacttttaagctggaatttgctgatactttatgtggaaaaacggcggcttgctatcttgctctagatgtcgcgaagcatcatggtcttaagtttattattgtcgagagtgattcgagggtagtgatcaacgctctcaatagggacgttacccgatggaagattaagaactgtgtctcattttgtattaaatcttctctttattttgttttttttttaaccaaaagattaacttttattaaatcaaattagctaccaatatagcttctaaactagcagggacctaacttcttcgggaaacacagccaggaatagaaccagaagaatgagctaaaaagttagccgcctggttcccggactgtttaacaaaattaataatactaatgtggttaagtgggcgtttacccaccagaggttcagttgtatccctattttctctatcccgaaacatttcttttgtaatgaccgctgttggagaattcgagttcaatctctcacaccaagagagttcagtacacaactaagaacattccacaaacacttgatctcaaaaccagtaggcaaagccaattgttaaaccagaaaattttaactaggattgaataatagtctttctatctttattgattatgtatctgaattacaagtaaaggattagtttctacattacaattacatagtatttatagctaacgtatggtactagagaaaccgactaaagtaacggttttaactaactgaaagagttagttaaaacagttgcttatgtggcatattacaaagtcacacttagtctaacaaccgcgaggtctaactacgtttgattattatataagtacacttttctttaaaaaaaaatagaaatatcatgtttttttacttttttttttttaatatttcatataataaattagaaaatatgaattaataacttcatatagaaataaaacgtgagtggtgctttaataaagtgtcagaaaatttaattgtaccaaatttacttgtaatttataaaaaagaaaagaaacggaagatgtgtgtctactattatcaatttaagaaagtaattttcatttatatacaagtaaatatataatattataaaaaatgtgaaaaaaaaatataattatataattctatacaattttatgaatattt

SEQ ID NO: 16217 - DNA, 4885 bp, Cannabis sativa
tgagttgataactactcctcttcccaacctaaaatcattcttggtcaccgatatgatgacccaatatgaccatccaagcaaaactagcaaatatttatgtatatttttcagacaaaataaagaaaaagtaaaaaaattaataacaaatatagtggaattgactcttaactttctcagtaaccaaacccatctgaagattgagttattcaaataaccgaaaacccacataagcaaatgattagttataaacttttttttaaaacggtaaccaacttaaacaactgctttttcagataaatttgttggagcaaaaaccaagcatacaagaaattcccgcattgtttgtgtttctcaacaaccaagaaattacaattcaacaaaacaaaacaaaaagcagattattttgtttgattacggtctcaaattcctttaatggatttctcagtaagcaatcgaataaatccaccataatgttaaaatgggagaatagtaaggttagaagtagagtgtggaatcgaacctgagcaaccaaatctccgcctgaacaactcgattcgcctgaggaaaactcgcaccaccaactccgtcgaaatcgaaccactagctttgctggaaaagggaatcgaaccctaactctgattgagaagaaaatcacacatgcctgagaaggaaatggtaaacagagaggtgaagatgggagctgcctgagaaggaaatggaaaacggagaggtgaagatgggagaagatggagaggtgaaaatggaaaaccactagttttctatatctggaaaaaaaataaaagaaacttaaaaaaatgaaaaaaaaaaccacataataatttaaaataaaaaaataccataacttaaaactaaaatttatccatatatatctaaacatttaataaaaattcaaagtacaagtaatttccacaaatccaaaccccatgcacccgctctcgaactcgaccacccgaaaacccgaaaatccgatccgaggtattcatgccgcaaacttttttattataatataaaaaaaatcaattttcaattcaaccattcccttatttttctcctcttctttttatataatttactatttcgtctgcatcatcctacaagtttctcgctcatttgtgacaaaggacacacctagtcgggtcctggtggctcggaaaaatggtatttgcttgtgttttctttttggtggaattttttattatttaaaagacatgacagtgcttcttttcctttttccttcaatagtggtggatttgctcttaaagataacaaaaagaaacttcttgtcatgttatgcgtcacatgggattcacactttatgttgttgggtcccaattttctaaaccaggtttagacatcattagctgtattattataaatttttttcattagcacaccacaccttgtggtgcttaatttagaccaagagggtctcatcccaattcccaacccttctcacctgcgtttaattgggaggagtaaaaatatagaaatagaaataagaattagaatagaatagaatggaataaaatttaaaatatataaaaaaattattaaattttttcaaatcttgcattagaatggtctttctttccattttaaagaaagactcttctattgaaatgatatttcaatactttaaaattcaaccaaacaaatgaatggaataaaaattatttcctttccattccattctattttattacctccaaccaaacgccacctaaactaaacttagtagcttattagttcttacatgataatgaaggtaattgttaagtaagttaagtgtaaccacaccattcttatcctctttgtgatgtttgcttatgtaacaatttttttttgggggggcttcatgtaacaaaagtttatggttagagaactatggtttagttggattcttaaatggtgatgttggcattttgaatttttaataagataaggcaggtggtgatttgttgtttattgtttaatattccattatttggttactcttgcatcactatggtgggggttgccaaccaatttttctagctggtgcatgttataataacaagtattagggactgatttctaagaaatagttgacatttcaatttggttccaatgaacaacctcgaacctgacaagatttcatgttcaggagttttggcgctaagaagcgaagcaagtaattaaatagaaaagtctcataatggtataatgctacactttacagaaagttctcaacttttattttacagccttttctttaggactttattgacatatgactctgaattgagggtctcctcacttcagtttgattgaaatgtatgcaacaaaaacaccccagaagatttgatttcaataatttcttttttgattgatgcaaaatgaatatgttataagattattgtatgtagttaaggatgttactgtaactggtaagtggcttcagtttgttcatatacatacagttgtttttattgaaagatgagtgagaattgctcattttgcttgcatattgttgttgtattatcatctttctgagcatacattatatgtttttcccttatgaattcaaattttgatatgtttgttgagaacttttgaagtcatcccaagaaaaatctagcactatgcttccggtgggaggttaccgagtgactagtgactctgaacctcaagttggacaaagtgggtcatttcgccatacaagcagtgctagttcttcaatgagaaggagatcttttaatttatcaggtctgctctcctcacaaatagatgacaccattgaatgtgagagtgtgtcagaggcaggtgatattggtgatagggctcttcatagcaacatgaacagtaggagtgcaagccttcgcttttctttcgatcatgtatcagaaagtggggtggttgttcctattgcagaaaattccctttcacattcgaatgtgttaaactctcatgaccctacagtcttgaactctggctcagaacttttttctcctctttcaactgatggtatagtgcaagctgaaagcaaaattcaagtaagttttttcttatgttttttgttatctttagaagatattcttgcaacttcttggttttaatattttggtgatgatactgagagttcagtctagatatagtcatatcatgccagtacatcacaagctcttgtgtgcttattttgttcacttatttattttaatgcagaatgataagaaagaagtgccaaagctgctggagtacagttcttgtctcactcatttggctgtttttgggattttgggggtaatatacttgagcatcactttttctttttttccaaaatatcaattgctccccttttcagaatttgtaggagtgctctttatttatgtttttcttctctcttttaatccgggagattgtatgtttagtgttagaaggaaactgtttaaatgaaaacaaatcatagtaatgattgtttcagataaggtaaatatgttcaaatcatagtaatgattgtttcagataaggtaaatatgttaagtttctaaagttcaatgctatagatgtcatgctaattcagataaaagttactaattggtacagaataaggagctcttccccctttttgttcacatacttttcttaataaatataatggtaaagttgtagggtgagtaaagtcaacagttatctgtcttatgttgaaacattgatttatgaattgtggataaagtttttgatgctgccaagagcattaattggagataattacaattgaagtaatttttgattgcaatggttaatccagctacttcaataagaattggtaatttaaattatagtctttagtaggattttgcatcagcctaaaaacctcataaataataatatagtttgaaactgtatgtaggagtgtgttccttttatgttcattttgcttttgtttcaccaagcactacatgagtaactagatgtccaagttctaaacacaaagacctttgatttcccaaagcttgattactagctctctggtctcaatacacattggcaactttcatttcctgctgaatagaacgtgtaataatttttggcaaatcaactaattttatactctgtatgcccattaagaacattcttcattaacatatttatacggtgctacaaattttattctagagtttcttgtctctaaaatgttatatttaaaagtaatacattcccattaaagttccaattgcttttgtctttctcatcaacatatctttcttgttacatatgcaggtcttaacgaggtatttgctacaaaaactatttggtcctggaactgctggagtaacaagcgacgaaactcttctttatctcgaccttccttctaatatggtttctctctcactctgtgttccatctctctgtctctgtactttcatacctacacctatatagtattctgctatatttcctttgtgtatctctattttgagaatatattgtttagctacaattattacaaggaattgtgttgcatgtgatttcatgattattgaacttaaattcagtatccaagagcgcttgtaactactgaggttgtgagactctcttcaagtgaaattactttgctttctttcaggttggctcttttctaatggggtggtttggtgttgtcttcaaaggcgacatatctcgtgtgtctgattttattgccattggtttatcaactggttacctaggaagccttacaactttcagtggttggaaccaaaaaatgcttgaacttagtgtcgaaggccactgggtttcatcagtgctcggttttctaataggtaagagatgttgatattaggagaatgatttttgttttgggtatctacaatcatgacaagcagca

SEQ ID NO: 16218 - DNA, 3346 bp, Cannabis sativa
  modified_base (475)..(486): a, c, t, g, unknown or other
agttctctcggatagaagctgacattcaaatgatgttatcaccttgtcgccaagaactgcggttgttagatgaagcatcatgtcttcaagcgcagacgcgacaaggcttacatcagcaacctcagaaaagaagctcgctaccaaggttattgatgctatgttcccatcgagacatcccagaacgttacgatttccaacgtatttaatacacgtttactttgacccggtaaaagcggacctatcatagctgtgtgatttcaaatattaaccacatttattttacgtgatctgtaatcaaatcccacgatttcaggggatagttgttgtaaaatatcagccaactatgtaattaactgccttactatgtaattataaatagaggcaagttacactaaaaaagggacgaaagattcataagagaaaaaacaacctgagagttgtatcagaaatataataagattgactcgtggactannnnnnnnnnnnactgcaaaaccacgtaaaaacccttgtgttcatatatttctttttttgctttgttttctgtgcaagtttatcacaatttaagctcaaatatagttaacgaaaatctgcgttaacaactctcaacttccaaatgtgattttaaagggactcaattagtttcatattggaagcttcaatactctcaatcaatccaatagcgaccttgtacctacttttgacactatattcgccattattcgaaaagtgctacataatctcatcttgtaaatcaatactagagttgaaaatggatagaatcaacttagcatcatcgtcattaaaaacattttaaataaaatcaaaattgaatttaaatatacgagataaaattgaattttaatgagctatttcaaaaatggagtggagagactcccttgagtgctctaagaattttcattaattggagttgaacacagtcactggttaaagtaacacattaataaagcatcatcttatccagaagaaccacatgtctctacctctgtcccatctcatctcattccaacgcattaaccaaagagaccgactgtacactaattgtttcgatttcaactaaaaaccaaaatggtcaacaagacaccatacattgttgtctttatttattattaccatcatttatgttttctttgacaaaaagattaaacttggacattccgtcacacaccatttcttttaaccgtaaaaacaaataataataatattataattcgtttttgtacattagaatcaagagcttcatcagaagcaacactagtttcattcgtgtacaaaatttgagagaaagagagagatggagggaggtgtcaaaagagatcgatgggggtacgaagtgaagaccccttcagacgcttgcatctcggccatcaaccattactaccatcaggtttatccatttcttttttagtgtcgtttcgctatttctagctttccctttcaatatccataagtatgctgaatggttctttttttttttgaccggaaaaatcaaaggtgttaatttatgggagagagaggtctgtgattttgaaagcgaccttacatgaccaagactgcgttttggccaacattttggctgctcattacctttcctcctcggacccttctcaagctcacttctatcttcatgcggcggtatctcgactcgtacgttcattgttttttatctcgcttttttttttccgttttttttttttttggggggggggaaggtggggttgcggattttacttcgtggcgttatttggggcagtgggctaatttgtttatgcataggaactagctacatcctacgagaaagcagttttcgatgctgtccatagtttgatttctgataacagagacgatgagtttgctcttgagatgcatttcaaggtatggaggtttaactactttgtctatccaatgtgcctattcatctggcttgtgtgtttaactttttcttttaaactgtaaatcatactgaagcatctgtaggtgcaaatcatcttttaactatgctaatccaatcttatatctactctgatcgaaattatatatagatgaagtgtaataccactcaagaaagtgctttataaatttcatattttcaatagtttgaagattatgaagttgttcatgtgatcttctctacctgtctttgttcaattcataaaatgtgtttgtgttgcagctcttgaaagattttccaaaagatttgtcctctttgaaaagagcccaagtgatctgcttctacatgggacgagccgatacgtccttaactctagttcagcaggttcacttttcttctttttatcttggctatacaaatattagcctttaaaagaatttagtatgcttggatttattaattactgttattgcattcttgcgtgatttttatctagatgcagtcattggcataggctaattatacatcccatgttcgaatccctctctctagtgtcaaagaaaagtatgtgattttgattggtctatttacaattctcacaaacaggtgcttcctcaaaatcaactagaaaattacatatacggtatgcttgcttttcctttattggagctaggccaaatggaagaggctgaaaaagctgcaagaaaggcattagagattaacaaggatgattgctgggcccaacataatgtgagttataataattacttttgttttccattcgttccacctaattattctaaagctttaaataattatactcaatgtagtgttttactattctgaaattgttacatcaaatgagataaatgctaaagaggcttatcacatcttttcatatagcacttggtaccaatttcagggcatggacctgattaaaaatacatgttttaagccttggctggttctctaatatttcgatcttttgcagttctgccatgttcttcagtatgaatgccgttttaaagaagctgtacaattcatggaagattgctcatcttcgtggggttctttgtcatcatttatgtatgtatacaaaatgaggttttttttttggggtgtatgtgtgtgtgtgaaataagtttagactaattttacgatcttaggatcacacacaactggtggcatgttgcactttgttacatggaaggtcattcgcctatccaaaaaattgtgaaggtctatgatcaacatatttggaaggagttagaaagagctgatgcgtcacctgtagaggtatgttattctaattctcaagtaccttcgacataaccaagttgcatttccattttatcaatacaatagaagaatacatattcgtaagatacaaaactaaactacttgtttttatagatttgtctttttttttttttt

SEQ ID NO: 16219 - DNA, 5709 bp, Cannabis sativa
tttttttaggcttataagtaattttttaggcttagttcccaattaatttcattttgtttatttatttatttattggtggaaaaagtaaatattaaaaatagcatattcttctaaaacccatatctcacggaaagaagctggaaatatccaaacacaacacaaccaagttgccttcttcttcttcctttgtcagtctctgtaagtaactgtactaccaatctttctctcctttgggggttttcgaggtcggaattcaactgggtcgtcatattttttggggttttcaaaagggatattcaaaagaatcgatctttcgtacagttatggtgaagtctacccagattggggatggtggtgatggtgggtctggttcggcttcttcaatagctccttttctaaaaaagtgctatgagatggtgaacgatgattcaacagactccataatctcttggaacgataccaacgacagctttgtcatttgggatatgactcaattctcagtcggattgcttcccaagtatttcaagcacagtaatttctctagctttatgaggcaacttaatatctatgtgagtctttttgttcttcttcttcttctgggcaattttgattttgctttaaaagtttatgtttggattttttgatcaatttggctggcaaattttatgccatttcctttcttgatggacttacccctttcttgcattgaccttttgcccattttggattcattttgatgatttgaatggtctcatcacattcattgtttgtggctcatgttttagttttgaatggtttaactctgttaataaacttatgtgaattaaggtgaagtgtatgctaatttgattttagtaaatttacagaaatttcttcaaactttgttgatctttatagaagtaacaactgttaattactagtacaatttatgctgtggaaaaagcttcttgaaaatcaatcaatagtgaaatttagtatgaaaataattagtaattacatatgaaaataataatttttagtatgaaattttttgagtaattacacctgattcttatcagggcatgagaatctaagagtgtgaaattacttcaaattatgcagttacaatataattacgtgatcaaacaaatacacaaaagctagcctgagagagaaaggtgtctaagtaattatatactaccaagcaatcccatacttgatcaatatggaatcttaacaatacacccccgctctatggtggcttactctgggcctaatccacaagtcacccctttcacgatgtcagtcccacttgtgggtgtatgactctgataccacttgataggaattttctatcaaattgtctagaacaacaagagaatagtagaaaatactagtatatctcggtattcgagagactcagtgctctcccaaagccaagagctactgctcagtgctcaatacaaactcattctccctaagcataagcttctttcaactctttttatattgtactcagaagacaaatttagtaattcatgagtaacaaccttacttttcttatttacatgacattgtgtgtttggttagattggccaatgaactctattgtatcaatatgctgtgttttcctttccatgattggtaaactagacagtggtgcccagctagaacaccctttaatttcttctcaatattgttggtattaagtattgaaataatagtattggtttacatggttttgactgagatactcaaataatggaaaccataaatgttgacagggatttagaaaagttcatccagatcgttggatgtttgcaaacgatggattcattcgaggccagaagcatttattgaagaatatttgtagaagaaaacattctcaagatccagaccagagaaaagcattccaacagaaagaatcccatccagaagaaacctatgagaaggttgaagatggtctatggagagaggttgagaatctaaaaatcgacaaaggtgcactcgctcaggaattagtcaaccttcagcagcaccagaaaactgctgacaataagatgttggtcttgggagatcgtctccagggaatggaaaagaatcagcagcagatgttgtcctttctagtaatggctgtgcaaaatcccgggttgtttgttcagttgcttcaaccgaaagaaaacaattggcgcatgagtgaagcaggaagtaggctagaggaagttacagaggatgataatcctgaagcagcctcggacggtggtatgatagtaagatacttaccatctcccaatgaaacttcaaaccccgtgtttacatcaacagagaaaccaaccgaaaccagttcatatccagatgggatgcaggattttttcttgaactcagattttatgaaaattcttatggatgagaaattaaatccattagaaactcattccccgtttattctaccagaattagccgatgacaattcatgggagcagcttcttttggccagtccctttcgcgaagataataaagattcaaaagacgaagaagagaccaataataccgaaaccccacaaggcgaatgtagaaatttcgattatttagaacatatggaaacatctcacaactttgagatggaaccagcagtttatgaaggtcagtttgaaatgtctcacaacaacatggaaagtttggaaagtttaaatgaggaaatgggagtactgttgtcttctgagccagaaaacaatggtgtggcatgaactgaaatatggtcacaactcacaagacattttatagctaagatatttcaagatttttatgcaccttttttgaagctagttatgtaatctacacaaaatgtaagttggtagtactctcaattcttatatacaaaccatacatacatatttctctttatgtctcgaagaattatatttccttaaaataggtattttttccccttaatatcattctttgagaaagctaagaaaatttgctgtgataacttaaatgttaagacacatttttggcatgtgcagagcagaggaaggaatatgccacatactataagcccatattagcttttccttttttactctcaagtattaatttcagaatttttacaaaatacctaaaatgttattttctttatttacttttctatgatttatttttctactgagccaaacaaaaacgtgtaaacaacatcttgcaaacattggtctacaaagaggtgttttggtagattctttatttgttttggtatttaaaaatgctttgtagcttattttttgtttatgatcgcatatgttatagctatttaggaccacctgtaaattttttgaaaattttaagtagattataatgttgaaaataatatttacatattttttttacacgcgactatttttcttatacgtgtggtcaataactgtttaaatcttatttttggagctgtaaattattcataattttttaaaaatttacaaatagtctttaaataaagacaacgtatgtaattataaaaataattagactaaaaagctctcctagatcctgaaacacatataggtctactagaacgatcattcagggaggtctactatataaatttcctaaactatatcgtataagttcttcttttgtaaataatatacaaataagagtgctactgttaacctcttattccaaccttttactcaatctcaatgttcgaaatcacatagcaaattttttttaacagtgtttgttatagttacaacattatttctgtaaattctttttaaacaaattgaataatttatagtatcaaaaataggtttgctatttattgaatatacgcatagtaaactaaaatatcaaaattttcaatttggtaaaatatttagaatttttcaaaattctacaaggatagcattataattttaacgaatacgactataaactttttttttgaaaaaatgatatattctaacatgtaatttcatacttaaaattgattaaaagactgtaattaacactcctcacaaaaaaataacaatgggcacttttttttaagaaaaaaaattcagttcacaaaaatgttgaaacatttgtagatttgtatttttgtaaattcttttttccttttacttgtaaaatgggcccaaattgatttgcatatttatgatatatccgtccactaaaaaggcactaactttacatttatttcccaagacaaagaagtgggaactagggaattttaagcacaataagaaagcacctttgtgctgaatttatactattcatgctgatgctagtacacaaaatacattccatttctctttcaaatcttttgtggtctacctaaggatcatgaactacttgctcaaaacaacaaaagagatcccaaagataaatgaaacaaaaaactttaaccaaactaggaacatgcaaaaatctttagtagaataaagcagaactagcaaacaaacaagaataatactgaataaatttcagtgttggatagcctttgccatgccataagcagctgctgaagcaatggcaccgatgagagcggtttgaaaagcgctcacgagaggtctgctaccggtgaagtaacccttggcatagccgaagatcatcaatgctgccaaggttacgacaacagaggcaacaacagcttcggttgccttctcgaagaacacgtaaggaatgagtggtaccatgcctcccaagatgtaagcaacagctattgttatggcactttgatatgctctctttggatctggcttctccagtcccagttcaaacctgtaacaattatacatatatacattaaagacagtactaggaaacaactcgtgtaatactaaaacccttccaagactccctttgttgtctttagtcccttaggtaaccataaaatgtatcattttcactactattatttatggtttcattggacttgaaaattcccatcaagtagtattcaggacagtgttaaagtgattactatttctagtgaaggaaagttaaaaaggatattcttgattcaaagtttttggatattgtaatcatcaattcagatataatatagttaatggttttcactctcatccccaatgcccagtcacatgggttttgtccacattccaaaagttacccaacttttaaaatacgactgttcctcttagtgggatttgatcttcttatatcagagtactagtagtagtagtgggtggcttggccatagcgaatggacctatatgaacacactcatcctgccaaactggtcctcccaagaatcttccagttcaacatgcaacaacccactatacacaacattctgtaactttttatctatctctattctttacacccaccatgaagataaactaataaagtaggtatacagtacggtatgaatttattttaactctgcaaactgattataactcttttgtttattgtgactatgcgtacaacatatgtttttaactctaattacgttattattttaaaaatttggcggtgatcttttttgagtcttgtgattataatgaatgatgtcttaaaaaaatagtactatgattaatttaagaaaaatgctaaaatttactaacactgtctagtacttttctatgcgtcaatatttatattggttcaactaagtatcgaattttatataataacttttaagaagtattactaatcaattgcaagacgacatatctaaaaatattaggctaggcactacaaata

SEQ ID NO: 16220 - DNA, 11866 bp, Cannabis sativa
  modified_base (10801)..(10803): a, c, t, g, unknown or other
  modified_base (11660)..(11681): a, c, t, g, unknown or other
ttaggtattattaccaccaaaaattaaacttagatatttatttgtaactgaaagttaaacttaagtatttatgccgcaaattacttaaaataaaaataaagagagtataagtataaaaatatttacaaaataaaagtataagtgtaagaagaatttaaaagggactaaattgtaaataaaaaagttaaatattagatcgaatatgagaattagctccttctatctcagtttgagtaaaagtggctcaaatatggcataactgcctccaataccaactcgtatcagcttttagctaataactccaaaacctttgacctcttaaatagacatgactcacccatttaacccaaagaaaatcatgcaactaactaattgcccaaacatacttggcactcatagctttgttccatttagttccttctaaagtcccacccccataagcttttggggagacaaaaattttcccaaaaaattaagtgaaatacttcttgtaccattgtttcccataaaaccacagacaaaatttgtcaacttccttaacaatgctttgaggaagtaaaaaattactcatccaataattttctaggcccaacaaaatagagtgataagttgagatctatccgcataagagagatgtcgacttgcccaagagtgaagtcttagcttaatctttttaatgataatgtcacgttctttagctttccactttgttggtctcaaaggcacccccaagtacttaagaggaaaagatccatcttcaacctagagaacttgtagtagttgttgcttctccggcttagaaatctacctgagacttgttgcggttagccccaagaccagtactactgcagaactcatcaaagacatctttaacacattgaacaatcccatgttgagctttgtagaagatgagatcatccgaaaagaagttaatgatattgagactcttatacattggatgaaatctaaatctttattgtctagccccaaacctaagcagtcaagtaagatactacatcacaatcacaaacagcaaagagaatatggggtcatcttgtctcagccccctttatgccttgaaaaccactctaaaatctctcattcatcataagggtataagacgtatccttaacacaaaccataatcagtgaataaattgagtgggaaaacaaagcctagctaatagactctcctatgacataatttcaataattttctctctctttgtaattagattaatgctataagtgattttatcaacaaaaaaaaaactaacttttttctctctcttctctctttgaatctctcaaaaacaaagtattcagaccataaatccatcgttaaaacactcattcaattgatttttctttctatatttcttaattaacaacacaaacaattaatacccccaatcagcattgaacacgcaccatcactatagaagagcacccaccaatttatgttttagtaattcaaaatttaatcaaaaacttaaactcatgaaattatccatttaaaatactaatttataactttcgaacacttatgttaacatttttttttcgagacctgctctgaaaattgtatattttattgaaattgatacatttgcgatgttttatgatatatttacgatacttaacgatacatttgcaatggtggcataaaaacttcacaaaaatgcgatgcgtaagttgtaataatgcaatttttatgacaccaaactttctttcaaggaaatatataatgtttaatgcatatacgatgtttagcgataaatttgtaatagtgctatgaaacttctttttaaggcaagacatgtgtttaacaatgcacatgcttaacggatgtgtgattgtcatataaacttttattttaaaacattacgatgtctaatgatgtatttacaatagtactatgaacttaatttttgatgcaaaatattgcttttaggttttttaacaacgccaaaaaatgacgcttaatacttttttgatgatttgcgatgatatacaattaaaaaaaaatgaggcatttttaaaggtgttttttttcttttcaattttgatccccttttgagtttatgattttggttcaataaatttataattatcagtaaaaaaaaatgggaaaacaatgtaaacgacaaaatgtcatcttactatatattgagtgcaaacggccacaagaaacataaaaaagaaagaacaaaagaaatatcctacaacagcttttacacaacacttttcacatgatacacatgaaaaaaaaaataacaagctgaagttcatgtggttgttttaacttaaaacatacataacttcattgttcaatgaaaaaaaatgacatgactgacacgacacaaagcatcttcactcatttgttcaatccaataagagaagtgttacaacaatgaaacattggagaatatgataaaataagaaatttagatcaatcaatgctaccaatgccatgagcgatgagtgatttaatggccaatgttctccttttcatctgatgtcctgttttgcctaataggacttctgggaggagccagagccccagctgtctctttgtagacacttaattcatctgttttctcagcattcctctctttgaataaattcccaccattagacgtggtgacagaccgcattgccctcggtaattttataggaatgtcagccccatttgcaatgttatctaacttctgagattgcagttgtggttgtggttgcggtggttgttcaccactttctggctgagatgaaggtagtggaggattggtaacaagttgtatcgaagatgtcctccatttctttctcttgttaggctttggtacatttggttttgcctgtaatattagtcaggaaaccatactcaaaacttagtgtttgtctaattaagagaaaatcaaactttatatttggtttaaagagaagcatacagttgtgtttccaatgtcagaaagagcttttcttcttggaccaccatcttcatttgcctctgtaggtttgtcaaccaacgcattctgtagaagcatggccccatgagaagcaagaagtctatccttctctggttcatcagcccctataccatttataatcctttcagtaaaatttgactgctgcaatttgtcgacttctctattgacacatttactggccatacaaccacatgcagtcccacaaagcccaccagaagaccggcattgacatttatttgttttgcatgatgagctcttggtgcaagaacagcatactcctgaccctgaagcatagttcttatcaccaccagcagcaactattccctcccctgaactgtctaactttatgctctcgtgatcgctattatttgatgaatgagatccggggttagagtggtttctgtttttagagtttcttttcttaactcgttgcctcttaggagtctcctcttcacttacataatccacatctgatttttccgtatctgaattttccatatcggatttttctgagacagatgtatccatgtcttctaggacaatgaatgagctccggtgatcctattaaagcatacattgattgatgaattcatataaatatatatatatatatagcatgtagtttgaaacatactagaataaggaatgactagtggaaaacctaaaaaaataagacaatgcaaaggtagtgatagcataccagcttgcgtaagtcataattatgtcctcccttggcataatgcttcagagctacactctgttcaaagttttaaaagaatgaaccaaccgatagttagcacaatgaagaagataaagaaaaatgaataaatgctaacaaaattccacaaagttgatcacgaataacaaagataaaagtaaaaagttcccaggaatcgttctattgcttcttgttagcaatatataggtccagctgtcaaaacatatgttgagatatcaaactatatattgcgctaataataaaaatcaattttccttccctaacaaatacaaataaaagaatagacacacaccatcaagggattctattaatttactataattggattttttttaataaaaatacatcggaatttaacacgatggctaaaaccaagagtatgcattgttgtatcatagtgagccatgaaaactaacctgagttttcacctgatgaataagctcagccttttgcatctctgattttctaagcaaactacttaaactcacaattttttccttcaaatctctaatttgtagatccttctctctgcatacaacttccgtatcgcgcaccaagcaccttgaaaaacagaccaaaaaaagtagtttagaatgttaagtggaatgttctagctcagctatgaaaaacttaacactgggatacatatattacctggatgaagatgctaaattgaatagataattcatcaaattctttgcatcagcaagagaccgaacttgactccaacgacctctgccgctaaaaccccgctcgcgctcctctgcttctgataattgtgatgccatagaaacaagggtgctagatgaagaagaaagcatattttcaagtgcataaatccgtgagtttcttgcaccaggagacatcgtttcaggacaatctctgcagtgagccactcaacatattagcttgtacagaaaataaaatataaaacatccactcaacgttcggtggcaatcttcaccttgaattagcttgtttcagcatctccgcttcttcctttagccttgcaatctccttggccattctaccccgcctgaacaagaagcattcgttaaaatagaaaaaaaaaatagacaatcagagatcaagcatttgaccaataactctatgtactaaaataagagcaataaacaccaccaggacaacaagcataacaagaaacgaaaagcagaaaaaaaactgtatatgtatttaagagcaagcaaataaaatgaagaaaacctactcttccatttgtctctcatattcagagcgcacttcatgtacacgtagagtaacttcaagctcatgttcaattgcttgcatcaaagccttaaatagatagacatgtacattatgttattaagcaatgtaactaatagcctgaaacaaaaaaggactagcaccagtacaccctttattaatgcgaatcggttaatatacgtaatctttttttaacgttatagcctcctagtttacgcacatttaagaaacagtaattaagtttgtaatacctgaactcctggaccattgatgcttccaggacctgtatttattggaaaaaaaatggtaggcaattaaaattttgaaatgtcataaaagtatataaagatttttgcagcaaatcccctaaccagaagtctcacgtgaagaagctttccgagcttccaaaagctcttttagcctttttgtagccatggaggcttcttctgtctttcgttgtaaaacctgaaatgaaatacagaataagtactgattcttgttaaagagaccttaacaccaaaaatgagtatttgcttaccattttttgcctttgatttaaagctaatagcttatgcatctcatactcatttctccttccctctttcttaagctgatagttgcaaaaaacttgtcagaatctatttgcgtacttcccaggtagaaaaataaatattgcattcaagagtccacaactcacgaaaaaaaatacattttttaatctatatagactaaagtaattgttcaaggaaaaaatctgacactatagtagatcatggtattcatttgagcacaattgattaatgtaactgtcactttcagcaattcctttggtaataataataataaagactcattttacctggagaacttctttctctcgagacgctttccataacctaaattgctctgactcttgtttgatcttatgttgaagttgaacctgggaaaacacagcaatttattaaaaaaaatacaaataaataagaggttataaaattataattataaacaccagtattccacaattttggttaataaatggtcttgaaaccttctgagtttttattctctgaatctcgtcttgtagtcgttttgctgcctcatcacttttctgtttttgtctcaacagctgagcttgagcatcttgttttttcttcaacacggaaacctgaaaggaaaccagtaaatccaaatatgtaagccacttaaataaagggaccaaaaaacttataatcacatttaagcattttataatgaaaaatcagcaactttgaatcacctgtgattctagaagattcaacttctgcagataatcttccttcaacttttgagctccgtcatcagtagtaaatgaaatatttgcaagattgtgtcttaattcgtcaatctctctctatcatagaaagaataaattacaaccaccaattaaaatataaactttacaatagagccatattattataacagattataccaacctgtaaaactctcttctcttgttccaactcgtgaacttttttctcataatgttgtttaagaaccgaggtattaccccctgcaactcgcttcatttcggcctttaacaagaaacagaaaaagttcaacaagatataaaaaaaatggagagaaatgatatgaaaatacaaattttatggagaaattttatagtggtatatacatatatgcatttgttgcaagtaaagatgaaaagaataaagaaagagaacagcaagaaatctagaacattttttccatcaatagtatgtccaaaaacattctaaagcgttggtttaattcaacaaacaaataacaaagcccacaagcaacagccaacatttcaataatcattacctccttttgttcaagttccttatccaattctttcagttcacggtccaatttttcttgaacagaagaatgttcttgctctttctcatgatcaacaatatcagctgcacacgagtgaaaataaattaataaataaaattggaagtcagagcaacaagatttatcaacatatacaaaaatgtcctgccacattgaaactataggcaatgaaatcaaacaaagttacctgctatgtccccaattttgcaatcataatcagaatactcattgccacaaggaaatagtacattcttagaacgaaattcatcatcatccaagtcagcacaatcaataaggccatgttttctattgttcgaattcttcaactgcaacaattctccttcaagctcttgaattttggatacataatttttcaacaggtcatgttcctgaaaaagtttaaacaacaaatatagaagtttaaacactttaaacaaacattttcttttttggagaggaaggaatttattcaaacctgctctgaatgtaactccacttcatcccaagactttccatttcgagccatttcaattttcatggctaatttatctttctcaacctgaagaatccaatagcatatataagttcaagggcttccaaacaaaaatatcgaaaattatactccttataacataaaagctaaacagaaataagaacctgagcttcaaaagctctctgcgttagatgttcgcaagtaacttgacgctcttgcaactcccgttgcagctcctctttgcttgcttcaagtaaagacactttctttttaaggatctacaaagttgcaaagatcacgaaatcaacaaccaataatcaaaaaacaaaaataaatttgagcgaggatcaaaaagtatgcttgttagtactaacatacctgtaactcctcatagggtgtaccggcatcaccacgataaaacaaaagctcagcttgcaattgctcaacttggttcctcattctttgcaactgggctgccattggatcacgattgatctacaatcaagaaaatatcaagaatgtcaaaaagaaaaacattgaatattgaaaaagagttcaggtatttaacaaatcaacttacaactgccttgttttggatgttacgagcacggtttgcgtactttagtgtgttcaatgtctcctcagcatttgtgtcagcaggactaacacaagctacatcaaacaaaacaaaaacataacttaataaggggaaaaaatgtaagggaaaatattaactacaagcatattttcattaacaaatatacacaagcttagcatacctatcatcactgtcttgctatttcctccgagagaatcctagaaagaatttgtcagaaactacatgtatgtatggatatgtatacatattttacacacgtatacgtatacagttgtaagaaatactatcttcttacctgtagtaagcgagttaatttgctatcacgataaggaacgtggccaccttcttttcgcttcttctcatctcccaaggcacttatcacattgccaagagccagtaagcccttgtttatatgaatgcctaaatcatatgaccatgtgttaacataaataaataaagtgtgagacattaccaaatcagggaatttcaagaccctgttgccataccttctttaaatcgcatgccatcagcacccgttcgctttgctcgttcagaacctgcaagatctaccaagtgcagttttgcacaaagaatttcatctccaaaatcatcagtggatgttccatttggacagcttacaatctttttttgctccatggttattgtaaagatagcatgtgaacgactgaaacaaaaacaaaatctcagtatctaaaaagaaattacatataaactataaagcttatatatgtaaagaaatcattattcaccttgactgactattcatattagtactcgcagtagcccgagataaagagccacgagtcaaatacgatgccatctcttcctttgtttgaacctctgcctcggtcacaccagcaagtgttatccctccattagcagtttctctaatctgtatcggagctcttgcaggcccaacaggcttcgaaggagctgccccttcattcttagagaaagttgttgaactcgtgtcaagtaaatcaaacacctcctccttgaatatctacgttttaagaccaaatatcaagtattaagcacaggtcaatgatcataatacagaaaaaatgttttaaatgatgtatcctttccggtaaattatcaattacctcaataaaagaaactcgaatcaagaactctgtgttagatttcttactgcaaactccttcgaaaatactatccatgaccttggggataataccaaagctacttccttcccctgtataattggttcccattgtgtatgttttgccagaaccagtcttcattgttaaatacaaccaacacatttcatcagcataaacattaatttgattttgttattaatgaaaaaaaaaaaacaaaaagagccatatcgaaatctcaaacctgcccataagcaaggacggtagcattgtagccatggaagagtgcatctaccaatggagcaacacaatcttcgtaaatggtagaaggagatcccgtgccaccataaacataatcatacgtgaatgaatgtgaaccaatttgcacctgtttagaactccaagcaattaatacccaataatgttgtagaattttatgttgtcaaaaaaactgatatatttagctccataccaacttaatcaagcagctcagttattattaaaaaataaataatactgattcaaaaaaagctgtacctgtggttcacccggaacaacggaaatgcaatccgtacagccaaacaaaacctccgaagtaatcaatggacggatgttaaccgctactcgaacgcactgtgatgaatctacggccttcgtctccaaattttccatctccacttaaccagaaaaccctaaacgcacccaaatcatttgaatatttttaacaccatttcaagaaatgaaaaagagttttcaatatcaatacaccataacacgacaaccaaaaaaaaaacaaaactcatgcaaaatatatgataaaagcataaaaatcattgagctaaacaatcttgaatctaactccataagaagacgaaaatggatctgtttctgaaattaccgtcttcaatgcaatacagcacaaaaaaaaaaaaatcttgtaatatgcgataaaatcagaaaaaaaaccctgagctaaatttatgtctgatctaaataaagaaataggtaactggatctgaaattacttgatgacgatgaaatagaaggaattttttggtgcggctttttcttccgaacaggaagggtttgtgtagggagggaccctcacgaaatttgaaagcgggcgactgagatttgaaattgtgtgcgtcttttccgaattcaaatatagagaaagagaggagctcacgtgtttgtcacgtgattttcctaacggtacttattttaacatgtaaataaaatataaatttaattcattattcggacattttcaaaaatcaaacaattaattcattaattattcggacaacgcggcccacctattttttttttaagaacaatcagttcatcaatatggactcatttaaactaagtaaaggagatatgataatataaatttttggaaaaatgatttgtacttaagtgaaagatcgttttactacacctctattatttcggtatttaagaaataatttaatttaatttaattttttcataatgtagttttagtgttattcattcaattaaatccgtactattttactcatagtacatctcatatgcactaagtgcggatttcatattttggatctaattcaatccacacaatatctcaaatctaatttaatccaatctgcaaaaatacgaattagatgagttattttagattggttacttttcaatattaaannntttaatatttatgaaaaaatatttttttttcacataactagaaacaaaataaaataattattgttattttatgtctccaacaataaattaaaataaataaaattaaaaaataataaattcaaaggaaaaaaaattatatgtataaagaaatgtttaattttgttttaaattgtatatagaaaaaaaattattgttatcccaaattgcgcacagggtaacgtggcattcatttaggtgaaacgcaaacattttaggttaacacaacaaataattatctagttaactgaagtttgcttatcaaagacttcagttaactagaaaagctcatacatctagatgatcaatagttaatggcgttcatctgcttcacctaaacaacgacttcagaagtatgggcttttctagttaactgaagtctttgatgagcagactcagtccaactaggattatgtagctaagtctcctccttaactttataaatacatattatctcatcacaattgtatatttttgatgatcacataaaataaaaactgcttctgatttagagatatagagatgaagacttagttgacagtattgcactatcaaattgtgtcaatttctatggatcaaccaagtacgcaaacttaattattatctatttattatatatattatagtgttttatattatatacaaattttgtatcttgggattattaatttttctaacatgtgttatcagagtgctaattatatataactaggggactaagccgcgcttcgcacggatttgaccccatttttgatacaatttataacaacaatataagtttattatgattattataactatcaattattattattattatnnnnnnnnnnnnnnnnnnnnnnattattattattattatagaaacagtaattgacacaaattttcataattagaaataagttgaaaagaaaatgatttaatcccatagagagagcacatatatacacatcctaaatgttacatggtgcaataataatataatattattacatacacaactaaaaatatatactatgaactatttttt

SEQ ID NO: 16221 - DNA, 6350 bp, Cannabis sativa
  modified_base (59)..(61): a, c, t, g, unknown or other
  modified_base (827)..(847): a, c, t, g, unknown or other
  modified_base (3868)..(3869): a, c, t, g, unknown or other
taatacaatattatgtttgatattgacttgtatcaatagattgtgtaaaattataatannnttttaataaactcgaccccaacacaaactccggatcgggtccaagtcccgcgtccgggtccgggaccctagcccgggttcgggtctaggtcccgagtccgggtctctaagtttggagtctcgggtctgggtccaaagttttggaaccggttctggttctgagtctcgatcctgggtccgtgtctgagtccgggttagggtcctggtcccaagtctcgggtttgggtttggtttgggtcccgggtctgggtctcaggcccgggtccgagtctaggttcgggtctgggttgaggtcggggtctctatcccgatctgggtccgaatttgggtccgagtccgagtctgggtatgagtctggatccaaagccgggtccagatccgagtctaggttcgggtctcgagtccgagtccgggtccagttttgggtcagggtccgggtcggagatttgggttgacgtaccccaaattctttataaatattataagacaagctaatacgaaccaattgttatatatcaaataatacaacttacattgttttaaaaattttagtagtaataattaatacaatacaactttatccaaacatagtgttatttattatttaatacaatacaacccttatacgacataccaaacgaacccttaatgtatgttcactattagagtgaaaaagaatgtcatacaatcaaatcttttatatcttatctttgttattttttttagtattatttttttataaattaagaaaatttaattatttaatnnnnnnnnnnnnnnnnnnnnntattattttaataatttttagaggtatttactattaaaacattttagagtaaaaagtgcaaaaataagaaataaaataaaataagatattatattgtcaagtaaagtgaaaattttcacatccttaaacaatgccacaattggagatgcacttaggcaccttaaggtgtacaacatcatatagatatagtgtgtttacatgaaactagtcctgataacgtagatattaatatttaacacgtgacaagaagaaaaacatttacagagttgaatagtcccgagttagcaatcgacttgagatgagtccctagttttgcgcctaagttcattccaggaactcctgaataagtgttttgatctcgccaaattattttcaatttacaatccttcattattcttaaccaaaaagacaagaataatctaagtctgaggcctgaacagtgaaaagaaacgaaacaacatttactttttagaaatttgaactcttttccttaggcaattcttttgtaactctcatgagaaatcaaaactcaaagtagacggaactcaattagtgtcgtgatatggagagttaactactatagatgtaatgtatctctttttaatatttacttaactcattcatcttgcgaatctattaaacttgtattgctcattttttaatgtcaacatagtgtggtataagtagttagtattattttttcataaattaagaaaatttcattatttaatatatattaaataataataatattattttaataatttttagaagtgtttactattgaaatattttagggtaaaaggtataaaaataatgtaaaagagaaataaaatattatatttttaggtaaagtaaagtttttcacacccttaaataatgccataattggagatgcgcttatgcaccttaaggtgcccaacactatggaaatatagcttgtttacatgaaactagtccttataagttataacatggacattaatatttagcacgtgagaagaagaaaaatatttacagagagtaatcccgagttagcggttgacttgagatgggtctctagctctgcacccaaatttactcgaagaactccaaaatgagtaattagatcccgctaatttgtttttaatttaccatcctttaatattttgaactaaaaagacaataataatctaagtttaaggaagagacgaaacaacatctactttctaaaaatttgaactcttttcttagtcaattcttttgtaactctcgtgaaaaatcaaaactcaaaataaacgtagctcaattactgtcgtaatatgagaaatactgtaaatatagtgtatctctcttaaatatttacttaacttatttatcttgctaatctattgaactcttattgctcatttttcaatgtcaatatagtgcattataaatggttattgaattcagatattatttataaaattataatatttaggatctgatattaaattataacaataacaataggatgaaatgataatgagtactttagcatttgtctgatttaataaaactattattggaggtggtgaaagtaagagtgaaagtgaaagtggttagtgccgctaatgcagccacgcaactcatattctattcatatattcaattcaaagttccaacctttttgggatcatcatagggtttgcgtgcaaacacataatcacccttttctttctcttccttgatttggtttatggtggggcattgtattattccaggaacaaccgcctcaacaaatggtaggtttcattttggggtttaagaatgaatagcaaccattttggggtttaagagaaagagaaatatgaaaggggttgaaagaaaaagccgagttgagcaattctcacctcagtattatgggatttgtgctcttggtggaatgatcagtgctggttctacccatttcgctagcacacctcttgactgcttgaaagttcatatgcatgtaagtatcgatgttaaagtttcatacttttaaactattgtttttgttttattgaaaatgttgtcagcatccaaaaaaaaatgtcaatttgtggggggggttttgttttgtcagtttcttgtacacttagctatacatattacatgttccactcattcaaatctctgagatttatagttgtttttatatggtttattaggtgaatccagtcaagtataatgggtttggttcagggctatctactctctatagagaacaaggccctttttccctttggaggggttggtctggaaagttatgtggatatggtcttcagggtggtgccaaatatggtttctatgagtactttaagaatacttactcagatgtattgggagatagtaacaagagtttcatatactttatcagcagtatatcagctcaagtaattgcagatatggctctttgtccatttgaagctgtcaaagtcagagttcaaacacagcctagttttgcaaagggcatgttagatgggtttccaaaattttatgcaactgaaggctttacagggtaacttacctagaaacttgattaactacttcatccaatgtttttggttcctttttctgatgtctataccttactatcttattcttggttccagcttttacaggggacttcttccactttggggtcgaaatattccatgtaatatgtcaatcatgaaattgttattagctttttttattgaaaaagacccatcttttaaattactattgtttttttgaaaggcaagatttttactctcatatgtaccaaatcatgcccctaaacttttctatccattaaaaatttatctgaactattgagattgttgaaatttgagacttttgtcaaatattattcaattttactaattttgtgattgtctatgtattaaattatgttttccaaactttgatatctaccaaattatcccatcaaatttttgacatgtatcaaatcatgttcattgaacttttatctatgttagactttccttaccaaaattagacaaaaatccttaaatnnaacaatctcaatagtttaggaagaatttttaatggttttgaaaagttcagctagcaaaaattctaattagcctttttggaaatttgacacatattagtttacaatttagagatatggtatatacccccttattgtttccaaaatgatggacaaattggtttggcttcatgcaattgaatcttgaaaaactaatgttatttcatcaatcattcagttggaatcagtagtggtattttggtattcagaaatagcttccttttttttatttaacttgcaaacattatttttgacagtttcaatgatcatgttcacaacatttgagcattcagtggacttcatataccgtaatataattcaaaataagaaagaaaattgctcaagatcccaacaacttagtgtgtcatgtatagcgggtttcactgcttcaactgctggtgccgtcgtctctaatcctgctgacattattgtatcctccctatataaaaaaaatgctggaactattatgcaggtaatcttgtgaagtagcttataatgttgttgtttaatccaaatgtgtaatactaaaagcagtgtaatcactcacatttgtctgtatataccatttttcaggctataaggaatactgggattgtaaatttgcttactagaagtcttcctgttcgaatgacgattatcggccctcttgttactacgcagtggttcttgtatgacagcattaaattgatgattggattgtgagtacctttcatcataatttatcatatttttccccctacttgaatagttaacaaatgcttttggattttaggttcttttattgctaagaaccacccaataaatgtattcgcattcttttgtttacttacagattaggaaacaaatatgattaaccatagatacattacatgtatgccttcactaaccattattacatgaacaatatgttagcttttatcctgtaatacaaacacccgaaaaaggaatgaactataacttgttccggggagagttaggtagataggaaagaaggttaatgcaactcttgatttaaagtacattagtgaagttgcatctaacccagttaccgactatcattgaattggaattaggctctttttcgtttccccaactaatcttgtccgcgtttgattttattcaatcttgatctaaaattttccatttcctttcctttctgaaagctttccttctttccatcacatagaaccgaaatatcttggttctgtttcatcagtttgctgttgttggattggttttgagtgccaacaaatgatttcataggcctcaaaattgctggtcttcaccaccacctgatcaaagaacattttcatcatgtacaacccatctgctattatgtacagctattgcccattaagcatgttttttcatcatttaacaaaccatatgtaggctcgttttaacattccgttggagtaatatgatttcggtaggttgtgttattgatgtgagaactctgaagctctgtgctaacatgtcttaatggattttgaagaacttaatataagacacaaaagaccgaagactcttcgtttcttgaatgtaaaacaaatatgtcattgtttcgatttttgccttaattctaacacagacttgttctttacaactttccaggcctacaagtggaggactcaacaagcgccttgaagagggtaactaatcgtcggataaaaaccagtgaaatttcggaaattaggtattcttttattgattctaatctattatatatagatacaaaaacacaagtaaataatttggtactaatattggtggcataatggtcacctgtctcagatttttttaccccctaactcccatggctgttggcactacacactaccaactacccaaaattggttagacattatagagatatattaaagagaagagttatatgatgcattgtctttaggggcacatgtggtgttggtcatgaatactaaactaaacactaatacatgcattgtatttgtatcattttgtttttattggtcatttgaattgtaatagcaaataattggaatgtaaaaggatattgtacacttaagtaacactattttctacattacaatcattataatgatttgaaaagagctactttttttcttgagcaattgaaaagagttacttttggtaaagtttgagtgtcattgtattttctctacttgtataaatgtcattataaagtctcctgattatatctttatattatgacatctgtggaactgagaatatatgggtttaagacgatttaaattttgagtgttatgggattcgaattcacaccagtatttgttgtttataatacacttaattttatttaaatgaaattttaatgaagcctttcgttatttattttgagctcctgaaaagtttgaaccttagtccgtcatgcctaaggtcggctcttgactttgagagaagaaaattaaataaaataaaaaa

SEQ ID NO: 16222 - DNA, 8826 bp, Cannabis sativa
  modified_base (538)..(564): a, c, t, g, unknown or other
gaatattcttcttttattatttgtagttaaaccaagaaataccgttagatagacacttttaatatataatgatagtaaattttttgtttatagatttttctccacaaaaaattataacacacctacatttattgattggcaaaccttgaattgatcaataattttttttacttttctttttcataaggatgattacatgtacttaatttcataccaaaaaaattatttctatctttactgaaaaatatatgctatttaataaaagtaaaattaaaatttacctcctaaatatacatttgtaaagattttggtgaatctctttaattactctaaattaatcttttttaataatctatattttaatttataatcaaatcaaaataaacattccaaactaattcaaattaaaatattataaatatttttaacctaaaaatacctataattagtttaaaaagaaaataacaccaaaaagacccaattctattctttttcttactcaattgactttggcaatgtattattattattattattnnnnnnnnnnnnnnnnnnnnnnnnnnnattattattattattacagttattagatatttatttatctccttttattcctttcttatgatattttattattatcaaaaatttttttttttctttctaattattttaccaaaacctcccaaaacaaaagaaaattaagtattgggttttggtaaaataattaaatttttatttatttatttataaaatacatgcaactaaataagaaaaaataaaacatttgaaaaacaagaaatagttattaattaatttatttttttaaaaaaataagttaattatataagtttatataattaattaagtaaattaataaatttatatttatatatcacgtactaacttagtttattacatttagttgattgattatttaattatttgaaattagttattgctaaaatttatcattttattaatgcaagattaaatattaagaaattattaattttaggcttttttttaagaaaataaatttaggctaattaaatatatttcttataatattttatttttattgaaaattgaaataaaatacaattcttttttaattattttactcaaagctcaaaaaaaaaaaaaaaaaaacgtaaaacaaaaagaattaagtatatgaggttttgaaaaaatacatgctactaaataagacaatatataaagaacaagtcattattgattattttttttttaaaacaataagtagttatatacgttcatataactaactaactatattaatatatttatagttgtatatcacgtaataatttaatttattttagttatttgattaataacttaattttaaataattaatttaaattaattatagttaaaaaaattatttattaacgcaaaattaaattttaagaaattattaattttagattaattaaatgtaatactacatctttataataagtttttatagtatttatattatttaaattaatttgatagcgtaacaagatgatatgtatgtattaaatatttttagttagctcaagttttcaattttagaagaagtattaagaaaatgaatgaatgtccaatagtttaggctcaaattagaagagacgggactcaaattaatctctgtattggaaaagaaagatcgacatactcatatttgataatgtatgattaggaaattattaagtgatcaatactaattagtaaacacatcaagtcataaggacaatagtgacaactataagtaaactgatgattacaaaatgtgagatatgatgatgacaatgggtaaaatacagacaatagagagattcaacaatgacaaccactttgaatgatcaatataaaaataatttcatttgcaatgtttctttttgtatacatatatagatatatatatataattataataaaaaaatgataagaaatacgtatggttaataattgtgctttgtattacagaaaatactctaagttaagtttttcatgcaccatcctatttatttatttttataataacaatttttttttataaagcaatttaaaattttttagtataaattttaaacttcataaataaataacatttaaatagtaataattaataatataaaattaggtaatataatttaattattattatatatctgaattattattttaaataattattatcatattaataaaaaatttaaattagttataaaaaaaagtgaaaaaaggttgaatcttttctaatttttaattaggttgcttacaattaaatatttacaagctaatatgagttagtaaaaatatactataaaaaaaaaaaaaataaataaaataactagactaaatacaaaaaaaaaaaaaatcactaaatacacgctacttttctcattaatcttgctagtcaaacttcatatacaaaaagagaaatttattgaatctagaattcactaaataaaaaaaaaaattgatgtttttggtaagcacggtgttcgaaagctttatgttggtggacggatgaaaataacttccctagtttgctcgccatcgctgggaaatagaggaagggaacaaaaattagtcattatataaattgtatttgtatgaatgatttacttcataagtatatgcaaaacatggtcatgttaaaatttaggaaccggagtatagaaatagctaccttgaacacgagtctgctatacaagtagtttgagcatattcattcctcataaataagctgcccaggatgtgaatagccaaagtttgtactaatccgtggagccttatcgataaaatgatgtgtccagtgatgactcccaccataaatccaaatccatatcccgtcaatattgacctccactcaaaaccatctccgaattctgattcgtccctttcctcaaaaggtggtgtcttcacctctttgcatttttctgacactggaaagccacataatcctatgttcccctcatatgaggaacttaaacatgtattgaacattttaccttggggtatacgacctgtaagttggttatgagagaggtttagcaatgaaagagatttgagatttgccaattgctctgggatttcaccagagagcatgtttcgagataaatctattgcttcaagctcctccaaacgtccaagagatactgggatgcgtttggtgaaaccattggttgacaagttgaggacaactagagatggaatttcgcctatactatctggaatttctccctgaaaatggttgtttgagagatcaatggtcttcatgatggataggattttcaatttattcatatcattgtagtcacttaatgagtattgataataaccatcctttgcgctctgataatggaagtttcgaacaggttcctcgttcacagtactccaattcctgaaatattctgatggtatctttccactgaaattatttgaggagatgtcaaaaacacgcaagtctccaaaaccccaatatgtacaaggattccatattgatccatagaatttgtttgatctcaagataagaacagccagccttggcaaagcttgtaatgaaaaaggaaatgtgtcaactatttgattatgccccagatctagaattcttaaatctctacatttggtcaatgattgcggaaatttcccttccaactgatttgaaccaatgttcagcaccttcaagttgcatatatcagtacaaattgcagatatgcttccatggaaattgttatgacgtatgtctaattgtgagagcagattgccaaaacattgaggaagtgtaccattcaagttgttattcgacaggtcgagaacacttagcttggaaaacatgtcgaactcacagtttccagttaaattattcgaccctagaaaaaagacttctcaggttcgtcaatttggatatggagcttggaatttttccatttaatttgttcctatttaaggaaaaatattccagtcgagaagaagaaacattttctattttgagaggacctgtaaactggttgtcgtttagattcaggtaaactagagaaggcattgtgaacatggacaaaggaatggctccaccaaacatattgttagacaggtctagtttattaatggaattgaaattttcaaaaatatgaggtggaatggaatcagagaactggtttcctgagagatccaacgaaagaagttgggttaggtttgcaagtaatattggaaacatgccatcgaatcggttatcagaaaggtgcaaatgaagcagttgactcatgctcccaaatgaagatggaatgggaccacgaaaaagattaaaaccaaggtcaaggaaagtgagctcggcaagatctttgccaaatgataatggaagctgaccaatgaatttgttatgtgagagatcaagatatgtgagtttagaaaggttcctcaatacaactggaagatggcccttaaagttgttgtttgctatgtcaagatatgtgagctgggaaaggttccctacccatgaaggaacagttcccgatagggaacaagaattgagatctaaaacattcaaggatttgagttgtcccattgtgtcaggtaatttccctgtaaaaccacattgcctaagattcaaaatatttaaggacttgaggtagccaatggactcaggtacttctcctgaaagttttgtgaaggaagaatccagtagcctcagagaactgccagactgaaattgaggtagaacaacaataagatcatcgttgtttgacacatcaatgacttgtatgtttggaaatagaaagatatcatttggaaattcaccaactagactacatccacgaagagatagagacaccaatgaagatagatttattagggattcaggtactggtgaataaaagttgaccccatttaagttaaggtcttttaaacttttcatattttgaataaggttctccatgtctaattgctttttcaaatataaatagttttcagaaagatcaagtgaaaccaaattgatcaaaaaagagaattctgagggaatgttcccggaaaacacggagtttgagagattgagatgagttaaccttgaaagttggcgaaagcttgatggaatttgggaggaagagaagttgttgaaagccatgttgagttgttgaacttgatccaagctgaagaggctactattagcccttaaaggcccttggagcccattgttgcttagatcaaggcttagtacatgaccagttgacatattgcagctgactccactccacaggcagcagtctgtcctatcattccaagtagccataacatccctcttttgctgggaatcaacactattgtaagacttaataagttcaaactcttgtttcagctgcagcaaagcagagctttgatcagaaagacatttaaagctgaccaaagaatgtgaaacatcaaagcagcaagaaatgaagtaaaatatgaggtatggattgcggtaaatgagcttcttcatgtttacaaaattaaagattgttgcgatgttagtatgagacaatataccaagaacgatttttgtatcaaggagaaagaaaagaaaatgtgcaatgtagaaatttatggttgcttggctttatattggtagaatcattttctatgtaaaagatgtgattattgcctcaacgactaagtttaatttgttgtcaatgccttgtacatctgtcattctattggaccattttcactctacaggccacacagtatctctttcaatctgtatctcttacttctaggaaatgaggcaacaatttcacaaacaagaatcttgtaaactatgtactctcttacataattccaagtatgttgtctcagtagaaaaagacaaacactgatacaaggtaagtgtacaagataccacatggatgtgcttgagtcactttcttcttattctatttttctaaacacttttccaaaattactgtcatcatgttccgaaaaatttcctagcagagaatgttttacttttgtttcttcataagaagtaccctggcctttacagatgagttttattatttattttgctaagagtgccctttacagagttatttgaggaaagtagcaagtaataccctttacttgccgtggaaaaacgctcaacgaatgaacttctgggaattttcattcctcaacattcctagcttttacttaggtaattcacacgctttatttcttttctcgactatttccattcatctaatccgaaaacaaattaaatctgaagttttccgtaatacaattggatttggaagaatgaaaacactggcccagaactgtgaacaaaaagtgagagaattagaaagagatctcacgcggtgtaagtggaggtgaaaggaagttttcaccacaaaattccagagtttcgactcaaccctaaacccttgcaggtaccgccgagagctagggaagtaaaagaatgaaaaggcgtcgtgttctgttctccccgaccgtggaataagtcaccggagaatgacgaagttcacatctaccctgttttcttcaaaattacggaaatgtcccgcactcagaatgaacacagggcaatgagcttgccaaaagaagaaatctctttatcaatttggagggaacaaattactatttcaattttttattatttaccattaactaaaaaaattaaaaaaaaaaattagtgtaaactaatgctcgttgcagaaagacttttttgcaaatcaattctgattattaactatcacaatttcatttcataaatagattgggtactaaaaattgttacacacataattctattgatacttgagagcttgtttagtatttttctcggaagaagagactaaactctctctacctaatacctatcacataccccgaattttgttggacaatattggtaagctcgtataatttattattaggtagagaagaatggcatttatagtagtattagacacaaaaagctttagattgacacactgttgggaattcctttcccagtaagccctccttcactggaaggataaagcaaagtgtatggcatcttcactggcccaactctgttcttcaacttctgatctttgttcatcttctcaatttttagctcaatttctctcagcttatttccaaatttctcaaaggctttttctgcttccttgtctgttgtccactctggagtgtctcgctccccaagatacacctcatcagatgaatgcctagatagtatttcaactagggaaatgccgagtactgaaagcagctgcccagttattgtctttaagagagccttttcggggtctgtcttgagctcattgtattcaggagtaccctcttcaggtatgaaacggcggctcattgaagggcggtttggagggaatcctccataggggtactgcccaaaatttatggctgcgtgaagagcggaagcaatccatataatgatggtgcatgtttctattaggtcttcacgagtctgcatttctggccaccagggctcatctttcttgtcaccgtggccctcttctctgagctctttccaccatgactggagttcataatcctcttgaaccatcttatctgttttgtagtacaatgagcagtagtccttcacccatgttttaatggctgaccatatttcaagaccatcaacagcaaatggatagtcatctatcagtaaccgcagaccatgtggggaattttcatcctcaacggccactcccctgaaaaagatcaagaaggttagcatataacctttgtttttaagatcttaaatactgctggactgatttttgttcaacactaagattcacctcttgataagatcaacaggaagtgcttggccaggaaaagtccactccttgtaacttgcagaagtcatttccatgcaataccttccaggaaaaactgtagcctcaagcgctcccccagcattaatcagaatctgcctagcaactgcattcaaattcattgtgtctcggaaatgaggatgcaacagcttattaattggatgaaccacgctcagctgcctatttgttgctatcacaaatggctcaattgctgcatgcgttttcagcctacatatagagatatggacttatattcattttatggaatataagaatattaaaattaattcttgtagataagttatagatacataccagtggcttataagttgatgatagccagagtcgttcacattaacataagctttggcgagttgccaaagggatccgtcagcacctttatcagctggagtgtaaactttgctaatgcagccaaaatgatctcctccaggatgcggcaagctgagttcaattgctaaaggcttaagagtcccatctttttgcaagaaaattattgtcctggtagcataaatctttgtgttggttgcatttatacgcctaaggaatggaattagcgtgtcatggtggtctagtattgaatactttgttgttccttattggctattgatccatataaaacaattcccaataaatatgctaggaaaatgcaacaaaaactatctgcttcaaaattttatgtcagagaaaaatacaaaacttcacctcatctacgctgagtccatctaagttgtgttctatgtaattttttgttattttactagtgtgatttccataaataagaatgcgtataaaagcttgtacgcataaaactgcttcctaaattcatggtgatatttataggcctaactaaaaatatgtagctgcttcaaaaaataaaataaaaaaatagtaatttaaatataattgaaataacttttaaatagaaaacaaatgtatatttatttaatacaaaaaa

SEQ ID NO: 16223 - DNA, 5817 bp, Cannabis sativa
  modified_base (26)..(32): a, c, t, g, unknown or other
  modified_base (3848)..(3857): a, c, t, g, unknown or other
  modified_base (5270)..(5272): a, c, t, g, unknown or other
gtatttttgtaattttttttcctttnnnnnnnttttctgtttttttccctaatataattgatcaatttcactaattttgttggattttcggcgttaattcacttgtgttcacacttggtattcacacaaaatatatgaagtttataaaaggagtttctcctttcattctaatcacattaacaaatttagtatatcatactcttaaaagttctctaatcttcttttatttatctctctcgttgttcttatggtgatagagtgaaggtcttcattcgagtatactggagtagtaaaagtgttgtattcgtctacttaatagtcgttgtatcattagaagtagttactcaccaatcttccaacaccattcaagtagaggggacaaatccgctgttaagggaaatgtgtttcatgtacctcgaatttccattctattattgattttgtattttatattattttgtgtttattttttgttcttcaataataaattaatatattgttatttttgtttatcttctctatatttttttatattattttttaacagaaagtgcttgtctaaattaaggatatactactcttccaataagtaacattaaaggtgtcgtctattagattggacaggatttccataaaacccacaaaaattactaatctaaaatgatggatcctttttcattaaaaaaaaatgaatgatgaatgatgagcccgtaaaaaaaaattattctaaaattaaagaactaataaataaaataggagcctatgaaaaaataagttttgacaagaaaatattacatgtaatgtggcattaaataagtgaggtggccttacttaaatgatctgactaagttacttatttcgcaataactgtgagatacttgcgcaaatttagtcaaaaatttaagtttcatattatcactacaaattattatataaaaaatgtgtccatataatactattatttaatatttgtggggttttccttagctaccatgcctgccacttcattattgtttttcctttttttatataggttacattgtacatataactgcatctcttcactcacacttctatacattattactcatcttcctctctgtattcttctctgcgctactcgcacaagaagaaagaagagatatatatatatatattatcagcattgcaaccatgatatataaccgcatctgcgtacgtaatatggttcaatcgtttggagttggttcttcttctactactaatttattcaaggttagtttttctcaaatgttttttcttttggttctttctctatttgctttcttattatttggttcctttattgctaatgttcgatatatatttttcactactccaccgcggcatcactagtttatcaccatcttgaataagttaatatatggtagagtaatttttcacaacgtgattcatagtagttatagcatttcttttgtaaatttttaaataatttagggtagtagaaataactttttttagtataataatttattaagtactataaattatatttaaaaaatttaaaatatttattaaaaagatatgataattacaccaaatactgtcacaaaaaaatagtcagacaaaagacaaaattaaagttaagattaaaataagattataatttatcatcctcaaaattgaagtttgtatatgctataatttggtttgggaacttacttttttttattgtggagcggacttttaaaaaaaaaaaaacattgtgtaagttttatactgtatactatattaagttttcgatgttgttttacggttatttttcagttgttccactgttatttttagttattctgttttgtgttccactgttgttttataaaagcgcggtatttttgagaaaaattctgtatgacaagatttttgtaaaagttaaccaaaattttaatatttttgtaagttttccggtagtctagtctcttgtgtatgtatgtccatctctattaaactgacatgtaaatcgtatttttgttttaaatatatacatatagatgtatacatacttttttgaaatgcaatataaaatgataaattaataaatttatatactttatattaattaattatatcatagtgattctacaatgcaccccttaaaagagatgtactgatgtactctctacttatttcggcatctagaagaattttttagtctaatcttgtttcatgttcatgtatgttatagacatttaagatatcctacaaaattttgagaaattcagaacaacttacaatatagaaaataataatcaaacagtctattttgtacacgtataaaataaaataatcacgcgtgcacacactgtttgaacgcagtttttggcatgttaaactttcttcgaattttttaaaattttgcagaacgtcttaaataactatcatttacatgactatgaaaaaaaattaactaaaaaattatttcggatactaaaacagataaaaatatatgggtacatcccttttaagggggtacattatagaattttcctattgtatatatgcataaaattttatatataatttattatacattttattactgataaaaaatatattcttaattttacatgagaaaaataaataatacatacttattttatttataaaattatatattaaattttaataaatacattatgtgaacaacattctcataaatatttttataataaatatattaaattaataattaacaaacattaaacatagtatttaatgttacattaattatagtttcatttgatctattaataaaacacaattcttaataactaataaacatctatgtttattcaaaaaaaaatacataaatattttatttttaaaattatttatgtatttttaataaataaattatattcattttattgaaacattatcgtaataaacgtactaaattaataataacattataaacattaataatattaattaaatattaaataaatatatatacactgtttataaaatataaacaaaattaataaatatgtttgacatcccttcttttagttttgtattaaattctaataaacatattataatagtaatacataaaaatataaatattgacttacgtatttatatatttaaccttttatgtttcgtttttattaaaaaattaaataaaaataattaacatgttaaatcgtaaatatctatatttatttgtaaatatttataaaactgtatagaattatgtaattatatttttttataatatagtacatttaatatacctttaatatacaagtaaaaattacccatataaataaatatatattgtatatgtactttattgacaaatttttaattacaacataaattttttgtgactaaatgtcacttttagttacaataaaaaatttcgtatgactaaaacatagtatttagatacaagttttactaatttagttttagtcacaacaattactgtgactaaaaatacatttagtcacaacaaattgtgattttcttgactaatacttttagtcacggaccttttagcaataaaataagaatgatttatagttagttacaattttattattttagtcataatttttattgtgattataaaagtaagagttttttagtgagactatttaatatgtttttcatttaaagtttgtcttagatgttaaaagaaaaaaaaattatatgatagaataaaaaataatgttttattgaaatttttatgatagttttgtaaatgtttctttcgtttacaatattaagtaaaattatgggattattttacaaatatacaaaaacaacaaaaaagttacaaaaatacggtttcacggaannnnnnnnnnttttatgattttttttttattttatttacaaaaaatatggtctttttatgttgtatttttgttgatttattgttgtttttttttatttgtatattatttttttgttgttgttttgatgttatttttatgtattttttttgtttttttcgtgttctttttatagaaaaccgtaaaaatgtggaaaaaattcttaaaatgtaaaaatgtaatttttttacaaaaaatagtgtcttatgtaattatccctaaaattaaaagatatttaaaagtttagtttttttttttctctcaaattttgtacaagtcaatatattggctagagagacattttatttaatcaaccttgggtagagaaacttaatccaatttcattttaagtttaatattttgcaatcaaatcttagaaacttaatattatgtttggcaagaggaatttttaaaatgatcgagggagtaggaaggagatcacttgtgactagctcaagtatcataaaggtatgggagggtgtacaatgtatatatacacgttttaattaaaaaaaataaataaagagagagtaggaaggaaaggggtgggaggagagccaaaatcacttgattggctataaagaaagttggagagagtgtaaataggaagggatgagctttccctccaaaatcttaagaatgaatccctctagaaataaaaaatgaaaaaaggagaacaacacaaatatatactatcctacttaaactcaatgttattatacacttacctatattttatagttagcttagttcttttgatattaaacttgatttagctaataacaatcaacataaagaaaaatacatagtatcctaattaaagtcaatgttattattttggacttgtttgcagtttggatctcataattataagttgatatctaagtccgcatctccgttacagccagagtttgaacaatttagatgcaggtatcttttaattattacactaagtaaaatattatattactaagtacaataatgtgatgctaattttatattattttttaaaataacaggaagtcttagttaaaattaatattattacttttaaaaataattatcaagtcatgatgtgtgaaatacttttgtgcacatcatgtgtgcaatattttttgatatatttttggaattatttcaaaaatataaaataataaaaaaaaattacaaaaatatgattatacaatattttaaaatttttacagtttttaaaattatttataaaaaatacagttttttaacgtttttatattatttttattatattatattcttgttattttattgttagtttttattatttgtatattaatttttgttttgactttgttttgatatattactctcaagtatttttttttttatataaaaaattaaaaaaaaaannnatatatatataaaaaaaaataagaatacttgaacataaatgtgtcaaaatgaaaaatagtactttgcgaattgctcttttttttttttttagatttattgttattattaaatatacaactttatacattaaatcatgaagaaaaaaaaaacataatacattaatttgctacaataaattaagatttcttttattattattattatagtaataaatacgtcagatggtcagagggaaaaagacttatcaataatgatttaagtaccaaaattaatgtgttcaaaaagtaccaaaattaatgagcgaaaacatagacagtagaaagtatcagtacttgggatgaaaaaaaatgaaattaatgtagtggagaatcgataaagagtaaaaattgtgaaagaaataacagtttgaaaagggaaatttgattttctatacttaaaaaatcttaatattttattcttacagcaatacatttcaaactaagaaaaatatgacacttttatctaaaactcaaaaatacccctctcataactcaaccccatctct

SEQ ID NO: 16224 - DNA, 4049 bp, Cannabis sativa
  modified_base (58)..(83): a, c, t, g, unknown or other
aaataagtattaaaattaacataaaataatgtgagaattttttttaaaaaaaatattnnnnnnnnnnnnnnnnnnnnnnnnnngtttatattttttttaataattgagtgtatttataatttgatgggttgcaaataaaagtacataaatgtttaaaaaaaaaaagttaaaataatataaagttaaggggtcaaaaagtaaataaaagaaaaatgagggagttttgagcaagaaagaaactaagtgttcatccatgtctgatgaagatgtctctttcttcagcctcactactcaactgaaatatcagtctctttcacttacccaacttcaaccccaaaccgccaccgccgtcgacggtggccgtcgctgtgagtgttttcattagttcttatgtcttgttgatctgagcttttgttcaatttcttatcgattgagccaattcaattctcccgggtcgagcttttttgattagtttttaggtctgaatctctaatttttttagttaatttgagaaatttaatttgatttttcagtttgaggagcaaaggtgaagtctttgctaaagacccattaatcacattcctctaattcttgagataaagctctcaactttcaattagggtttttggttctagggtttaggttaggttaggtttgtctttgactgttaaagctttcaactttcaatcccttttgtggtttgtgattaagggttttactcaaaagtgtatttattgggatttatttcacgttcgatatctcaatttttcattccctttttgaagactttgaatttgaatttgtgtttgttcgagttttgggttcttaaaaaaaagtctttcttgtcattgatcaaaaagggtgttttttttacaggtggaataagatgattgctgagaaacctagttggataagacatgagggaatgcaaatattctccattgatgttcaacctggtgggcttagggttgctactggtgggggggatcataaggtatgtgtttttcatatttaattcattcaaatcaagcaaataatgtttatcatgattcatatcttgggttttgcttggttgatgttaatagttgaaatgtagaatatttcaagttatggaattgctattaagatttttattaaagttatgattttggaaacataacttgcatttggtgttcagttttccatgctttgtgtttgatttcttcgatatctttcgataaaaaagtgaacttgtattcgtatttgaaaagaataaaaaaacacaaggaagttcgataaggattagactcagaaattaagttactacaaaaaacatcaatctttagctcaatcagcaaataaaaactgtaatgtctttcacattggtcgttgaataagcaaacagctgcccagtatctcactttatctagagaattgtcaacacctttgataagccttctgttctgctacattccgcaacttttgtttcttcttttctgttaaaataaaagacaatataaactcaagagtaatctgttccaaaactgaacagaggaatcaccatactatgtttatttgcaggtcaggatatggaacatgaaatctctgggcagagatgtggaaaaggaagaatcaacacaaaggcttcttgcaacacttcgcgatcactttggatctgtcaactgtgttagatgggccaagcatggtagatatcttgcgtctgggtctgacgatcaagtgattttagttcatgagaggaagcctggttcagggacaaccgagtttggtagtggggagcctccagatgttgagaattggaaagttacattgactttgaggggacatactgcagatgtggtaatgtcattgttttttacacttaagaattacttgaacacaaattgcatctaattctcattgtatgaaaataaaactgtgtttttctttgaaaggatcatgtcatttttgttctacttgaaccaatttatggcagaattcgctctttactaattttcttatgtgtcgtttacttaagtccttgatatctatatgatcctgcgagtatcgtctaactagggagttgcatccaatgtgtaaagtaggtggatctcaattggtctcctgatgattcgacattggctagtgggagtttagataacactgtacatatatggaatatgagcaatggcatctgcactgctgttcttaggggccactctagcttggtcaaaggtgtgacgtgggatcccattggctcttttgtagcaagtcaatcagatgataagactgttattatatggcgaacaagtgactggagtcttgctcatagaacagatggtcactggacaaaatcggtatgttcaattttgatgttcacgttcttaagttatatcattcatcttttcttctttctctaatgggattatgttctttcagctcggatctacctttttcaggcgacttggatggtccccttgtggtcattttattaccaccacacacgggttccagaaaccaaggcactcagcacctgttctagagagaggggaatggactgcaaccttcgattttttgggacataatgctcccgtaattgtggtgaagtttaatcattctatgttccgtaggaatgccaccagttctcaggaaacaaaaactactgctagtgctggatgggcaaacgggacttcaaaggctggagctaaagaacctcaaccatataatgtaattgcaatcgggagtcaagatagaacgataactgtttggacaactgcaagtcctcgtcctctctttgttgctaagcatttttttactcaaagtgttgtggatttatcgtggtaagtttattactttcacattgaatttattcttcgttgttcgtatatgtggttaattgttttcgtcatgttcatgttcatgaaaacaggagtcctgatgggtactcgctttttgcatgttccctggatggttcagtggctagtttccatttcgaatcaaaagaacttggcaccaggcttagtgattccgagttagatgagctgaaaagaagtcgttacggtgatgtaagaggtcggcaggcaaatttggctgaaagtccagcacagttattgcttgaagctgcttctgccaagcaagccccgagcaaaaaaccagtttcagaagttcagcaaaacccaatacttacaaaacctgctgttgagattgtgcttgcaacaaaggctcctgtgcctcaggttgatgaaaggaagaaagttggagcaggtactggtgacgggttgaataaagtttcaacatctactcgtcgtatggcaagtcctgtcaaacagagggagtatagacgacccgatggcagaaagaggattattcctgaagctgtcggaatgactcctcagcaggataacatttcttctgggactcaatgccaagtactggagttccctcctccatcatctgatcccagaaaggaagataacggaccggttcctgctgactctactgtcagagaaagctcactcagagcttcaactagcaaaacaccggatttgaaagagcggtctggagtcactgcaaaggctacaattaccgagagtcttgttatcgaaaaagtttctgctgctcctggtagagatggaacagtaaatgtggaacagtcggggactgttagggcctgtacttcaactggtacttgtaatgctatttcgattagggtgtttgacaaaaaggaaggggaggatgccgttccagtttgcttggaagcacgacaacgggaacatgctttgaatgacattgttggattgggaagcacatttatcatgaaggaaaccgaaattaattgcacaagggggtctgaattactttggtccgataggatctcgggcaatgtcactgttttagcaggaaatgcaaacttctgggctgttgggtctgaagatggatgcctacaggtaacggcatataacctactacaccctctgcttctgttaacttctttcgatttgcttatattcctttgctgcattctcgtttttgacttctttttataaagtatttaaccccataagttccaagca

SEQ ID NO: 16225 - DNA, 2771 bp, Cannabis sativa
ttttatttttcaattttttgatttttaatcaaaatattttaaaaaaattactttgaaaaattttgtaaacaaattttttttagctaatattttatactctaacctcagtttagatcttgaaactcggattcggacctagaccccgaccccgtaaccaaacctcgactcggatccgaattcaaacccctatatcggaccctgatttggacctcgaacacggtcttggttttggagttgacttataataaaatcaacaaataaaaataaaaatgaaatttacagacttttgttttttatttttgatagaacacaattttgtattttaaaaataaaatttttatttttgtgaataaaaaatttaaaatcataaatgttactaaacaccatcaaaatgcatcaagaaagactttttctgctgcttaaactattgtaataaaaatgaaaagaaagaagaaatcaaactaacatgcttagtataattttaattatagttaaatcatacaagcaatgtttatatttgttttaaatccttaaggtggttgcaggctataaattgttatgcggttccacccactaagcaaacattcaaactctcttacaaggagtgttgtatcttctgttcataagtagtgtatcttttttcttttctttttgtttcttctatccactgagccatggaaacttcaccgcccccatcaacactaaacctcatcaaagtactctctacatccaagcgtatcatccataatcaattaagccacttcacagccctcagtttccttttcatccttcctttcgccatagctgctgctgtgtatcccatactccaatctcccttacctaaagccatctcaaaaagctttctctatctgattggttttggtcctcaacaggccaacgatcaattcaccaccttgcccaacgaaaacattttccttgttctcacttatgtcctcttcactgtagtattctctacttgtgccatcacctcaattacctactctgtcatccaaggcttctccagccaacctgtcaagctcaaaaccgcaatcaaatccattgccgctaatttcttccctcttttaggcaccagtcttcttgcccaaacaattgtttccgcatgtgctattctttatgctgcagtctttgctctgttggttgctggagctcagttgttggggtttcagattgatttctcttcgacttattttatcatactaggttttgttatggtgattcctctgttcttgtttgtggtatatctgcatgtgaattggtgtctggtgtctgtagttgttgtggctgaaaagacatgggggttagaacccttgaagcggagtgcaagtttgatcaagggaaggagatggcttgccttgtcactatctttgctttttgcgttttgttatggagttctgtctataagtacgaactattctcgtccagtggtagatttggatggtggtagtactaatgataccaatcacaagtggatgtgtttggtgatcagcctggctgttcaagttttgttcacttcggcttttcgagtgctggttctgctatatgaattggtttcaaatactgtgctgtacatgtactgcaaggaggctggtctggataacagagctgagggatttgctggagagtacgttagcttgcccgttgatgacaacgaaaatgatccacgtttagcatcagtttaaaacgcctactttttccacctttctgttgtttgttgtgagacttctactgtataaattatgaagattcttgtactttgtcaatgttacagaggtgtaatttttttttcttctttatttggttcgaaattcctaggaaattttatataagaaatgctcattactcatgttctggtattcaggtacgtaatcattactccataatggagtttaactttaactttgtaaactttcaagaaatgaaaacaaaagatcacttatttgattttgagattaatttattgatgcttcctgagctaatgatttttttcttattattttcagaaagtcatgtgggctttaatattgtttgcttgaaatataatttataggtctatacacgtatagatacgaccaattcacttttggaataagtatacaccttctgtttgtgaaaatgtcttctaaattcttattttattaagaagaccaaaaaaacgaattgacggagatgatttcatatatgatttttttttttagataaggaggctaaacaacagctctaacgagacttggaaagagaagaaatagtgcagccccaatgccatcttcgccgtattgtgagcggttgtattgcctgttattataaaagagagaaaagagaatgaaaactgacctgagattatgttggaataaattgaattacagagtaagtgcagaggcacttatatatgtatattatataatggtacaaccgattaagacatgaactgaatctaacagcttcaactaacttataactaacttctaacaagattaactaataacaaaattaccaaaaaagatagaaaataaataagggtaaattctattatcctcccctcaagaactgtatatatcatataaaaacattttacttatatgagaggaaagagtagtagaaggtagaaatttggcaaaagcattagctaatttgattgagtgtagtcttgactggtatgagccttatagtagaatctttgattttatctctaatgaaatgataatttaactatacaatatacgatgtaaagtctctgtatgcacacaaagtcg

SEQ ID NO: 16226 - DNA, 6680 bp, Cannabis sativa
  modified_base (6641)..(6654): a, c, t, g, unknown or other
taaagatgcatggatttggaactttcaagtgcagactatttgatatttcaatgataaagatgcatggatttggaactttcaagtgcagactattttatatttcaatgatactgtcagggaacagaggttttcagtaaacagctaacttggttacaaagaaaaaaaggattccaaaagggaggaagaaccagagatctgaggtctgcctcatgcctactagagaagaatttgaatcatgttctccatttttacactaatattatggaaaagtccaaaattcctcaagtcatatggacctgaagggaagttcaaagctgagtgtactgtccgcaattgagaggcactatcctaagatgtcgatttcattgactaaagcatgcaacttttgcaaggtgacaagttttacttgataaacttccaaatctctgcccacatccattcgatatatttgcccaaattaagaggttataattttaaagttcgaattgcatctatttgtagtagagtacattaatattacttgttaatgcttatgcaaaagacagaattccaattaaaataagagagattaaattcattcactaaaaaaacacttataatgccaaaaacttgaaacacaactatatgctcaaaattattttcaaacaaaaactttaaaaaatgcatctaacaataaataataaaagcaaccacatacccatatcttcttgagtacatgccaatgaggcaaatacttatataagatcttgatttaaggggatgtacgttcctttatttaaaaaagaaaaaaaaaatctgtgcattattcatttgaatgaaatacaatgtaataggaacatgttaacaccatttggatgaaaacatgagacctaagaaacagcaatgaaattaaaaataataatgaaacagtagaaaaggcagcaactttaccacaagttgttccaatctctaactgaatctcagaaagagactcccttgagacttttaactttataaaccctagttgccacccttaatgtgggtgtatgttcatttgaaagcatatcatgcatccattacgtgtatataatatgaaagcacttgagaaagacagcagccgtcataataattatcaaacagatatgtgatgtgctataaaacctttacggtttttaaataaatgcagtcaaatttaccagctctcatatcttagtagcatgctatctctggctaactaccatatatttgttttttgttaactaatgggaaatcaataggtcaagccagaccaattactgtataatagctgccaaaagaagataacaacgaatgatttttccagaacgtaagtgataaaatggtagacaactaattgtcactaggtctaataacagagtagcttatttttctccttttgtgatgtaaactaccacattttatgttctttcaaattcaataactaatgggaaatcaattggtaaggccggagaaatatctaagatctttatggataagttgcaatgtgtgtgattgttctatgtaaatcagattttcaaaatagatgattatctcataacccatacatttgaacttaacttgataattaaatgaagagaagttgaacactagctccaatgcaattattatgttcattttcagttttccaagggtctaaacttctaagctaaaaaacaagaaagctggcagtgacacaggacaaagaaaaaagccactccaaaaaattcatgcctcagtactgacaaaacaacagaaaaactgcatatgatttcttaagttttgacttcagttttaatacaaccacatttgcaatgattgatgtgtgtcttatatgtcaattgtcaaatgaaaatttattctacaagttgggaaacatatacatactctttgtaaggaagtcgatctccgcataaatgcctcagttcctgaaagttgcttgtcttctttcctgaatttctgccagagtcccaaagaaatgtaagaaacaggtcctgtgtagatcttggttttgcataattaccacatagttaatcataagaataaaaaattaatacatacctccagagttcctagaagctgccccagcattcttttattcctactaaccaagcttggatcttcattcttaggcaataccctcggaacatgctcattgctcgggatatcaaaatcctaattaaaaaattaaaatagaacggtaaacatagttcgaaatctgaaattccaaaagaggactagtatagtgatattaattcaccttcctcattggtctttgattgccatctctcctagaccaaccactctgctgcaaactcccatcagttgcttccatgaccgaatcatcttcattcacatcctcatttgcttgggcatcctcaacgatctctccatcttctacctactttcaaaattagaatcattgtatatagaagagtgggaaaaaggacttcccataagtattaaaatagctctttttcttgtaattttatattttctcttcaaccaaacagaaaactaagtatacctaacttttaagataaaccaaaaccaagaacactatcaatacctaaatattatgaaaatgaaaaagaaaaaaaaagatttagcagcaaaattctaaaccacgaacacaagacgtccttctttataccttcacaacagctgatgaaagtcgtctttttgcaggaggttcgtcttctagctcagtcctatcagcctattaaaaaagaaaaaagaaaaaaactaagaaacagtaaaattaactggaaacaaacagaaaacgtaaaggaaaaccaaagaaagacaaacttacaggccgggtgaaagctcgctgacgagctccattggcggcaaagttacgaggagcagcggtaggcaagcgtccgcggcgaagcccccgaggatcccgaaggcggtcggtaatctgaaaatgttcggagaaaatcaaagaaagaaaacagtggagtacaatatacatagagaaatgaaagaaagaaaatcagacctcgcgttgctggcgctgaagttcatcgatctccttgcgaagatcgtcttctgatttctcagcgaaagaggttgccatggatgaatggcgtatgggagtggtgttgagagtgacaaaacccttcgagaattttcttctgaatgaattgaatgccctatttcttcttcttcttcacttaagttggcggtgttcgccccaagaaacttcataaataccctttcactatttcaattttggataaataccactaaccatgtcacaaacacaaaatatactaattttaaaaaaaaaaaataagaagtaatttgtgattgaactatctatgcctttggatttagtattgatgatctcatttttagtcaaagaggtagagtccataaaatgacgatatgaggtttgaattatgaaaataataaagaattataaacgaaacaagatttatagaggttcggcccctgaaatggtaatgacttactcccctttcagttgtatttatttaaaagataacaagatcacatgaatctagtcaagtgagtttcttgttatctctagaagttataagtaatttggcgacgtaatagctatcttgagaatgcaaaattcaatccctgaatagtgaatattatgtactaatttatagggaaaaagatgtagcatctttacatttaattactgtcaacccggaaagtaatcttggtgatgtgaacatcaatgtgtgacaagtgccaagaaagaaaacatcctggaattagtagtcctgggtcatagcagtcgacctgggagggatccctagccttgtgcccaagttgactttgggaactctggaatgggtgtttggatcccgccaagttgtttccaactcactatcttttagtattctatactgtgaagatatgaagaatccaagtccaaggcctgaaagctgaacatacatgaaacagcaccccgaaagtcaactcgagcgcttagggtttcttctagtgctcaagttgacattccaactagagttttagtttccaggtccatctttgtgcaaatgtgtcaaactttgtactaggacatgaagtagacatgtcacaaacatatgtgagacatcaaaataagatttggagcactttcatttttaagcacccggagcaccaggtgccttaggcacctacccaagttgatattttgtcaacctggggcgcttctaagcatcaaattgaagaattatctcatgcattctattcgtcttcatgaaaaacaaggaaacaaatatgttcagggaagaaatagactgacttggaggctagaaagaggacacagtgcccaggttgacattttgtcaaccttggccaattccaaaaagtttttttaatactaagtgtttttcaggaatcaaatggaaccatctggtggcctaaaactggacttagcgcccaggttgatattttgtcaacctaggctgtttccaattatgtttttgaaaaagtcttccaagaatttttttctgtcattagaaataatgaagatataattaaatcgaggaaaaatgagaatcatgaggggtagaaaactgagtctatcgccaaggtttacaattaacctagtgcactggcatctatcatccaaatgcaaattatgttgtgagcattctctctgacatggtgaaaaacggggtaggagacctcgtcctcgattcaagaaccttagaagtatcaaaaaggcttcccaaaagctccaaagagagcacccaacgaccaggctgacaagtgacctagtgcactgggttttgctaatccgattctaattccgtctaaagcgttcgtctagtttttcatggtagacaagagctatgaactcaaacaagtcaaattcataacttcatattttactttttcggcaaagtgactaagtcgtgaatcagacagttttgagtctcccaattccgtgaaacagcaacatctccgagaattggtgaatgacttcaccaaaacataaaaactagctaagtgatgtcaaaatattacgtaggcatcaaaaagtacatctttaacacgttttcccttggcccaacgaccaggtggacgtcatatgtcaacctggtcactagatgtcaacctagttgttagtcccagaacaaccttcaataaaacaaccataactcactcaatattgatctgattgacacaattcaacttgcatttcgaagttatttcaatgatctttcaagtcatgtgccacactccaatctcaattatgaagttatcaatgccaaattttttcctcaagagagttacaaatttaagttacaactaacccgaaatgggtcccgcggatgcaactcaagctctgaaaattaacgaccgacctccggagtcaatttcaccgttagattatcatcaatgataaaaaatatcctaaatgtatttttccatatttttgggaatatttattattattttaataggacatctttccttataaaaggaaagctcctctagtccatttttcacattcaaaaaagtaccaataaggtcagagcatctctctctaaaaagtagagtttgccgacttagctatttttttgtattcaatctcgtgagaataaaaactcaaagtagacgtagctccattactgtcgtgacatagttacatctaactttcatctcatttatacatacaagcgagttggctagatttctgcgtcatgattttggtactttcattgagagccacaactcaagaagtcacttacaagatggttgcaactttatccacaagtgtggaaagaaccatacctactggccagcagattgggggcatgccagtagctagaactagtgatgggactacacttgcatctcaagtgctaggtggaggcctcagaacttgctctgcagcttgtcccccaaggccaccaactgctactggtactgagatcagtcaacatattccacctgggaaccacgtgtggagttaaaagaccctgaggaggtagatcattaggttgaacaacttagccaaacaatgggtgacctataacaacagatacgagattctctcgacaaacaacatgaacagtttcaaaactggttcatgaagaattagaggattgttgagaatcagcacactgagcaagagcagcaaagggctaacctgtctcaacaaattagggaagcttatcgctccaatcgcagaacaactatcctaagaagagtttccaagctagcaagagagatattccatcagccaattggccacgtgggaactagcactcaggaggaaactctcaatgcacgaaacacttttaccatgcccggtagtcgtgcaaacactcaacgtacaataggactgaggctcttcaaagggaagcaaactttgagtaagagtctgaaaggactcaagctcgagcgcgccaaccaataggtcttcccataatgttgagtgaccacgtgatattgagagaaccaatcgatctcctccataaggttctcctcatcgttcaaataatactaggccttgtgaccttgtaaaagggaagggacttgcgactgacactgagggagaaagattggactatacttctatcttgaaggttataaaatttgaagagtaaggactaacgagccacgtcatgttggaaatattttaccannnnnnnnnnnnnntaccatgtatgtttcattaacatcct

SEQ ID NO: 16227 - DNA, 2432 bp, Cannabis sativa
aaaataaagaaagaactattcatgtagtgaaaaatgatgttggggttaactatgcaaaataatttattttagacactatattatcttagaaaaatatgtacaacattaagagtactgactttactttgattaatcacaaaatagagaagaaaaaaaaaaaaccagtacatgcatgtttttctttatttattgattttgcacatatatgcacatactgatgatttcatattataggaacaaaatagcttgaagaagtcctctgattttctgctgaagatttttttcttggatcttgagtgattttgctagtgcagttgtaatctgttgaaaatatacaacaaatatatacataaataataataaatctgttgtaagtatatatatgttttaattagtagattttataccctaatgttattgcttttggtggagttttattggtttgaggttgagacttagagtgagattgtggttgtggccgaggctgtggctgcggcggcagctgtgattgcggttggggttgcggctgacttaactgtaaatgaatggttggttgtgcatgaatatcatatttgtttgtaacaatggtatattccatactagagcttttattgatttggtttgtcatatcactagctccatatacctgcagtaattatgaaaatttttaaggttagaaagaatgaaaacaaaataataataataagaatgaaaataaaaataaaaatagatcagcaaatatgaatagaatataaataaactttaataaatgaataaaaaaaaggtaaataatatttttagatcttgtgtttacaaaaattattcattagatcttttattctgttaaatgataaaataaactatatatttttcaaaatgataaaaattagaccctaaactcaattttcgactatttttttaatataactaacttgaaaataatttttaacacgaatgaatattgaaaatgtaattaattttttatcataacatctctagatcagattatatattattaagttttattttgataaaaaaatcagttcagagtcctatttgtactattttgaaaaatataagatctattttgatcatttaacaaaatagagagtctaattaataattttttgtaaaacacgggatttaataaaatagtatttacctaaaaaaaattaataatttttttgtattgaaatattctatccttcacttaataatttttaattttaaaatgaagtaatcattatgctaaaataataaaaatagattcatttccatatcatatatactacatgcaaccttataataaccttatgtatttggtttgaagtagaaaagtaactagtaaaaatgttttttacttttgaaataattaggactagcaaataagttaattaatttctcattaaccaataatatgaaagtacttctctaaaaaaaaagtacctttctttgtagttctagattttctttgtggagtaagtctaccttcttatatagttctacattctcttgatgaatgagatttccctgtaataatcataatgatatatatataataattaagctaataataaatataaaattattaattagcccaaaactgaaactgatcaaaatgagtcaatttgtacctttcggtttagttcttttatttcatcagttaatatttggtcctgtattaacattgaagaaaattataaggtaacaataagaagcatgtgtgactaatataatactctatgacattcaaagagaaggaactttaaggttatgtttaaaagttgaatttcggtgaagaaaaaaaagagggtttgaaaatttaaaaaaggaaaaaaaaaatcatgttcgatatgaaaatttttgttgaatcaattttttttttttttttataattctttgcatactaaacatgaaaatttgttgttgttgttttatttacaatattttgttttcccctacattttctttctttctcactaaaatctaacttccaaacatagcgtagggctaaagtgtacatacctttttggcacgaatacttttcaaactcatttcgagttggttttctagattttgcagatcagtggcactcaagttagaaagttcctcccccattaaatgtctgcatgaaatcaaattaaaataagggaaattaatccatatatatatatattatttttttaatatattttttttaaaatttacggtttaagtttttaaattggtttcttcagtagtttctatgtgggttgttatacgatttttgattgcgatttaggttgctctgttagttgcaatagatgttttcatataaaatttctatataagataataatctttgattgttttttgctcaaaacttgtcacaatatagttggtaagttagtattaactcttaaaaaaaacataatattaagcattaataagtt

SEQ ID NO: 16228 - DNA, 5047 bp, Cannabis sativa
ggtttctgatgttcggggcaaggttgggcccgcagaaaccctagccaagggggtttcgggcgaccacttcgaaccccttgacggagagtttgactgcgccgtcaaatttgaaacccagagagatgtcgctggtaacggtgggaacgtctccgttgcggtggataacccgtttcaggtcgggttgggttcgtttggggaaaattgggagatgaatggtgtcgaacgtgtagtggaggacgagtctaggtgagtttggtatatccaacatttttattattcctattatttcttttaagggttagaagaatgatataatattgtggcattgtatgtatatttgagtctttctccattgtttttccctgtcaagggtaactttttaaaaaataaaaacccacacttttctgtttggtctacacacaccacagctttttttcttagaatatttgtttgtgttgtttagtacaacatacaaaggtcccctgatattgcttctttgcagtattgtggtttgaggagtatttatctttaaatttcttttcagagtaaaacaaaagggtgctgtttctggacagagcacttcacacaatgggcccctgatattgcttcttagcagtattgtggtccaacataaccaagttgagctagctagtttcttccaatccactaataatttaaatcaataaataacaatgccctcttgtttagattgttttcttggaatagtatagtgaaacattttggtagttagcttcgttttgtacaccatgtttatgtgttatcactatgccaaatcaatgcttgtaagatgttttccaataattgttagttagtttacatgttgctagtttaagaacatgaatagtgatattttggttcagttcttttcttttaatgggttttgtataatttttccattttttctaattccttgtttgcagttgaggttgggacacgttgttatataagcactcttatagtgcatgtgccgtagtgatattttggtgcatctctggtctttgtttgttaatgcaattttgttctcaaatgagctggttatttgaggtgctttatgtctataagcaattattagaatgttaaaaatcttccatggcaatgaatgaatgatactgttctaacagaatcttcactgttctcagttcttcttctgatgatgaagttaattattcagtagaaaactgtaaaggagttgttgatcagaagagaagaaaatccaaaaggaatattgagcattttcttgaaaatatggcgatgaaagttatggagaaacaagaagagatgcacaatcagctaatagacatgataaagaagatggagagcgagagaatattgagagaagaagcttggaaacaaatagaggtggaaaggatgaaaagggatgagttggtaagaacccaggaaacatctcgaagcttagctctcatttcgtttctccagaacttgttgggtgaagacattcaaatccctgaaccagtatctcaaccattcatggaagaaaatagggtaggtagtagtactgatgctcaagcagataccaaatgcaatacggagaataaaagatggccagaagcggaaatagaagcccttatagctcttcgaactggtttagaacgcaagtttcaaactacagaatccaaaggatgcatttgggaggagatttcagttggtatgtgtagtatgggctataacagaacagcaaaaaagtgtaaagagaaatgggacaacatgaacaaatatttcaagaaaccttatgttagtgggaagaagcgttctgccaatggtaagacctgtccatatttccgaagcttggaatcactttacaaaaatggagctgcaaattcaggaaacagcaatagtaccccaaacaatgaggatgaagtcaaatgtgaaaaggagtctggagagtcactttacaccggttagaacctttttgtagtgctaagtagtctgagatcttctccatcaattttcgccacaaacttgatggtaggttgatggagaaaattatccacaaacaattaaatctcctattcccgtagtttgtagtttatttaatggtgttttgccatgttatatttgattttaactaccaataattttgtcttgtattgaacatagaagtttgcatcaaatactctgtctcgaattcgaattattctagcatattttgtttgcaggcaagtaattgacgatcaaattttactattattgtatgggggtgacaatttagacgaactctaaatatatattgtaatacacattaagcaccaaacgattcaattaacctgttagtttttttttggtctatttaaaacctaaatttgtggctataacgatcttcaatttatttatttggcttttgagggaagacaaaagaaatcatcaacttatagcataaaatatataaaagaacgtaatgaatgagaatataatctctttctatatttatttaaataaaaatgtgaattaagagaacatgtgcatgcttattacatatatataaataatggattgcatgcactaaacaaacagttgaaacacattcacacgtaatattatatatatattatataataatcttcattcttcaatcagagccagtagaactggaagtggaccgagagaggaagatgaaaacaacgagcaagacaatgggaaagataaggagagtgaaaacagaaggtggctgcactgctcccattcccagtggaagaaatagcagcaaagccgctaccaccattatcatcaccaccgagaccagattgcacacatgtccatcactattcttgtgtccttccattatatttcaatttgaatatttgtttatttacgaaccctatatctgacaattctccgactctataagtattgtgcatggtgactattggaagtgacacaacggttggccaataccaaccgatgtatgtaacattccatacacgtatatatacgactactcataagggaaaatttgcatatgcttcgtaacgtttcgggatcaagtataggctggtgcccacccaagtatataaatgtttttctaaatttcagtctctttatttattgaccgactaaatgttcttttatttaattgtgattggtgagggaagggttataatattttatccaacataaaaagtaataataaaaaaaaccttttagtcacttgttctgattgtcattattggaggttgttattttttattttttttttttattttttttttttgtagcactttattggaaaaagaaattataatgtcatataaactttaaattttaagaaactccaataatgaaggaatctcatcaaaccctactagttctttatccactcgaagagcatatcaagctaatccatgtgcaaccccattggctgtccaacgaacatggattagggatactcctaggaaactggacatcaaactagctaaaacctctaccaattaaggaattaagtttattgaggaaataagagtgtttagaaaacgcaattacaactgctaaacaatcagattcaacaaaatttaaagaaagacattcttatatcattaagacattcctatatcaaaattaaatagagaatcatttctatcattaaggcattgctatctaatatctattatttctattagataagtgaattcagattaagttactaaaaaatgttattttaaatcaaatttcaaacaaaaatgtaatctatgttattctcaacataacttaatttctatttttgatgattctcatgacataatttgtttttgtaatgattctcttactatgcgcgcgtgagtaacgcactaaaaatttcaccataagaataagtaacttttgaattttatagaattaattattttaaataaaatagacatagtattcaatccttgtcacagtaacttaattttttatttaatttatttctttaattttaatggttaatttgattaaaaatttaataaaacactcgatgtgggattcaagtacgcttccattgatgatacttagtatggaatcaagatcttctattaaaagatactgttctataatatattaaaccaatctcattgccacacatcagttaatttaagcattttaaagaaaaaaaaattgtataaatatttaataaagtctaaataaatttaattagttgagttattacacttaaatttagattggtttaatatattatagaacactaatttttaacatgaaaccttaattctttagtatgtaaggacgagacaattacacaataaaaaaaccacccattaaaaataaataaagtcatctacaatgcaggtaacgatttgtttttaatataatttaacaataaagtatccaataaaataaaaaataaaaaaaaagaataaaaaaaataaaaaaaaaagttagagagcctggctgctgagcagggactctagtgctaatatttttgttggaaagttattgcaatagcaattgcaacagagatgccttgagtaattcttgaattttgtaaaattaattattttaaacacaagaaacttagtccattgttggcaaggtaactaactttttttttaaaaaaatatttctttattctgattggtgaatttgattaaaaataataataataaaatatacttgatgtggagccaagcaagcttacattgatgatgctcttagtaaaattaattattttgtaatgctcctctaattattttgcctattaagaaatgagtaattcttaaattttttaagaattggggtgggcaattttatcttaccatgacattcaataggaattaaatatttgaaattatcaaaacattaaaaaaaaaaaaatcaaaacaagaaaaagcataggaaaaggaagataacatttcagttctagttttttttctttttttctgttttttccttttgtttttgtcatctaaaatgaactcaaacttgaaaattaactgacgcaaaaagaaaagtgcctatcagctcatttttattcaaaaaagtgagtagcagctaattttcatgaaaaaattgt

SEQ ID NO: 16229 - DNA, 3104 bp, Cannabis sativa
tttttttttttttatgaagttttaattttttttagctatagtttctccacaaattagtaggtggttgactatagtgacgatcatatagtattaattgaaaaattttataagatttttcatttatacattttacagcagttttttttatttttttacaaaaattcacatagcaatttacatagtaactaatagagcaatttaaattataaccaaaatgtacataacaacccacataaaaattgctaaccaaaactgtagacttaaaaaaaataataataaaaataaagttaaaaaatgattttatttcttgttttcggttcaaatttctcttagtaatattaattaaaagacacatgtcagtactttataccattcacaaaaaattgtacaggcttcctggaaagggtatccgagtcccttcatcaccttaatttagttgataattaaaagatgttgttaacatatagagtttgtattccctccatacattaacttaacttttctctctccaagaatattaaaagtccttattaattaacctctccttaacttataattaaactaaaaaatcatttctcatttaaagttatgatactgagatatcgtatatttgtttccccctttgatcaagatttccgtgtaattctatattcaattgatttatttttcaaacatggcaattagaaaaaatccccaaaatctaatcaaatctaaaacaaaacaatcacaagatgttccataaaaactaatatttacgaaacaatcacataacagcctaaataagttattggacaaatgttcaatgaaattattcacttatgctcatgtatggtcaatcccctctcttcgtccagtactcgtttgaattcagaatcgtgacttgaatggctagaagcaatgtcatcatctttagtttcacgctccggtttactcaccacataatgagtagcaaagaaactgaaatacaccaaatttagagttgccaaaccagctatgatgaagtagtagtagtcaagtttattcttgttaagatcatggttccccaaccatggtgatttacaagtcttctctgttatagaatgtattacattgacgatggccgagcctatatagctggcaatggagaggcaaaggaaaaatattgcaccagcaacggttctcatgttctctgacaattgcatagtgaggaattccattatggcaactgcagcaaaagcttcagtcaatccggataagcagaactgtgggaaaagaaagaatatggtagtcggcgaaatgaaggtgccctgtttcgtggcagcgcttcgacgttgtctctcaacaatcccagataccaccatggcaagaattgacatgacaatgccaattatgattctctgcctcatactcaaccttttttcctttcctgtcatcttttttgtcctgggaatgtaaatcatctcatagatgtaaatccatatggaaagtgcaaccattgagacaatggtcatccaccctggtgggaacaagaaatgtggtccaattcttctgtccatttgcatagcttgaagtaccccaaatgtgttgttttggtccattgtcatgaatgctccaatcactgaaactccaactggcaaaactgctaataagcacttgagttgctcaacttgctgaacactacaaagtctccactcgtttttaggcctgccctcattgtctaactcatctgggttagtgattatagcagccttatcaaaaaacttgaacctctcagtacgaggaagtttcaactcggaaactccagcagtcaaaggaggatcataaaaagaattgtcatctgtctcgattgggccaacaatgcgtctgcgctttcgaaaggcagctgcaattaccttcaatatgtctgtgaagacactcccttggggagtcacgttgatgtaagtgtggcgaccaagtaagaaaatggatatagagaagaaaagacagatggtggggatagcaaatcccaaagtccaactcacactagtttgaatgtaaaccactgcagtgagggccaaaatcaaggcaaaggtgaaacaaaagtaccaccaattgaaaaagctctccatttgagctttccctttggctgttcttgtgtcgaattggtcagcaccaaaggcaatgttgcatggcctaattcctccagctccaatggataacaaaccaaggcctgtaaagaggatccccagctgccaatctagagccttggggcattctattgttgattccggatcgcaatgagatggtctgaacgcatttatgcctgcagttagtgttatgatccccatgccctataaaagaataccatgtatgttaatagtgttgtctcaataagtagaactacaaacagagttgttttcatcacaacaaaaattgctgtaatatttatgacataacaagttgtcactaacaaaaattatttttgtgttacttgtagcataaaaatggtgatatatgtttttttttagtgggcaaatttttcaattttactaataataaaaaaaataagaatttgttaggactaaaagtaggagtttttatagtagtttcctacacattttctcgatcaataatttgtttattatataattttttttatactgaaaacctgtataattaattttctttttcaagcctggataattcaatttctttcgtagatatcatcacagttttaattcaagataatggccttaaaatcttaatggatttaaactctctgcatttttctttattttttcttattaagagcttcttttgaaacaatatatataaatatgcatatatacatatatgcataatcatggaatataatttaccagaagggaagcaatggtgccacaaagaagagtgtaaaacttgcccaaataagcatcggaaacaaaagctccagctaaagatgaaacattggaaaagccactccatacattcaccactgttactaaaaatacaccactcaagttgtattgcatgctcagatacactgtgatatttcctatcaagctcattgaagccaacttctcgaatgattcgtttcctttatacaaaaaaaaaaaaaaaaaaaaaggaaaaacaaaaaaaaaaaa

SEQ ID NO: 16230 - DNA, 3596 bp, Cannabis sativa
gagagagagagagagagaagggtcatcagggctgtctggaatggactcgtgggggatctgattattagacttctaggtttaagtttgggataattacataagacactattttttaataaaaaaattacatttttacatttaatgaattttttttacattttacagtttctcataaaaacaacacgaaaactacataaaagtaacatcaaaataacatatagataacaaaaaaacaataacaaataaacatgaataaaacataaaaagaccgtattttctataaataaaatcaaaaaaattcataaaaatatttaaaaattctgtgaaaacgtatttttgtaatttttttgttgtttttgtgtatttgtgaaattatccctttaaattttaagtttaacaattaggaaaattaaaaaaaaaaatgatcaaattagcgagcgtgtatgggtccaacccaaacccaagcatgtgctaaaaactaacccgaacccgcctaatgaagttgatcgggttggaccccacttgcccataggaaacgagtttttacaggcaaacccgataaaaatattcaggagagaacatgtaatagaatgtggccctcaaggaggggttgttttgcctgttattgttaaataattcacatgacaaaaagagtattcgagtctctactagtaaaataatcatataaaatgtgttttacagctcaatttaatcatccaaacaagtaacggattgaagtttgtgcaatataattattcttaagggagtacttaataagttatttgtttgataaaaagttctccatcacataacaaattaacaaatacatggacctcgtccacgtcacacaagaaattgaaggacaagggagagccatatagaaaagaatattatagtttgaggctgccatttccggtttagtttctcacagtggtcacatgcttaagaagcatttcgacaacatcctgagatattcttgaagcctcacttttcaggtgattgatcttagtctcggtttcttgttcaagacgcttcacgttagcacctgaatctccactgctctgctcattgacaacaatgaaaaggtttaaattttagaacaaaaagagaagtgatattctctttatgtaaaaccttaaaagaatttcacgactataaatgcatattactgagggaggaatatccctgctgattagtgaattaaagttcaaaatccaaacatacacaaggcatatagtcatattgttatcagttttagagactcaaaagatataaacttactgctgcaactttcttctggaaatcaagctccacttgggcacgatattcagcaatttccctctcagcctcttctttggcttgtttcagccttgccagttttgctacaaggtaaaataaaataataaggaaggagaagtggggaaaaactacattaacaagacacagaacactgctataataaactataaaagtcatgtcactgtccactttcttttccccaacacagaataaacaaaaactacagttcgggatagagcagccatagaaaaatccacacatataaaatttacacacgtctgtaaacaattcaagataccaatagcatcatcaacaagcacgcaagctatttagctaagaaaaaggaattaccacttctggcagcattcacaatatgttgcgcttcttgctctgcagcaagcaattgttgaattccaccttgactcctgttggaagccattattcctggaaataaatcccacagtttcttattagaacaagatagataggattggtattaaaaaagaacaaaacccattacataaccactctccaaatccttttacacggtaagattaaatcttaaatcatgaaattatatgttctaatagcaactaactgtagaggccacgctatcaaaagatgactcgtctcagatattataacccatataaggtacttctcttttatgggatagcaaacctaaactaattccgataaaaaaaaaaactctgttaataaaatccagaaaacaacatacaagaaaaaactaaactaatacattgtagtggcttctctctaatcttttcaagggcaaaatttgtttaacccattatcggaattgaataagagcaaactaaaaccacaaaacattaaagataacaaatttactagatcaattatccattccagtttcagattttagggatacaatcaattctaaatctagtgcagtaaattgaccgatctacaaagaagagtacagatcagaatacaacatttacaggaaccacaaaatcagaacttcgctccacttcacacacaaatcaccgatcacaattcaactaaattagttgatttttataaaaataataaaataaatcgggttcatagagcaaactaaaataaaatcgaacagcggttattgaagtagaagatctgaattaacaataagcggaataacagtaaataaagaagcagaagaaaactccatagttatggaagtacttaccttgagtagtagacagagaggaaggagtgtttggacgaaagaagaagaggagagagatcgggagagaccttccttaggcttggatttttttgatatttaactgcaaaataattttgccagcgaaggacgaataaagagtaaggatcttcagcctaagtatgggcttataggattcgggttttgggtctgaatcggctattgggctctttatatatgcccaaaaattgatgtgtctttctgaattatagtataactaggattttataaaacggattatgacatatattttttagaaaacaaaaggatatattttataatttgcttaagattttttataattttaaggtggaaaatttatattttagttgttgctaactcttttagttatttcaaatgttacctcatgaatatggcgcaataataaaggcatgttataataagcaaattaatcaaatcctttcaaaaaaaaaaaaaattattgataaaattgaatattacttgtatatgattactaggtaatatatcaatagtatcttaaaaaataattataatatataataatagtaaacttacattatataattacatattattattaataattttatttattaaaacataaaatttcataaaataagataaaagaatttaagtatatccattaaataataattattttttgaaatgagtaaatactaattattgataattttattcattaaaagtttatttagtgtgttttattatttatttattaaaaagtttaaaatttatactactaatgtataataaaattataaaaaacttttttttttccaaaagtgaagtaaacaaatacagtttatataaaaattattattattattatttaagtaaacactctttcctataatgtattatgtttattttcgcatcatttaaagttgctactattattgtagtttctattgttatcaccgtatctcaccctttatcattatcgtattttacttgtagtcgccactattgtctttttcaaatctcaatcttaatcttagattttatccccactttcaaatattgtatatattcaaaaatattaacaata

SEQ ID NO: 16231 - DNA, 8384 bp, Cannabis sativa
  modified_base (7404)..(7404): a, c, t, g, unknown or other
tttttttttttttaaatttgtgtttgtttgagaccttagatggtgacagttatgttattttttggcccaaaagtgcttatcgatagtttatgtttgtgtaacacagttttgtcaatttgacatttatcaataggttatcgatagcctttatgatatttatcgatgatttttgtttgtgttttgttaatttagtatttattaataggttctcgatgatttatatttgtgcataaaatagcggtgcacagacaaaaaccatcgataatcacattttggccaaaaaaccatactcctaccaattaaggtctcaaaataaaattcaaattaaaaaaaaaaaatcatgaaaatctagaaaaaacacagtattacaatacatacaatgatcaaattaaaataaatttttaactcacaatttttttttttcaaaatctaacctttagccgaggggtgggtcaacggtgggggaacggacggtggtggtctaggtcatcgaatggtcgaatggtggagtggatcgccaatgagtggaaggggtcgtcgaagatagagagagggaggcagaggttcggttgggtccgttaagcacaagagagaatgatagatttagagaaagaaaatcttttttagattttaaaaaaaattaaatgaaaaatgcaatttagataagagtagaaattattaagataaaatagggatgttgttttaataattgggtgttttctttaggaataatagattataaaatttccctatgaaaaatactaacagatacatctatacacctctatttttaggatacacaccatataatttctcaatcatttatatttccatttatattttttccacgtaattatttctttaaataacagaaatacccgctccccaaaatttcataatttttattaccaaaatattattactattttttttttcaaaaaaaaaattaattaaattttcttcttgttgttgttgttcttcaaaagtctctttttgaccaccaccaccattacctataccattgatctccttcctctctttcttctcttcttcctcctatctgctccagtctttcctctctctcatcagattccatggttacccattattatttattacatatatcttatgattttctttcctaaaacctctaaagctcaaaactttatatctaattttcttccttagttttccttttttccaaacatgggtggttgtatatctgcaaccagagttagtggctcaaatagcaacaataacacaaccgtgaatcaaaatcgtaaagagacaaccaaagcccaagccagaaccaccacagccaccgccgtacaaggagccacgcgccaccatcagcaacggactcagaacaagcggaatgagacccagaagaagaacaataggaattctcaccataataatcataataatgataataatcctaaagataaacatgttacaaggagacaagggggtttgattccttgtgggaagcgtacggattttgggtatgataagaatttcgatgagcgatatacgatcgggaaattgttgggtcatggacaatttgggtatacctatgttgctactgataaggctaatggggatcgagttgcggttaagagaattgaaaaaaacaaggtaattctttttcatatgattatttgggttgtgaatgagctctgattaaatgatttaagataagaattaggaataattttgagttgggaatattccacttcttataaagtttgcatttttgtaatgaatgttttaatacaaatttctattgagtttcctgtagatttcccactctcaattaggggtataggataccctttattaggttaatgattaaaatagtgattggtatcattgaacagggttattgtcttattaatattgcctatgcttaatcattttgtttcaaatagtctttggagactttgaaaattaaccaagtggatttggtgacacagatggttcttcctattgctgttgaggatgttaaacgagaagttaagatattgcaagaacttacaggccatgaaaatgtggttcaattttataacgcatttgaggatgattcttacgtgtacatagttatggagtaagtgttaaactatttcatgctgcaaacaaggcgattttaaacgattctcacattcgtgtacttatgggtgttcttttgactaatttgtttataggttatgcgagggtggcgagttgttggatcgtatcttggccaagtaagaacatttcctgataaaatattactctttgccttgtatgattccaatagattgtagttctttctccaccatttgattataatagttggtattatgtcattaccttatcaggaaggatagccgttatactgagaaggatgcggcagtagttgtccgacaaatgcttaaggttgctgcacagtgtcatttacatggtttagtacaccgcgacatgaaaccagaggtattttcttacttattggaatgcttaggattccaagtgtaaccatctcgagtcattttcttattaggcaaaatggttccctgacatttcttctttgattgtagaattttctatttaagtcaaatcgagaagactcatctctgaaagccacagattttggtttgtcagacttcatcaaaccaggttagtatgcttttattgtgaggacctcttaactgctgaagttgccttatagattggattgctttcgaaaccattataactgtattttcatgaataatacacagaaaagaagttccaagatatcgtgggcagtgcttactacgttgctcctgaagtattgaaacgcaagtcagggcctgaatctgatgtctggagtattggtgtgatcacctacattttgctctgcgggaggcgccctttctgggataagaccgaggatggtatatttaaggaggtgtagtacgttcttaattttgttacagttgcaacccttgttttttcgtctttttttctttctttcaatttcttatgtatgggctgtgtatcacttcacatgtcagtcaccaatatttaatctagcaaagatctatagatggttgctattaattttccccgatccccggttttcattttttatagagctagagctagacactttgattcactttcatcgccttttccttcccattttctaaaaaaatgtacttgatgtccttttcttcccccttcaaaccccttaatgtgaaaaaaaagagatttgtatatatatttatatcgttctggattaccaatctttgtttgcaccttttgttcataattgttttcattgtatacttattcactgctttttcgtctattcaggttttgagaaataagcctgatttccgccgaaagccatggccaagtataagtagcagtgctaaagattttgtaaagaagttattgataaaggatcctagagctagactaactgctgcccaggccctatgtatgtgcctgctcttttatttattcattttgaaatagatgctctgattgttttggtgattcagaaatgctaagttattttccaacattttggtttaatggtagttacacaaatattccttgtgatttcctagcataaatagccaagttagaaaaacatggtgttttcttagctagagatctaatggagaaagaatattagaaaatcatagtattttgatctgattgttatgatttgtttcaatttttcagcgcacccgtgggtcagagaaggaggaactgcatcatcagagataccgattgatatatctgttctgaataatatgcgccagtttgtgaagtacagtcgtttgaaacagtttgctctaagggtaaggtgtttttgtcacctattcgatcggtaaagaagacaagtaaaaggctcattgagtattgattgtgtttaatggtattgcaggcattggctagcacacttgatgaagaggagctttcagatctcaaagatcaattcgatgcaatcgatgttgataaaaatggtgctattagtcttgaagaaatgagacaggtcatttttcgacacaagacaaaaatgaacttaagcaatcactatcatgcactgtattgattttgtaacaaatatgatgttcttgcaggctcttgcgaaagatcttccgtggaaactgaaagactcgcgtgtcctggagatactgcaagctgtatgttttttaaattttgttgccccatactagtagcgtaacggtttcattgatggagatccttgctaaagttgtttctttatttgatatgtttgatgccagattgatagcaacacagatgggcttgtggatttttccgagtttgttgccgccactctacatgttcatcaattggaagaacacgactctgacaagtggcagcaacgttcacaagcggctttccataaatttgatatagataaagacggtttcataactacagaggaacttagaatggttagtggttatggtatccgaggagatattgtttgcttgacctttggttgcggttactaagatttttcctttgtttcttttgcagcacactggcttaagaggctccattgatccccttcttgaggaagctgacattgacagagatgggaagataagcttatccgaatttcgcagacttctcagaactgcgagtattagttctcgaaatgttcccagcccttccactgggggtcctcggaattttaaaaagctgtagattaaaattgagatttttttgaaacttgaaatgagaatgaatagtaaaagagatgggaagttaattccttattattcctagtttatctacttctgaagtcaagaaaggcccttatcttcttcttcttcttcttccatggaaacatttgtcaaatgctaggaattcaatgatagcaatcttctgcaatcggttatatatagagctggtgtggaatgcagatggatattgacagaagatggctccatgtgttgtggttattacttgtatacaatcctttttgggagtgttggggtttttcttcttgtaccttacaaattgtgatgtgtgacataaataaaaacagaaaatgagaaagagagagagagagagaggaaaaaaaaatcaaactgtgatggattttgtggactgtatatagtttgtttctcacaattttaatcaaatggtcttctcaaattttagttgacagtttagagtgttattaattaaccactgtttttgatatgatagtctgaacaaaacaaaggcaaaatgctgcttttgattagttttatatactaatttatgacctggaagtggaatatccagctacaccagaaaaacattattgtacaggtaatttacaaagataccaaactttgacatgccatcctgtaaattgaactatacacctctcaaaattgagctagacacctctcaagtccctcttaaggaaaccgaaaaaagtcaagagtctcaattcgactttgttagttggcaacaaagatacccttttttcctatctggaagttggttggaacacaacttcagttgttagattttggaatgtcacccacactgttggaggagctatcttgatgagcttgggaagaaaacctacttgtagagcttccgttcgtggtagtcctttctttcctctgcgattgcttgcttttcttacttactccagaagacgagtcctgcaaatactcactcagtcaagtccccatcattaaaatggcttttcgtttgttcaaatagttgttttcaacaactctagaaacaaacctgttgggttgaagaacctggcatcttaagttcaagatccgttgctacatcggtggaaccatcagaagctctttctgcattgctgccccttcgttgatcacatgatttgcttctcgaatcttgtttgcttgaaatatgggaagtggaagcattctgagatgtgggctgttcgatcggaggatggactggtgttgggtattggacaaaatttggaacagcgccgggattctgagctccaaagaacgaaaatggctgcgatgaaggatggaagggaattggaccttgtggaacaggaacaggcattggatatgagtaagttggacccataacaacagatggatcaattgcaccccatgggaacataaccctcactctttgctgatactgaatgttgagattttctatatcagattttaaagatgccttctcttctcttagctcatttttctccatagtcagctgtttgtaacaaacaataattgataaaagcctcagcaacaaccatgaagaaaatacataagaagaagaagaagaagaagaatttcacctcacgcgattcttccgaaagtgatgcatactctgcctttaatttgttaacttcagcagttaaatccttcagcatttgaattgagtctgtaagtattgttcctttgtcattcttgggcctatctgaatcttcatttcaagtaataacagagtaaatattcaaacaacaagcttttcactagtaccaaccaaagaaggttagtatcttaattcaccattgtttcacaaggcatttcccctctaaacattgacatgtacaaaattgtgttcccgaactttttaggccattaaaaaataccccccaaactattgagattgtcggattcaaggatttcaaccaattccatttggctttactaacagacgcttaacatggacagaaattcaagaatcacaattgggtacatggacaatccccacgttaggtgcccggtagtcaaattaaacagaattggacggaagtccttgaaaggttcaggtgcacaatttgttactaaaaaatcctaagaacagcatactaaaaaccaatttatggagtttcaattgtaacatacctaatgtgtttcccagttcaagaaagtactcatttaatttatctcttctcaacttttctcggtctgccttctgaacttttcttgcagttactggatccacatccacatctgccttttgtttttgtctgtgtatcaatcaacaacaccagcaacaaagaaaaaagtaagtaactaactaactaactacacaatgatctaacttcaaagcctcatcatcaacaagtttgcaactgaattgaagctcaaaaaccaagtgattactctcttttaacaatctctaaacttttaattgtattcactttcactgttaaaacaatcaccctaacaatcttcatatgcccacataaatttacacttgcataattgcaatacagaaaaagtctcagcaaattcaattctctatacataagttcttataattaaagaaaaacccaggagacaagagcataaacccaattaaaatcactctccaaaatatcatctttactgtaaaaattgaaaatttatggtttaattatatcatacataaatcataataataataataatnataataataataataatggataaagaaatagataaaccttgaatgatcatgagatgaagatggagctgaatgtggagagtaatcttctggtttccattgttccatagctagctagggctatatgtttctccaaattagagaattgagatagaaaattttggtgaaaaccccaaaaaaggaaaagcaaagtgagttattattattattattattattttttgaaagaaagtgagttattatttaaatttaaaggttttggatgatccatgagcaacaacaacaacccataaaacactttttattaattttaatttgtggaaaatatgttattctgagacgacgataatggacgaggtcgggagttgtggagttgggacttgcgtcatgggcggagatgatccaatgatctgtcgaccatcaacttacttttctcttaaccaatcacatttaaacacctcatcattctcccatgatattaaagagatattgctgtggtgcacggtataacctatggtcctatatctattgtgcccaaattcaggatagaaaaatgtgattggattcatgaactgatgatgctgtgcctttttagaagggtatttaaaaaataaaattaatttacataaatatagtaaaaaaacttaatagaaaaaaatatggtatttaaaataaaaacttaacatatatagtataggatatgccacttttaattactatataaaatattaaaattctcttcatatatttttttaaaaaagataaaacaaatgaaattacaataatcaccaaaagtcgccggagtttgctgtcggtgtcgaaaaagtcgtgggagtagctgtcgctatccaaaaaagttgacggagttgcttccggcaccgaaaaaatcgtcgaaattggtattgttgccgaaaaaatcactaaatgaagaaactagttcctcataaggaaaccatgaggaaaccagtttcttagtaattttt

SEQ ID NO: 16232 - DNA, 4732 bp, Cannabis sativa
aggggctttgtccaaggggagttggaaaaacgctctctcagtttcctcgggagagaatggttcgtctaaaagagacctgtccgtatcggacagagagcgatcaatgccatcaagagctatacgcaagtcagtacgtgaagggtccgatgaagtgaaaagtgtgttaaagtgtgactcgatttcccggactatatcttcctcctccgaagccatgcccccgttaggtagaagaagattttggattttatttatctttttcctatgggaagcaaagcggtggaaaaatttggtatttttgtcaccctgagccagccattgggttctggctcgccgtttccaatatgtctcttctttatacaaaagggcgtctaatctggattggagttcttttatcttcccaattgtatgactatcccagttagatttggagcaggccagctctaagtcctgttcgagtctgctgatgcgctttttaaagtgaaagtcctttttgtgattccaagaactgagatttttggcacacctctcttgggttgcaataaggctagggatagcatcctggggtgtgtcctggttaatccaagacttgtcaaaagtccgagtccagttcgggtccgagagccacacattttcaaagagaaaacgcttattagaaactcccgaagtgggagcatgggatctagaggttaccagctccaaagcgcggtggtcagaaccaaaaaaaccgagatgggtgagaagagcatccggaaagagatcattccagggattgttcacgattccccagtcaattcgctcctaaatattattgggagaggccacattgttattccaagttaacgggggccccttaggatcaagaggggttagggtaaaagaatttaaaagatgtcgaaagtcagaagaaggtccccgataagggtttcctccttgtttgtcttcagaaaaaaggaaagcattgaaatctccaatgataagccaggggtctctgggattgtctctcccaatcctattaagaattttccaagtttgtggtctaagggactcagtcggagagccgtagaaacaagtgagatggaaaaaaatattgtttgcagaaccagaaacataacaatcaaagtgacttatagattgcgggagcagagtgactattacatcattggtccataacaaaatgaggcacccacttctaccaatcctagggacctccaaatcggagtcaaagtgaagcttaagtctaagcttatcaacaacatttttagctagcctagattccataataaacagaacatcaggattacacacagtcactaaacgggagaggttgcggaatgcacgatcactcccaattcctcgtgcattccaactcacaatcttcatggcggcaggcaggcctactcagtggcgaggcctgcacttccagtggagacttcagtgacatgctccttgtcagtccagggttgttgaagaagaacctggcgtctatctccatcacaaccaaactcaataagaaaaagaccatttgtacgatcggtaatggtcactggggaccgagagatgtgatttcaaatattggtcattttgtctataaagttcttacggttaaatgacttaaccgtataaactttggctaccaggtagataggagtttgggtggtctcggtgtcatctgagtttagtggggtgggctcatgtaggatttgaatggtgctctcagtttctgtaagattgagagccacagaaagagaattggtgagttcatccatattgatgatgagatgtgggctataggcagtgaggtaaaaaataaaccagagaaagtgtttgcctaaaaaaagaaaattcaaaggaggaaggatatatagcagagagttttttatggtaaaataaccttcaatagcatcacctaaagtgtatgagggaagagcatttctgaacttgaatagaaaaaacctataatggcaaaaataaattacaaccgcagcaattaagaggatgcaaagctgctgcagaatggattgacagatgataataggcagagcacattcagtacaaataatattaatcgaaaccttcatattctctttggcaaacatactgtagactcgatcggactgggattcgacagagttcccattacacatatcccttctaaatttaattgggtcagggggtaatttaatggggaagccaaatttgaatctaaaaaaaacaaatttcaactctatttctgagaaacgagttgacgctgggcagagagtttgagctaggaaattgaatacctgtgagttttgcatctatggacgtacggggcggagatctagcgggttggccggaataagtgttgatgcgacttgggtggttgggtcgacttcgtgcgacgggcttggatcgacttgggtgagtcgagctaccacgggtgtcgtttgaagaggagtcggagccaccatggtcactagatctagggcttatcaatggtttcacagtgtggaaacggttcagagaatggtgtgaacgcaaggatgaaagctggttcttctgcatgttgaagatgagagagacaaagagtctgaaaaaaaatatatatgtatgtctaattgtctatctttcttgtgaaatttggtaaatctctctcttttcttacatataacatttattactctatattcttcctttcaaatcacttttcttacactattttcttactctttcttctctctaagagtttattatcttttttttctcactcttcttcctcaagttttctctctctctctctctctctctctctcttcattaatatatgtgttttttattctattttttgtcacttcttcttcatcttcttttcattttttctttagtttttaaaatttttagtcacatttttatgtaaattgcggttgaaagtttattttagttggttattgatcaattttttattttcaaaaataatttttgttttaatttcttcttcttcttcttcttcttcttcttcttaataaattagcaatggtaagaaatatttcaaaaaaaaaatctcatagccctacatcagttgttcattatctggaaaagagaaaattaaaacatttgaaattaatcattgaagatttagactcagattttgaacttgatgatggagattttgagatacccaaagtgctgaaggtatttatgttatttttcagttgttttagggtttttttttttttttttttttttttttactgtagatgttctggtttttttctctaatctatgtcttctaccaattttaatttattgttatgtattttgtattttttttcttattgtttgcatattttttcgtattttttaactgttattttgttgttgatgagactaagctagcatcctggcgaaatggctcagagttttggtgaaagttatggtggccaagccgcttattgtgggttattttatcaaactcaaaaatgggaagaaaattttgatccaattcaaatatgaaagacttggaaacttttgtttcatgtgtggtcatttgggtcaccagcggagtacctgttctcagacaacgctggacgattctgaaggctcaagggataccattttctctttttggtccgtggctcaacccagccaccaagtatttcgactgcttctctagtaagcagagcctacccaaatctcaaatgaaggattatttagctttagggtcgaagccaaccaccttaactcttgtagcaccaatgacgatgattagggacgagctctcgagccaaagcctcgaatgggttgagtacatagttcacgaggaatttcaaactaggtcagctaggtattgtactgatacaagatctgcagcaaaagtcgtttgggttcccaagcaaggtaagataagtcaagaggggtcaagggcaaaacataccttttttgctaataattaagctaggaaatctctgaagattggaaagcaagctgagaggtctccttgcttggaagaggagtagctgccgagacaaattttgaaagttgtgggaaatgatgttgatggtaataaccctaatgggtctaattgtgttgggcgtgtgagctttattatgtcggctcttgtgttgggccctaatatccacaccaaaacaagctttgaattgggccaagatttaagtggacatataagtgagacttgggcctgaacaaaattttttcaagcccaataaactactttaaaagagcttaaatcttttggagccaaagagataaatgacatacaacatgtggaaagggacattgagttccatgctacttcagaattcaacgaaagaaccaccccatttagaaagaaaaaaattctcagagagtgcactctctctttgtccatgaccaaagaagactctccatcaacatcctggtgtggttcgtgattttccttgggactgcgaggttggaaagtctgcaccaattagaaacacaaagttggctattctttctcaagagaaggtgtgcgataggaaggttcaaggaaagaaatggatctttaaatctccttccaatgatgcaatgctaatgggaataagctttcttcaaatgttggatttaatgtttggctatcatagtggaagtcgaaaacagaccttacagacctgtttgttccccttaatgatggtgtgaatgtggatgatgctagctctggagtctttgtccagaataatacccctgtggaggaggataactcatctcctccaca

SEQ ID NO: 16233 - DNA, 10769 bp, Cannabis sativa
actcaaatgaggatcagtgaattggctttttatgtcattttatcatttatgtatttcctttccaggtcgttgtcgtctacaattccctagggtggaagagagaagaagtgatacgaattcctgtaagtagctgcactgttctttataggttgatttgaaatggcgtaccttgtactgatgatttcgattacgcagttttctaccaaataaagttcaaaagttggatacatgaggacagggcacgatgtctacccgtgtccagcacctccttaaaactaaattaacaaccatcatcgatttgcagataatatacaaaaagaaacttaaggctgtgtgcatttttaggtagtaacttatacgcgtttactaatggctcattgcaactcaaaattttgtaggtttccactgacagagtaagtgttcaggattctaatgggaggaatgttgaaacccagcttcttcctatatcgaatgccacttttaatgttagaaattattatgtgagagcatatttgggtggatctccgagagaaacaattaaatattggcttgcattttcggtgtcagtaccaccaattggtttcagtacttacataatttctaccactaaacaaacaggttggccatattgtaatgttttttagagtgatacatgtaagagctcttcaagttagaccttacaatctaatggttgttctactttacaggttctagtgtagccatttcttctgtgtacagatcagaagaaagtatagacaataccatagaagtcggacaaggaagtttaaagctaatttattcagctcacgagggaaagcttacacactatgctaacaatagaaacttggtatgctagattgaggatttattttcccgctacatttttcactttgttttatatgatttgtttcttgtacgaagttttgtttatttgtttctcaaatcaaaattatcacatatagataaattatttcacgaacagcgatgctaattttcttttttggtttccattctccttgtatgttctttgttatgcaattgctcatgattttgtcaatttttatatctatgatgaaagatggtgatgtgtttactgtgtaatgttcctaatgaagattacagcatctgcggaacagtcatacagttattacagtggaaacgatggtaccgataaagatcctcaggtagtgaattatctaagcacttgaaaatttactatgctttgtcaattcctaaattacttctgttgtttagagtagtttaagcatcgatatggttttgttttttctgttgaaggcttctggagcatatgtcttccgtccaaatggcacattcccaataaaatctgatagccaggtagctaaagtcatttaactcgtgtaaaagttttaaatgatcatggtgctgtcaatttatagaatggagtacctgaaatgtaacactcctatgttttaggcttctctcaccgtggttcggggtccagtactagatgaagtacaccaacgggttaatccatggatatcgcaggtagtctgctgctccaaatataacaagatcatacagttgttttagacctgatttatgtatatcaaattgtaatggtagtatggattagataacgtatgttttggatttgtgttctcaacctatggacatttttttatatagtttcagtaacaaacccatatgtatgcacagattacaagggtattcaaggaaaaagagcatgctgaagttgagtttactgtaagttaacttctgaaattgatctactaagaacagagtatcctgttaaatttttttataattgagaatttactgtttgctggatatgttattctattctaggttggacctatacctgtggatgatagcattggaaaagaaatcactactcaaattacaacagccattaagagtaatggaacattctacacagattctaacggacgtgacttcattaagagggtattttaaacctctactgattgaatttaatatgagatttttgaatttacactgtgctactttatatatctttgtacagttaaatatacaaaaagatgaagattttattggtttatttcaagccagtacagctttctttccttgttttactttagttagttcttacttgatgtaaacttcgatagataaattgggagcgggggatatatcgggaaaatttctctctttcttaggggtaacttccaatgtgatgttttcaactgatttgcagattcgagacttcagaacagactgggagctgcaaaataaccaaccagttgctggaaattattatcctgtatgcttccatttcttttcttgacagttgacacgttgaacatttgcttcatacaaaatatgttatgatattgatccatttcatacaaaatgtgtcaaaggatgtggtctccattccattttatggaagtaaacatgagattataatcctgtatgttatgatattcattcactttgttctcaaactgcatttatcttatctcaattccattttacagtttttacggtaagcatcaattattgaacatgtgttaagttcaaatgtctcaatttagtttttgagagtgaatccaaaaacatctgctttgttttgtgtttctcatgctctagcatttttcatgtattctacttctgactgcctaatcgccttttgctattattaatttaatatctttcagattaatcttggaatttacgtgcaagacagtatctcagaactgtcagtgttggtcgaccggtcagttggtggatccagtttagtagatggtcagatagagctgatgctccacaggtttctattgtcttttgatgttttcccaagacattattattccctggtgtaatgtatttgatataataaactaggattgcttccctatgatttctaacaaactgctttgattttgtaggagattacttcatgatgattcaagaggagttggtgaggtgttgaatgaaacagtttgtgtacttgataaatgcgaaggtttaactgtaagtatactattattccaaccgttattgacagaagaaaagttgattttagaagcttttcttttcagtttcatttgttcttttcttattgttttgtatattaggcctattttgcaaggtctgattctaaacatcctttaagtagtaaggattgacgaagttggtctagtggtaaggaagaatgttggaaaggtttgaatcccgctagactcaaaaacctggcgccattgggaggaggtctctccctgtcaaactgccaggccaaaaattttatataagaaaaaattcttacattattcccatattctgcctgattttgaatttcgtttataggtggaatggtttagaaagtagaaacctcccttctatcttgaattgcttccttagcatagggtgtttcaattacctgttttttactggttaattcctccttttcccttgtttcagattcaaggaaaattttatgtcaaaattgatcctctcggggaaggtgccaagtggcgccgcacgaccggccaggagatatactctccacttctcttagcatttacagaacaagtaaaggaaacatgttatatagttagctttattgatatccggccacaatgcttaggtgatctttttctttctctgcaggagggaaatgagcacttaaactctcatgtatcaacattttctggatttgattctttgtatgctttaccgaacaacattgctttgataacgctccaggtactactgatcagatattaatttcaataagttttaggtttttctcttttttatcttttttcggaagattaccaatgtgatcatgttttgaactgcaggagcttgcaaatggaaaagtactcattcgacttgcgcatctttacgaggtttagtttcctttctttaacttgctgaattggcaaataaacattaccaatatccatagtacaatatagtttgccatgaatttcttcttctagttgtgattgtgatttcacaacttctctaatgggaaacttatttccatttacatttagattgataaatttacaaagcaaataggatattggcacttaaatgcaatctacaagggcaaaactagataattatttatcagtccatgaaagtgacttctcttagtttgttgtatcaatctttatgttgtttatatcataattcatgcatattataatttcctcatatttttcttggttttgatgcatgcaaagattggagaggacaaagactactccacattagccagtgtggaactaaagaagttatttccaaagaaagaggtaagacgaggactcggttgaagatgaatgctgtttttcatccatacatgtaataatttttcccatgcattattttcagatcagcaaagcgacggagacgagtttgtctgtgaatcaagaaagaaccgagatggataagaagaagctggtatggaaagtagaagaacgctctggtgaagagtcaaagaaagtgaagagaggagggcctattgaccctgcaaaactggtggtggaactttaccccatggaaatccgcactttccttatcgagtttgctcatattcgcgtgtttggttcctgaaataaaaaagataaagagcatttcataattggccttttctgaatttttgcttgagaatgaaaaaatagagttagattgcttatgacccttatttgtagttgtgtagattcgggtgttgtatggtaatgttgagaataatagtgatgtgaaatggccaaaaaaacaagggacattttactaagagccataaaagcatacttggtttaacatatgtaaaatggatcatttgaatttgtaactctaaaaaacagagtatacttttttttttttttctaaagaatcacatagtttttttcctaattaccaaaagtctattatgggttaaagataatatactttgagagtatgattttgttagagatattgttaatgtgtaaaaagataacactatatataaagtttatgaactattcttctcagtcaattagttttgaaatgcaactctatacattttaactacaaatttccaaattttaagatgatattagagtcagttaaaactttaacgagtatccagtaaaaactgatctaaaagtaaaaaaaataaaaaaaaaaattgtttgtaatttgagaatagtaatatatatccacattctcaagttctaacggatttacatacccacaagaaataaagagacaaaataaactaaatagaatttattactaataaaaatagttgttactatttgtaaactttgcaccaacactaaataaatattgaaaatttgacataataaataacaataataaaaaacgacaatcatttagaatatgatatgattctctatataaattatatatatctacattttgaagaaaattaaaatgtagtattaagtttcaaaaacatttacaattttgtttaaaaagtcaagttgtttatggataaggagtaaggatcatcaccatcatcatccacaccacttggcccacctacccacctaatgtgtcccactccactccacattgcattgcattacacttcactcttctttattatatcaaaaccaaaacaaaaataaaaaagtgtactttaatcctaaaagtctcaaactttatcagtagtttccttgccttgtatgtatatcagtatatgtgtatctacatgatcacgcttcacactctctctttcagagtgagaccaccagttcatgcagtatcactcaaactcaccactgcccaccacttaaagtaactgtctttattagctcaaatagctcaagcaccaaaaatttgagttgggttttgaaatggggactctggcggcggcggtgttcttctctatggttatgttggccggagttacagtgacccaatccaagtttatggtatacaacacttctcactctgttgttcgtgacaaacttaatgtccatttggttcctcacacacacgacgatgttggttggttgaagaccgttgaccaatactatgttggttccaacaattccatccaggtttttctctctttgattatatgtggatatatgtatactttggcttctttgaatgtatgataactcttatggaatctgagactattttcctgttcttttgttttttgattggaaaacaaaagggggcttgtgttcaaaatgtgctggactctttaatccctgcattgttagctgacaagaatcgcaaatttatatatgttgagatggtgagtatttgggatttttagtgaattacttatgaattggtgtttataatgcatatacatgtgtgtatgtatgtttgtgtgacttttgtgttgtttttgtttggttgaatcaggcattctttcagagatggtggagagatcagagtgaggcaatgcagcttgtggttaagcgccttgtcaactcggggcaacttgagttcatgtaagtattgggaatttgctaaattaacaacatgaaagttgttaaaataacttaatttggatttcttagtgtaaatcaacggttgcttgaaccgcctcagagttgttttatggtcgcttagtgtaatttttggatcattgggatggagctagattttattttgcaagtaatttctttcaaaaagttagtttgctaatacatatttgaataaataggtattttgcctcctgaactattattaggcactaataatcagcaattttaccccccaaactataactaccatcatattttgctctctgaatttttaccaatgccaaattaagctctttttatttaacagaagttcagagggcacggcgtggcagtggtaaaagtttgggggacacgatcttattagtaacaaagttaaggaggcaaaataacaattttgttttgaatgtttttaactaaattctttgttgcagaaatggggccatgtgtatgcatgatgaggcagctactcattatattgatatgattgatcagacaactcttgggcatcaattccttaagagggagtttaatgtgactcccagaattggttggcagatcgaccccttcggacattctgcagtgcaggcttacttgttgggagcagaagtaagcatataattagtgcctaatttgatcagaaaatttcccatttgtcatggctaatgatgtttggtgtggactattttccttttgctgtaggttggattcgactcttttttctatggtcggatagattatcaagatagagccaaaaggaaaggtgaaaagagtcttgaagttgtctggcgtggttccaagagtcttggttcttcctctcaggtgaaaatgctagccctttatgctgttctatttttgtgtaatgctatatattatggttagtaaaaaaggtaataatgtgagtgaaatttctttctcttggtttctcataattagtctcgtctttatggttgaagattttcgctggtgcatttcctgagaactacgaacctccatctggtttctattttgaggtcaatgatgcttctccagtagttcaggtttgttttctagttcaattccaaaccaagaaaacttacaaaatctctgtagattttcttttgtgcaacttgtttatactcctaaatttatttacttcacttacttgaaggatgaccctgagttgtttgattataatgtgcaagagcgagtgaatgactttatcgctgctgcagtcacacaggtaaaatgatttctttcttacctgcatccgaggatgacattagtagaatgagctgtttcgaaaccctttttcttttcctagttgaaggtgtttcagttgtcggttgtaattatttcattctcaggctaacataactcggacaaatcatataatgtggactatgggcacggattttaagtatcagtattctcacacatggttcaagcagatggacaagcttattcattatgtgaacttggtaactactccttaagacttgtgtaaatggctttagcttgttttgacttatacttcattagcttccatagtatttactgtcaatctagctagtttcataaactctaaatgcttttgtttcttcttacatattttctaggatggtcgtgttaatgcattatattcttctccatccatatacacggatgcaaaatacgcagctgatgaatcttggccgctcaagattgatgacttctttccgtgagtttgatgttcaacagtcgatacaatatcttttcttccatgtcaaatcttttcttagattttatacgattcatctttgcaggtacgctgatcgtgagaatggttactggacaggatactttaccagcagaccatcagtgaaacgttatgttagactaatgagtggctattatctggtaataatttttcttttttgaatgctttagtagcctaacctctctatcatatgtctaaaactagttctgaacttttatatcaatatatttaattaacaggctgctaggcaactcgagtttttcaaagggagaagtaaattaatcaatacagattcattaggagatgccttggcgattgctcaacatcacgatgctgtcactggcacagaaaaacagcatgtggctaatgattatgtgaaacggctctttataggctacaagaaggtgtggattatcttgcgcttcgcttttcatttcttatcaaagtattattactcacttttatattattgttcggcaggctgagcagttggtttcatcttcacttgcttgctttgttgaccatgcagctggatgtgaaaaatctactacaaagtttcaacaagtaaaaaattattgtcctcttaattttgcaaaatattttcctttaatgatttcataccccgaattttaataccttatggattgttctttcttcttctttttcttccctttcagtgcccacttttaaatgttagctattgtccttcatcagaagttcatctgtctcaaggaaaaagtttggtaagaaagatcatttaccactttgaaatttcttgctcatataatgggtgtaactttcccactttgaaattttcaatcttagaatcttacatgggtgtaactctcatataatgtattttctgatctgtatagattgttgtgatctacaactctcttggatggaaaagagaagacgtgattcgaattcctgtaagtgattcccttatgttttttgtttgatttgtatctcttatttcttaagagggagaaaatatatcatattaggattctagctttaatggaactaaatttagtttctatgcatttccattttgcatgtctacattcgaaaacgatagtagccgtataacaatatgtaaaaggcggaatatttagatgaacgctgtggtttagatttgtaacctaacagaaaataaaatgagaaaatatgatgaaattgtccaatgatgtaaaatttcaacaattgtattgaacaagattttcatgaaagaactctctcaggttatattgattgagatgtgttattatgtatttagcttggtcctcattgtgatctttgaattagtctcatccctttcatgaattagaatgaagataaaatataagatttgcatgttgtttcacgcgaaaacatgttttctatacggattacattgaagcgaaatttctatttataagatttaattgtctttcttaggtgataaatgaagatgtcatagttcatgattctgaaggaaaagaaattgaatcgcaacttgttccactcgttgatgcccatgtgagcttaaggaactaccatgttaaggcatatttaggtctcaatctaactcagacacccaagtattggcttgcatttgcagtatccataccgccacttggtttcagaagctacacaatctcaatttcaaaaaagccaggtcctctcttgccgttgctattcctttatcatcttttcttgaaggaacatgatgtaaaactttattttccaagttcgttataaggttgtttttcgtgcttgcaggttctagttcaactagatcatcagtacacacatttcacactagtgagaaatctactgttgaagttggccaaggaaatttgaagcttactttttcgaaagatcaaaacaaacttactaactatgttaacatcagaagctcggtatgtaatgaatggaagaggattaagctaatttttactttatcaatttgtagctaatgatttgttcattttgaaggttgaggagacagtgaagcaatcttatggatattacaccgggtatgatgggagcaaggataaagctccccaggtatacaatttgatagctttattgaacttatttgtgtttaattttattcttattgtgttcatgaattctaaagtgtgatcttatcatttcttcttagaatgccggggcatatatctttcgtccaaatgggacatttctcataaaaccagaacaggtattcaaagaatctcaattatatatagaatgaaattcttaacaagttccaataatttatttgctctatgcatgttcaaggcctcttcaaccgtagttcgtgggccaataatagatgaagtgcaccagaagatcaattcatggatatatcaggtgcttttttcgtttgttgcagagaatcttctctagtgttattgtttttcatctcaatgtgtgatatttcattataagtaggatttgtcctatatcagctaatataataaaaataccaattgtcggttcaaaaacaccatatttttttatttatttcaaaaaactca

SEQ ID NO: 16234 - DNA, 6717 bp, Cannabis sativa
gggcataaaacctaacagttataatattacaaatttaacttttgagtttagtaaatttcaaatacgggcgttacaggtttacaatcattaattttctattgatttaatctcgtaagaactctcccagttcgattgcttattttatcaatcttccagaagcatctggttttgataaaacgggttttgatatccagggtcaatccctaacatattcccacaagggttttgatattcaagggttttgatcctggtttcagttgtttgtcctaactgccactggttgacaactggctcttctgtgtcgcatctctatacaacaacaatcgagagccagtatttaattactttgcaatacttttacataattgcttgaccggcctaattgcccctcgtccttttaatgctgggcgacctcctatagtatccatctttcagggcgtcatcgttatttctttgcaatatgttatcctcctgagataaccagtgtatcctttccttctataggagaaggttatggttcctggtcgcttgggttactgggtagatcgggctggtcacggacattatcttgcccctttacatattgctggaagtgtcctcgcgcaatgaggccttctatctcatctttcaactgacgacattctttcattgtatgcctaatatctccatcgtattcacatcgtctggttgggtctcttttacgtcttgcgtgtttcatgggctttggtttattgaaaatgaccttctgttcatacgcgaggtagatactctccggagtttcattaagctcggtatagacagtataaatgggtacgtatttgtcgtgtttcttttgtttcttatctttggatgacctcttagagtcgtctttcctctttgacccagaagcttccgactcgaattcttccacagaatcacatcctgattgttttcctagctccccgactcgatgcctccggaacttattctccaactcgtctattcgcaaatggatcaaatccacttgccttgcaccaagttgttggcaaagattagattttttcttgttcaagcattctcataggtcggattggacatgacagcttacggttgtcgttccacccatagaccgtattcttccttcttgatcattgttacaacgagtattctctcctcctcacattgattgagtataggttatcgtgtgcctcgtggtaatactcgcctcatcacgcctcgctcttctctcttaggtatcattcgtctcgttccccctattgagatttgtgcgagctcctttcctataagtatggaaagaacgttggtaatctcttaacgatgacccatgtaccccaggtcgtgtccctagatttcccttatttctacaatgaatttttggttccttggttcctggttgatcatttggcatctcgtcatcaaggtatcccccaatttcccaaggttgtctttcctgagcattctggggattcctttgggctgactcctgccccctcattcgcgagtctcgaggtttgcctcgcggttctctctctccaggttcaggtttattttgggagctattcccttatgtcgccctggctgcagctgcctcacgctctaattcagcattacaccggtttgcctcttccaatcgacgcttgagatggagattttctaattcaacgatttgtatatactttgtcgaatcacaggtgccatcctcatcaactagattgggaagagacctgccattgttcattctaggcccttcaagtctggttctcagattctaggttttctcagagcttgtggtccgttcaaatgataagtcgaaagatccttggggactcattggctcttttccaggacaataagtggtttcttggtgaggattattttcttctttatcagccataaagaggattattattttttatgtaaggatttttttgcttttttcacgaaggatctcaatgaaagcaccgaactgttaacgcagatttttgttaactggatatgagccttaacgatgataagtttgcatagaaaaaaaaatagtaaagaaaaaattatgaacacaaaggtttttaacgtggttttccagttaaaattctacatagtccacgagtcaatcttattagatttgtaataccattctagggcttttttctcttatgatttttgtgtccctttttcagtctaacttgcctctatttataattacatagtcacgcagttaatttcagagttgactgatatctttacaacaataatcccctaaaatcgtggggtttgattacatatcccgtaaaataaatacggttaatatttgaatatcacatagctgtgattagtctgtttttaatgggttaaagtaaacgtgtattgaacatgttataaatcataatattcttgaatgccttggtaggaactcagtatcaataaccttgatagcgagctggagcttttcccatatctttccgaggttgataatactaatctcgtcgcttcttctctgaagacattacgctccatctgacaatcgcagttcttggtgatgaagtgaacttcaacagccaatatgatttgaatgttagcttttatctgagaaaactgtctcgacggagctgtgaatctcattgaaagatgcgtggagttgactagtgaaggtaccgcgagcatgacttcctatggcgagatggatgcctcgctatcacttgcttttgtttacgctgagcgccatcacagtcattatatctcatccacataacaaggttagtgcctggtcttgtacatctgaagttacatggtttctccttgatgcacaaggtaacagtttgtatatctttgtctcgcataagactattcagtcaaccgagttgtaaatatactttgtcaattatgcttttaacaagttattccacctcaaatgtaattataattacgtgcctgggttcgtatttttcccagcttgacatgtgtcttcctctgatgtgttagccgaatttcgagtaaaacacattctaaaatagaattcccaaatccagaagtttaaagtcacgtagaatatttggaaattttttattaacctatgaatgggtaatttagatcattttaagccaaagtggtaagaaattagagaatcaaaagacctgtgcgtatgtaagtcagagttaaaatccctaatatcttctactattggatcggtcaagaacagttcaagaacacaaaattttatagcaaaaaatttagaaaatcatgcatgtattcaaaagaaatttcataaaagagaagaaaagataacttactcactatttgcagctttccgaatgttctctttcagcaatggagagtccaagaagatttcttcgaaaatttgagaatgaaaagagaaaagtttcttgttgtggttttttgaaaaataaaatggctaaaagagtttcactgaagcttaaatccccttttctaagcatatagagggataactaatcgattcgaaattcaaatttttgggtttttctcctaaaagggaaagttagtacttattacaaacgtcacgcatgcagtgtcatacaaccgtcaatgcgtgatttgaggtacaactttagagataatattaaatgtctcgacatcaaaaagaagttcgattagtcacgtcagatcaaagataagaattggacatgcgtcacccattcgatcagctttgtggccgagtaagtccacttgcaaccaagaagatcccgagcggacttgtgggggcaaatgttatccaaatttctacagggtgacgtggcatccatctaggtgaaatgtagaacacattccataacatggatgagaaattctactcttgataagttgtacagggagatttgatacttgaagtcataaatagaagttgggatgtctggacaaagcatgtaaagacacccgactagcttccatcaagcaggtagttcgcatgcaccgaccaggggatgcaagttagacatttttagagatatatcatataaatcattatgcttgaaagacatggcactgtccctaaatttataggatagatttgtagtattgaagaagaaaaaaaacctgcctaagtttcctattctgccaaatgtaattataaaaagtagataggttttccattttattctttattgattttaggaaaccaatctaatgtaaataatggacttatctcacttttcagggataggaaattcactcagagagaacacacgagagaaatctagattcaagagtaaaatactcgaagatcattgtaagagctttcgagagagatcaaggcatttttgttcatcttctcacaagtcattacaactaaatgggagtacgctattatcatcaataggggttgaacctctatgaatctggtattttattactatatattttctatattcgttattttaattatccttaaatcgctttaatttgactcactgttgttgtctaaaagcgaggtcaacaatttctattaaagcaagttactaacttgttactgtaagtctttacagttacgattttataatttattgtagaagaaagaaattattttttgtaaaatactgaattttaatttttaacagcgtgtcttccaaagtctttctaaatcaatagaatgcatcatcatattaaaaaaattagattatactgaaaataaaaagggaacaacgacgtctctatttagagtatctctaatgaagtgctaaaatagtagtgtagtgttatattttagtatttttaagataatcaactcttgaatttgtgctaaatcttatattaaatttgacctttgttaaaaattgtactaaattttgcacaagatataatattatgtcaaatttaacatataataaatacaacttttttaattacagttttgttgctttaatatttatttttcaattataatattggaaaattatagcaaataatcccaaaccataggactatattagtatatgtcctcatttaaaaaaattatagcaaatggccctaaatcataggactatgttagtaaatgtcttcatttcaaaacttgtagagaaatggtccttttaactagtaaaaattacaccaaatatgggattctaccaaaaaatttgataaatatggctttttaattttaccacccttatatggcatttatttaaatttgaagtaatatatggtatttcctttgccacctttttgtaaaaataatattcaaagcccatattataagtttgtgcattcaacccatttataaagggtaaaattggaattttaaagcagttttagtgaaccgtttatttgtgattttttttaaaaacataaggcttgtctttttatcttctgcatgtaatgagtgccctattactctgccattttaattttcttcttagttgatattaggtccagttccctttcatctcattttagagttttcaatctctctcttttttctttgtttccctttcatccctttcatcccattatgctcatattatatttttaatcttacctatgttgtttttttttccttcttctattttttctggccatcatatttgcttctaggttgccggcaacccatttctttttgggtggtattgtggtttgagtttattcaaggtgagtgtatattcatcatgctcatataatattttaatcttaccctctgttttttgttttttttattccttctgatttcggcaacccatttcatttttgtgtagtgttgggattttcagtttcttcaaagtgattgtatatatttcattgttctgtgtttttttaatagatatagtgtatagttgttgtgttagttctttgttgatttttttgaatataaattgtttttgtgttggttatattgtggttttctttttttatttttgtttttggcattctcatccctcttatagatttcattatattgagatattattttgttgttgtgcttttatttgtttgtcaaatatttgtatttatttatcttttcatcaagttttggtgtgacctcttggctcctagttttttttttagcgtcctttgtctgacatttatagttttggtgcacttagctttttctttcattcttttatcattatattattgttggaataaaatgaatctcgcttgtttttgttttgttgtggattctctctccccaccataactagttaaatacaatataaactgatggtgttatttaactcttggtcaaaaatacacgcctgatatggtttatggattttaaaaaattcaaattgactgaaatcaatccctctaaagacgtttcaatgaatttttcgttatatttgtttttgacattccatccctcttatgtgtttcattgttctgaggtattgtttttgttgttgtgcttctatttgttttgttattctcaatttaaaagcaagcattttttttgtactaattctaaagcattttctatttgttttgtgatatctcagtttgaccgagtcaaaaagagcataagagcatatatatatatattatatatataaaaaaaaaaccaaatagtcaggaccttttttctctcactcacatgtcctcttcttcactcaatctctttttctctctctttaaactcaaacacaaaacaagaaaaccgacaaaccacactcacaaccacactccggccaccgcccggccccacgcaccgaacaaatcggaagcccaagtgtcggcgacctcaccccccaagcg

SEQ ID NO: 16235 - DNA, 5561 bp, Cannabis sativa
gaccattttaagttggaattgtcgggggcttgggaacctacggaatttacaattccttaaggatttggtaatccaaaagagacccaaaatagtctttttatgtgaaacactttgtggcaaagaggttgtggaacgggccaaatttagtttgggcttcgatagtgctattattgttgaagcccaaggtcatagtggaggaatagcactgttgtggaaaaacaaagaggaggtgcagcttattgatttttccagcaaacatatcaatgttaaagtgtgtattgatgggtagccggtttggcgattggtgggtatgtacggtgaaccaaacacaagtctaagacacaacacatggagacttatcaaacatcaagctcaagatactcggtggccatgggcgattattggagacttgaacaacgttaccagccaggatgataagcatgggggaagaccgtacccgataagcttaatccaaggtttcaaccagatactttttgagtgtgaattgactgatatggagttggttggacacccttatgcctgggaaaaatcccgtggaacttcaagatgggtggaggttaggcttgacagagctttagtgtcgaaacaatggttggaagtttttaattcttcaaagctttttaatttgaatttttcatcttcggatcattgccctatttatctagagtcgattattgttaagaatgtgtatggtccgaaaaaattcaaatttgagaacgcttggttacgtgagcctttatgtcttcaagttgtcaaagatgtgtgggagagggaaccgcggttggatgatcaaaataaaatcaagatgtgtggtgatgccctgagtatctatggcaaggattacattggcgatttcaatacaaggataaaagaggctaagttgactttgaagcaacttaaaggaagacgtgatgaggagtcggtcaagcaatatgacgaggctgaaaagagcttgtttgagattcttacccaacgagaggtgttttagaagcaacgatcgaaacaactttggttaaaagagggtgaccaaaacagtaagtactttcatgcatttgctagctctcggaaacgtcagaatctaattcaaaagtttcatgatgagaatggtgtttagttcgagtgggatagtggactgggggatttgattgcaaattattattctcagttgtttgctacttcccattcaatgggcgatgaggtacatcaatgtattgatccttgtatttctcctaaaactaatgattggcttatgaaagagatttcagatgaggaggtgcgtagtgctgtgtttcagatgcatcctgataaagcaccagggcccgatggaatgacgcctggtttttaccagaagtattggaaagtggttggtagtgatgtgattaagctggttcgatcctattttggtacgtctactcttcctgagagtttgaatgatactagtctggttttgattcctaagaagtcaaatccagtttgtttggctgatttgagaccgatttcttttatgcaatgtggtgtataaagtgatctcataagttatggcaaatagattgaaaagtattatgagctcaattgtgtctgatactcaaagcgcttttgtccctggaagacttatcacagataacattatggtgtcttatgaaataatgcattatctaaaaagaaagacgatgggaaaagtgggtcagatggctgtgaagctcgatatgtccaaagcctatgatagggtgaatgggggtcccttgaagccatgctatacaggatgggcttccatagtcactggatatctttggtaatggaatcggttctctcggtgaagtattggattcaatcacgtggacatacgttgggacctattgttccaactcggggtatcaatcagggggatcctctctctccctatctatttattctgtgtgcggaaggcttgtctgcgttgatccgaaaatttgaaagtagaggctggattagagggtgccgtgttgctaggggagctccttctatctcttacatgttctttgccgatgatagttatctctattgtcgtgctcaagagaaggatcttctaaactgttttgaaagagcatcgggtcaaaaggtgaatttattaaagtcttccattttctttagccaaaacacagaggctttggtgaaaaataacatatgtacaatactcggtatacctgaagctagtgagcagagcacgtacttgggtttgccaaacaccatgagcagaaacaagaactccatcctcggctttttaaaggataagatgcagaagagaatcgagggttgggataacaaactcctttctcgtgctggaaaagagattctcatcaagttggttgttcaatctctcccaaattatgcaatgaatgttttcttgttaaccaaaggaatgtgtcaagaaatggagcagttaatgtgtaaattctggtggcgtacttcaaataaaaaggctaactgtatacattggatgagttaggaccgtttgtacattccaaaggatcgggggggccttggttttcgaaatctcagggattttaatattgccttactgggtaaacaatgttggaagttgctggtttgtcctcaatcgttggcaggctgactgtttaaggcaaggtacaatcctacggggtcgtttttggaagctgaacttggtcctaacccaagttttatctggcgtagtttattaggagaaaagcacctggttaaatcgggttgtcgagttgcaataggacctggtgtggaagtaagcattctgaaagatttgtggcttcaggacagctctaatccctatataactacggtgagtcaagctattgttgataaaaatgttgattcactaatggttttgggagataggaagtgggacgaagaacttgtaagggatgttttcaacataagagatgctgagataattttgagtattcctttgtttaattcggttggtgtggataaatggtattggggctttgataagtcgcgggagtaatctgttagttcagcttataaatttcagcaagatcagaaaaatgaaagtgttgttgatgttgatacacggttttgacagaggttttggaagattaaagtgccaccataagcacttaatcttgtttggagagcattgaccaactgtttaccaacaaaagtgcaactcatttctaaacatgtgagtgtgcaaaggacctgtcctagatgtttgaatgcagttgaaactgcttctcatgcactgtggtcgtgttctctggcgcactgttgctgatttgtcgacgggaactgctgcagatcaaacttttggcagctggtttgtagcagcagctggtcgatggaatgaggatgatcagaggttggttatcatgctctgctgggctatttggcatgcccgaaatgaccaagtttggaaaggtatttctaggccttctcgttatattttggcattagctagatgtaatcttaatcaatggagttatgctcaagacaaaacttttgttccctctcaattcaatttgaaaccgaatgagggggctgagctatggactaaaccagtaggaaatacaattaagatcaatgttgatgccgctattttcgagagtcaaaatcgctatggttatggttgggttgctaggaataatgaaggaagattgctttgggcgaaaactagcagccagcgtgggaaggtttctgctgaacttgcaaaggcagtgagtttgaaagaggtgttgagttggttgaaggataatgaactctccaatgtggttgttgagtctgatagcttggtaactatacaagcaattagaagttcaatttcccttcattcaacatttggattttgtgttacagaatgccaatctttgttttcaaacttaagtgatgttaatttatgttttataaaacgatctgtgaatcatgtagctcactatcttgctagagtttccgtttcttatgctgattgtatgtacaaagagtctaatgcccctgctacattgatggatgtaattcgtttggatatctaataaagtatgcatcttttattaaaaaaaaaaaacattgatactactatgatgtgggaatattttactaatatttaaagtatttctattgacactttcatgggaccatttttagattaatttactttcatgggaccattttaaagtttgtgtcaatgttgaattttttgagttttgtcttttacatattagactatttctattttcttctttcctaatttgccaaaaaaatgccaagcaaaaatacatatattttataaatataattattgtaagaaactcaatttctatataaacaaaaccaaaaagccataattgggtaattaaaactgaatcataaaagtgggaggttttgatttatgaccattcccaattttaggtttttttaacaaacaatctttttatattaatggttgtatactattacccaaaaatggttaataaaccccaaatcaaaatcactctccgaccctacattaaatcccctcaaaataaaaaaataaaaaaaaattaaaaaaattccctacattatttctctattccaccttctttttctcaaaccttttatccaacacacaccacttacttcttattataatctagatttttatggaattatagtttgaaagattaacttgttttgagatatgaaaatgaaagaaacaacaagtaatgcaaccaaggccattattgccttggcttggcttgttgtgtttgaaggtttcttggttgaagttaatggcaatttcaattacaaagatgccctaaccaagtcgattattttcctcgaagctcaacgttcgggaaaacttcccagtaataatagggttccgtggagaggagattctggacttaatgatggaaaactcgctaatgtatgtaaactaaataacatttgagtgttttgtaagacaactataaatatatactgtgcgactatatcatggtgagtttgacaaatttgaccaatatttgtgtggataatttgtgtaggttgatcttgttggaggatattatgatgcaggagacaatgtcaagtatggacttccaatggcatttacaataacaacactttcatgggctgctttggcttacaacaaagagcttaaagcttcgggcgagttggaaaatgttcataatgctattcgttggggcactgattattttctcaaagcaagttcccgacgcaatcgcttgtatgttcaggtaataaaattacataattcaaacctaatttatcattatcacatgttatattcttctacatttaaatttaaaatcaatattatttagttctttaattatatttatttccaatagtgtcaatgattacgtatcaatatttctttgattaaaaaatataaatcaatatttggaatcacaattttgaatttttttttattttcatggtttttaaaatataaatttacaaaaatatgacttttttctcaaaaaatttattttatggaaaattttcagaaaaaatatataaaaaaatagtacctagttatcttcttataatag

SEQ ID NO: 16236 - DNA, 10217 bp, Cannabis sativa
  modified_base (9193)..(9193): a, c, t, g, unknown or other
gggcataaaacccaacagtttgcatagtttgtttgataattacaaaagaccaaagtgcccttgaatctaaatattattcagccattctgttgggcttttagggcccaatttgcagccaatgacttgttgttcatgtgtaaaagtgcacagggaaccctacagagcacctcttggttgtccatgcctttgtggaggccaggctagccaaccatagggccggccaactcctgagagggagctggtttgtcacttgatgcctgtttcagtgttggggtctccatttgttcaggttctgacttggccttcctattggtgagctgtactgccacgtggcactgattttatccatgtaagcatgccacgttgtttaccgagttttttaaaaactaaatattttgagagcttaaagaagataaatgataatagataataaatagatagatttttaagtggttcgcacattaataatccttagtccacaagtccatattattagcctctttgggcagatattatagagattacaaggtattatagtagagactactctgcttctctgtgtgagagagcttgcttggaatttttgcagagtgactataagtaaaaaatagttctcctccttacctgaagaaaactgagactatttataggcaaacatggggtaaaggggatacccttgacctacctaggatttcgtaccccatacatttttaaggtctatagcacgagaggacaatttgaccattggctggtaggaaccttcttcatcatgcggtgcacaacaaatggtgaggactttcgtatgaccctggacacatgctgcgcaaaggtctcttctttgcaaaatacactctactaaagatgttaggcaacaagcatgctcaagggtgcatctgcgcactaccatggtctggcacaggggacaagatctaatcctgtgtcagaaaaaggtggaaccatctgtggagtgatattttgtaagatgctgatgtggccaacgtctccaaacctttaccgctttgcaggttcctcatcgaaggaagttactcctgaaggaatttgcctctcgttgccttctaggttcgggagtgattcgttttcttggttgctttgaataactcgggttacgaccatatccttccctcttcttgtgccacgtctttgactaacgaaaacttggataacatttacccccaagcttttcgagattctttggatcacaaaagcttgttattgccactggtattaaccgttgatacgtgttgcaaatttaagtcatggaccctcctacatgagctgtattctactgacggtaaatacgacatttgcatcctcttgcgttgtaaccatgcgacatatcaggaagtattccttgcccttttctgtgtgtggcaaggtctgcctagcaaaaaaggtagagtgcaaatgacggttgagtgactgcagaaagggacctcgacactttggtgggccccaagccaatcgtacgggacttctcatctccctagtcgttggttctattgcgatcattttgaaccgctgatctttcatagccctgtcttccttttgaaatgtaaactgcctttggtggtgtcattttaactctttttattcaaaactccataacttctctacaacttcttttttccttttcctaccatttttgcatgcaagaagtgttagaaaatctgatccagcaattactcgtcatccgcatggaactcttcttacacgccgcttcccttcgactgaaccaacgaagttcttccttcgaggaacatttgattttcaggttaactatgactgctgtattgactggctctagagctttcaggcaggttttttggacacacaatttacctcttctgattcgacaagtaagtatactaaccccctgtctgaatttgggcatttcacgtttagggcaagaaggttcttgcttagattaggactagaactattcacatgccataaagcagaatagtttgggtaaaagagagcccgtcttcatacccgtttgttgtcttaaaggattctccttttccttcataaccatggatttgaacaaaaaacccctctcaggcagagacgtatctgtcaaagttgaacctacttcgtctgtcgaaaggtcttctatgggataggaccaaattgtggcccccatcggacaatctaagctttaaagggccttggaaaacattccaaaaaataagcttatcgccgagagagacgtctcaactgataccaggagatgcaaaggggctgaaagtccttcgccgatgtaggttcgtcctgagtccatataggaaatggattagaaaagacaactactttcgatcttatgggatgctgcaagcgtatactgaggtttccagcctccataatgtccctagactgatgtggaacatgcttttcgtcgtgggagaatctgtgtccattagtgataatgggtttagtgcatggagttggtcccatatttctagtggcgctcaccttcccttgagaacctacttcgcaaacctgattgcaaaaattgggattgcacctttccaattgattccttcatcatatagcctcttggctgggtggtacgtgttctacaaaatcaacaaactggaagttccttcctcggaggaaatcccttacttctatagtgtcaaggccaatcctatgaggatagataggtccaagctggggttcttccgactggataaatgcctggactcctattgcttatttgctgaatggatcgcacccatgacctccgggagtattgtctcttttcctctagatttcctaccagcaggatgccatctctttagttgagtttccaactctcaggtattctaacaatttaccttgagtttcgttagtttttaagctttgccaatttctgtgcttggactaacatttttcgacttgcagcagtgcttctatctcaaagtgttaggacagaggagataatcaagaaagaagctcgatatagggtcttctcggaagatcaattaaaggttaaagacctggtgataactgaacttcttcgtctgacttgatcacaaaatttcagagtattgacacagttagcatctgcaggtagcgccaacctcccaaggaagtgaaagaggcaatttccacaattttggccgttataatcacaaatgcggccaaaaatgatagtgccttgaactttgatttggtgtcacgccatcccgatcctctgcttgaggaagaagaaatctcagtgagatttgccactgcttaccctgatgtggggacacccagtgccagcactttgggaagaggtaatgccaatgttcaaataccataagtttcccaacaacatacggacaacactcaaaaaacaatatttgtaaggcaagaggaaaacctaacaacctataatacccacaatccatttcctacatcataaccttcctaatacttgcatctatcttacccgtcaacgattcaaccgccatcttaaaacactctttaccccacctatactcattgtagcgaccactgtccacaagatcaagctcctcaatcaagataaccttaccagaaggatcaccaatcaagtaacactgaacaaaatacaaaatagcccacttgactacaagatcatcatttccctttaaattattagccgtaaatacaacttggacaaaaatcttggttatttttttattcacctttaaacaatgtttaacaagcatatttttatcctctttatactggaaaatatcaaaatccaaatggcaatctagacccataactaacacaaactcctcgacactgaatctaagtaattttcctgccatagaaataaaagtcatagcaggtagacctaggaggggtccctagccttgcacccaggttgacatcgagaactttggaatggaagtttgaacataaataacttgaatcccactcactatttttagtattttgtaccataaagataaggagcaacctattctaatccctaggagctcaaattacatgaacctgcagcgtagaagaaaacctgggaacctagggtttcacaagtgcccaagttgagaaccttaactaaggcttcagttttttggactgtcttagtgcaaatgagtcaaaacatgcatttggacatcaactcgacataccataggcatatttgaggcatcaaaattagaatcagaatatgttcattttttagcacccgggcccccgattacctaatgctcaggttgaaaatgtgttaatctgggcgccttccaagtatcagatcagagatctgactttggcatcttgttcatcttaatataaaatgaggaaatagttccttttgaagaagaaacaaaacttcttcggtgccaaaaatagggcccagtgcctaggttaacacttgagccctgcgcccaggttgacattttgtaaactagtgcaattttaaatggagattttcaagaatttttttcgagcatcttctctgttttccaaaaatattgagatgcaactatttcctaggaccaaacaaaatatttgaagggctagaattaggacccaactcctaggttgacacctggggctaggcccaacacccagattgatatattgtcaaactgtgtcatttttgatcaagttcactaaaaagtgttcctgaaattttttccatcatcaaaaataatgaatactcaagcaaacttggggagaaaactataaactcgagcccctagaaatagggcccatcgcccaggttaatctagtgataggctagtgcccaagttgacaattaacttgggacgctaccttcaattgctcaaatgccaaatctgatgcgaccattggaagtaacaaaaataagatcccacaagctcgggagtaagtacccaacttccatgttggcaaaagccccagtgcgcttggttctgcttatacaattttgatgtcgttttgaccatcaatcttttatttcacaataacaatgatccatgaagtttggataagtcaaattcacaacttttcatttctcatattcggctcactaggaaatgaatagtttcgagtctctcatttccgtagaacagtaacatctctgggaactggtgaccagctttgccagaacacaaaaattgacaaagtgatgtcaaaatatcacttagaaaccttaaggtacaatccttggatgtttcaacactaaccaagtgtcctggttgacgtcatttgtcaacttgggcgttgggtcatgaactgctttcagtaaaacaaccataagatactccattttgatctgatcaactttcattttgaagctaatttagtgctatatcaagtcatgtcttacacttcaatcataatataaagctatcgttgtcaaaatttacccccaatggagttatgaaaataagcttcgagttacccacatcgggacagattaagctccaaaaaatagccatcactacaaagagctaattttcacaataagatcatcatcaacggtcaaaagcatcttatttgaatttttctctatttttgtgggcgtccttcacctataaaaggatatctcccttagctcatttttcacattcagaaaattacccacaagatcaaagcttctctctctagaaacttgagcttaaacacttagcctttttctataattcttatgggaaatgaaaaatcgaagtagacatagctgatgttggatactttttagcgtcaatattttggtgctttcatttagagacacaatttgagttccccatctacagttcaactttttttgctcggagctttgttccaaaaggaattcataagttcaagcaagcaatacatgatgaacatgcaaagaaacactaccactcctattagccacaccactactcaataagaagtaggcactgcgatttcccatataaagtacaatacgagcgagcatccaaaatgactaaaactcaaatatatggatgtatgggacctttgcctgatacggtgcaatcaattgttagggaaaaaagctatgagcgagcatccaaaaggactcaaactcgagattgtaggcctacaggttcaccacatgcagctgataggaccaaccataattatttgaagaaattcaaataatgcgagaaaccaatctcctcctagggatattcctcacaagtcgggatggaaattagggccattttcgtgggccaggtccggcccttggcccgacggggtgactttggcccaaattatttgggcttttatcgggctcctagcccggcccagtatatattatttcgggtccgacctgacccgacccgatttcagatcttaaaaaaaaaaccctaaattcctaaattaattttactcttccaccattccctttttcttcttcatcccaactggcccgaattttgtttaaacccattgtcaatatcatatgctcaagcctcaaaaacgacaacacgagtctttcgcttcttcaaaatagcattaaaggccttcttccacatctcactacccgtgaaactggtctagttatggagatatcaataacttgttgattgggacgagaggaacttatatgaagtacaaggtttgttatattcattgtgagctataaaggaatcgaaagactataacaattgcgatttcactcttatgtgtcatttgtgtaggatttatagcaagttttggtttgaggaaaaggggtgacttggatagtcagttgcttagatactaatgtgttgttggcaaagactttggcgagcgaatgatttattcacttgggtgatttgattgatcacttatggtacacgactttgttgcctgattcggggtgagtttctttctcttttgtattacgcctttgcttttatagtttctaacattgcccgtgttccatatggtacaacacttgatatcgaatctttttcgtattgaaatgatttgtttacatacttcttgattgaatagtaatggggttttcaggccaattttttttcattacacaactgtcagtatcctaaaatacacatcaagacaatagccttttaattatcatagatttatgctgatcattctagaaaaactaggatccccgcctaaccctacagagtactagctctcggagaaaaactacgtctctaaaacttttatgttcctatttcaataaaatcatactctgattctctatcatcttgtttactactttatttgtgctactctggtgtattagatatttcatttcatgctttataattttgatgcactacactaaatttggtttctctctacatcataattttttgtatacttctaaggatgagaattttgagttgaaagcatcgactttggtttatcagattttgtgaaaatcaggtttgtttccaaccttttgtcacaactatgaagtcttggatcaacttgtgacacttttaattgttgacagatgaaaagctaaatgataatgttggaagtgtattcttcttaattaggtgtgagcacaaacaagtaatctggtgtgatcccatcagagattggtaacttgtcaaatttagagtactttaaactttatgagaattctttctatggagaaatactacccaaaatagacttttgtaagaagcttatttttcttgaactaaacacaaataacttaagtggatccattccttcagagcatggtgagttagttcatctagagaaattacagctgtaacaatttttatttgtctaagttagaaaatcaaaaaagtaaaaatccattcagggacgacctctatgccttgggaactaaatgtgactttatgtttaaatggtaatttaacttgaatttatgtttcaagttgtatatgtaccgatgtagtttgattacttaaagttaattattgtatattgaaatgtgtttatattttataggttttgatgttttgcaagtgtttgaaaagaatttgagtcaagtgggaatttcaatctcgattcatcggaggtatatatattttttgtaattcctttattatattacatataattcatagaagagttttaatatcttatatattgattcatagcaaagtaggttctgcgaaatttgtgtgctgcggtgatataaggatgaaaattggtgtgttatctaattatttatagttgaaattgagagatggttaggttaataaaagaggaaaaatgttgtccgatttttcgtagatatgtttatcatatttttaaagcaattgcaaggattatgatagatatgagaatatggtgttaatgtaggttaaaatagaatgtctaatcaagtcgattataattttgaggatgatgttgattttgtgccatcaactccaaatgaagtacaatctgttagtagtacagtagatgaaactcagactacagggacacagagaaaaagaacctctcgtgcatgggatcatttcacacaacaaaatattgatggaaaaattaaagcagtttgcaagtattgcgagcgtaagctggtgggagaacgttctaaagggaccatacatttaaattctcacgtagagaggtgtctggtaagaaaggcccaacttgccgctaatcccagtgcaactgcaagcccttcagttacttttaattttgatcctaatttacgaaggatcaagttggctcaaatgattgtaaagcacaaatatcccttgtctacggttgagcatagcgggtttatagaatattcaagcactttatgtcccatatttaaaatggtgtcaaggaatacggttaggtctgacattatgaaaatgtataaacctgagaaagaaaagtgcaggaaaaatttggaaaaaagtaggagaaaaatagccataaccagtgacatgtggactgcaaatcatcagaagaggggatatatggctgtaacagctcattttattaatgattcttaaaaattatatagtcagatattaagttttaagtatgttccgtggcctcacgatgctctagcactacttgaggccctaagatcttgtcttaatgaatggaaaatagaagacaagatcagtatagttactctcaataactgtacttcaaatgacgctatgattgagcttttgaaaggacaatttgagctaggtagttttattttgaagggaaagttgctacatgtgcgttgttgtgcacatattttaaatctaattgtcaaagatggcttatctctcattggtgatagtgttgataaaantcgagacagtgtttcttattggtcagacacaccaaaaagacatgaaaaatttgacgacactgctcgttaacttagagtaccttacaccaaaaaaatatcacttgattgtgtaacgaggtggaattcaacttttctgatgcttagaacagctttatcatacaagatagtatttaaacgtgtaaggctatgtgagttgcgtttgaggtgtgccccttcgaaagttgattggcaaaatgctcaacaattgtgtgataagttagagttgtttcttgaagtaacagaattattttttggagcaaagtaccctaccgccaatatttttttcccaaaaatatgtgaaattaagacaaacattgaataatggatgtcatcagatgtgccttttattaaggacatggcaactcaaatgatgtccaagttccagaaatattgcggaaagattcacgggcttatatgtgtggcggttgttttagatctgaggtacaagttcatatttctcgaatattattttcttgtaatctaagaagatgagtaatatgtaactgaaattgcaaaggtttgtgagctttgttgtgagctactggaggagtacgggtctaagtttcctcatttgagagaaagaagggttcacgaagaaaatgtatcaacattgtcttcaatacggtgattggatgccctttctaactttgagagatttgttaaagcttccaatcgagtagagaatatgaagtccgaactagatttatatttagaggagaactgggtaactaggactgaagagttatttgatatatgcaactattggaaggtgaagggcctcaaatacttattgttgagtatgattgctaaggatgtatatgttgtgcctgttagaactgttgcttcggaatctacattaagcagtcgtggtaggcacatgagtctacatcgatcaagacttcatccttctacattagaagcattagtatgtacacaaaattggttgaagactgacaaaaaaggtagatatcatttaacaattgta

SEQ ID NO: 16237 - DNA, 4649 bp, Cannabis sativa
cccgatttctatcctatcccagcccaactatgtagtaacccaactcagcccaagcccaaatattaggcccgcaattccgaaccattttatttatttttaattattttctgtgacaagtttccttcgattttactctgctcaatccttcgttctcaactaacgactgatcgcaactcacaacaaatacaacggtttaattttgctgatattcaatcattccattttctccggcttcaccccactttacaacgacgtcgttttggattttcccctcattggttactgatggaagcttgctcaatttgattcatttctatttaactcacacttgttccagatccgaatccctctcattcaatggattcatggttcaaagctgcagaaggtgtgctttctttttcttatttattttttatgtcggtttaattgtgtttttcgggtttgatccgagctttggttgggactattgtagtgaatttgagaatcataattttttaagtagagctctgttcaattgtttatgctgtatagaatgttgctgtagaggagtggattttgaatgcttgattgggttttaatggcgggtttttgtgtgctctgaagggatttactgtgttttgcaaatttgcattgtttggtttgttagttagctatgaattcattttgcaattgcaaattcggttggatttgtgaataggtgagaaatatacatttatgaaaggcttcagaattcaggtctattaatatctttgtttttggtggtgcaattgggttggtaaaagtatagttcaatgctggataaggagttttcttcattgctgtgacactgatatcattagcttggaacaaatactcacgttgtagttttaacttttactcatatgtacatttctcgcacttataatcccaagtagttgaaaaggcgaagcttattttgttggtttttttggtgaaggttttcttgaagttgtagatagaagggcaaagcttgttgtcagtgaattggcagaagatcagcctgattcccagatttcaggtatttccttctttagttatttagtttcttggcatttctctgggtgggtatcagggagggaaaattctaatgatagttgactaaccttttctttttctttttaactaacctaaatgaaatatttttggctaatacctgaaactttgaaagtaatattaatgtgaaatacgttaccttgatatttggttgggaatatgacaaatgcaaggatttcatagtaacaattaaaattgcatgtcatgaatggatgaactgaactgaactggacagcctgcaagaactagatgcccatcaaatatgggagagtcataatttataatgctgctctaaggttctttgggagagggtatctgttgctcacttttgtttcttctttgtatgatttagcttctaatgggcaaggatcccaagccaagcaaacaaagtcagcggccagggtattttccactttagccatgtcagctttacttatttggatatggataaacatcaaaattatactattttattcacttgcccattttaacttacagtctcaaaatttgatgatttcagaccaaaactactgatattgctccagagcagactgatagtattacatcacaagtagcagtaactcctgaaaaagataaagacccaaatttgattaagaatgatgagacctcttctagtaattctatggttcaaacgacccatgggaaccaagatgattttaataatagctccccattgttggagattcctcatactgacaaaagtgaaaatgatactaacctcatagaagtttcagtaaataatactgatcaggaagatgtcacatcaacctcgaatgtagagcttctcaatgagagtaatttggaagttcgtgaagaaatctctttgcctatgcctgccaaacaaattcaaattgtgaatacacttgatccagtggaaactgatccacggaccaaatcaggagacacagatttttctcaaaagattgatcaagaaaaatctcagtctacaaataatgatgtactaaatgatggtgaaactctatctagagttgctgatctaaagattgaacctcgtagcaatcaaaagaaacaggaggacccaaaggctattgcttctcctaagaaagtacaggaacagcttgatgaggtaagtatcttataacacaggaaatcttctctactcccaactttcttattgtcccaattttttctttatgaacccttcttgctgcaggctcaagggctacttaaaactacaatttccaccggtcaatcaaaagaggcaagattggccagggtaagcttcaatgatctttatagcatagctatatgttatttaaattttcatgtcatttccttgtttgttggaaaacaaaatggatattcatgttctaactagcttttcaaatacaagcatactcaactgtatatcctaggttgaatgtgataaaagctagggggaaattgtctctttggacgagcttacatactggctagacagttttgttttggaggtttatttatctatcagttattcactgttaggtctgtgctggacttcaaaatcgactgcaagaatacaaatctgaaaatgcacaactcgaggaacttcttgttgcagaggtgaatgcttcactccttttctgcatgagttaggtttcctctatttcaataatttgacattttatgcatttacttttttgtcgtcagagagagcttagtaaatcatttgaggcacgcataaagcagctacagcaagacttgtcagaatccaaaattgaagtgacaagagtagagtcaaatatgggtgaagccttggcagcaaagaattcggaaattgaagcacttgtcggttccatggatgcacttaagaaacaaactgctgtgtcggagggaaatcttgcttctctgcaggttcaatacattttcattctatcttgtttttatttctctctctctctctctccatagaacagatagttcagattgttcctgatttctagttttgacaacttgaagttttgataacagcctgatattgttttgccaggcaaatatggaatctattatgagaaatagggagcttactgaaacgagaatgatgcaggtcagtgtgattctttctgtcacatgaaattattttcatttatactcttgcccgtactgcttttattatgagattgtgaaagaaatgggaatgtatatattaggctttacgagaggagctagcttctgtagaacgaagagcggaagaagagcgtgctgcacacaatgcaacaaaactggtttgtatcagacattactattggttttaatttagttttcatttcatttaagttctattgcttaactttttattgaacaggcttttatggaaagggaggtggaattggaacatagagccttagatgcatccactgctcttgcaaggatacaggtaatgtaagaactctttatgtttgtcacttattgtctctttatgtttgccacttattgtcgtgataaataaagaaccagctaaatgtgcctgctacttgtaatgattgcttgtgtactggatttgttacaacagagaacagctgatgagaggactgcgaaggcagctgagcttgagcaaaaagtggctttgcttgaggtagtcaaaatcgctataattcttatatttctttgttttcctttcctagtatcaatgttgtctagtttgtggtaaaatgttgcatgtaattaggttgaatgtgcaaatttgaatcaagagctgcaagatatggaagctcgtgtacggcgcggacaaaagaaattaccagaggaggcaaatcaagcaattcaggtatgtttggtttcgagaaatgaaaatacaaaaataaaaatgagaataggaatagaatcaaataaaatttaatatgcatataaaagtgatcaaaaaattattatctttattattctcatcttatattgaaatggtctttcgttccatttttgaatgaaagtcattctagtaaaatggtgaaaagttgtttaattagatgacgttctaatgctcaatcaaacaaaagaataaaatgaaaattaattcatttccatttcattacccccaaccatacacaccttaaatacttgcaaccttgacaaggcattgggtgttgcttaatgcttattaatgtttccagtcatttggttactttgattgttttatgcatttaacaattaaatatacgttaggaatgaacttaagccattagatttagaacgcatttttcattatagataatagggttatttataaatttagtagcagtaataaattaaaattacttacctgtaaaaaattacacaagattcaggcctggcaagaggaagtagaacgtgctcgccaaggtcagagggatgctgagagcaagctttcttctttggacgtaagaatctccttttttcgtctaatataatgtcctttattatgttcatgattggtggctatacaatattctgtgtaaaaaaattaggctgaagtgcaaaaaatgagagtggaaatggctgcgatgaagagggatgctgagcattattcacgtcaggtattcttattgattatccagattgtcactttctttttttgaatgtgc

SEQ ID NO: 16238 - DNA, 2893 bp, Cannabis sativa
aaaaaaaaaaaaaaaaagcttctctaatatctttgccataaaaatcctaaatcaaatgggcattcatgtcctcaaaaatctaactaggaatcgaattaatgactttatcaaaagcatcatcagttggtttgtctaaggtaaaataattagagaaataatcttcaaagatggctccaattttatcttgacccataacctccagtctcacactattttgaagctttaaaatcttattcttggcctgtctacctgaagcgcacctatggaaataaacaatattcttgtcccctaattgaagccagtcatttttagcacgagaagcacaatctttctcttctttctcttggagaacatcaagctctttttcaattttagagagctcctcacaactgacattatcaagattagcatccacaatctcaaattctttgagctttttatgaatagcaatgcggtgtcacttatgaattttttttattctaatcattcaatttacctcccacctcactcacattaagcttaacattacagataggatctaaatctttgattctccaatatttgcctataatatccacataattttcttcatcaacccaagcatttttatagtggaaataggatcgcaaaacaaggtcactcctacctcttggggcgacagtagaggaaagaataatgggccgatgatctgaccccttaaaagacaaatgagaaacatgagtgttaggaaataaattaagcccatgtaaattttggttcttcaaaacccacatccatcacccgactatcttcaagagcttttcaaaaattattcatcaagtagtaaggccgtctaaaacccccatctttctcaaaattagtcaaaatctcattccaatcacccccacacacccaagggaaagcattattagaagcaattcaacgaagaagattccaaaaatcgatcctcagataagatttaggctgcccataaatcccctaaaatgccaagaaacctcccccactttgtaaacaacacattaacatgaccccgagagaagtcgagcaaaacaaacataagccaccactttctcaataacgagcttaccaacaaaattgaaatgaactctcagtagctccatttgagcagtagtgccaagagtcttagataaaaaagaaatgtcgggattaacctctcaaatattaacgtggagagctcgaaattaacgtcttatcattacctacgccttagacgttccacgccaacacattcataatgaggggtggccctacactgcaggcgacaccaagtcaagagaattcaccccaccattacggttcatctcagcgagtgatctaagagaaccaacgtcaagcttatcggcaaccaccttcgacgaaccatccataacctcatccctaaccaatacagtcagatcctgccccctctagaggttaacttttttattactagcgagtttctttctacagtatagttggtaaaaaaaaatatcattttcaattttctttttaatatatttttatgtaattaattttgagagataaaagaataatttttttttctttttatctttggagacttgcatcaataataaacatagaaatgtattcccaggcaagaaaattgtatataaattgtgtgagttgtcctaaaataatcaataaaactagaatgattattttaaaattaatattatttatgtttgaaaaaaaaatagtatttcaacaaataatttatacctttctaaaatagaaaataattcaaatatttttttaacaatcttacatcaaaattaatattatttatgcttaaaaaaagtatttaaacaaataattttagttgtttcaaaaaaaaaaaaaattatacctttctaaaaaggaaaataattcaattttcttttaacaatcttatacctaaactaagaaacaggttgcgctttgtgtgggacggttaaattattctataaatattattaaacaatataattattatcaaataattttaaacttatttttatgtatattttttttaaagaaaatatatgtttattatttattaaaaaaaataaatctatatagaacactctaaagaattcaaaaaaaaaaaatcatcatacaatttcttatataaattaaaaatcacacattttttttaaaaatatacattgtagtgaagaaaattataaattgaacaattccttacacaaaatagaaatctaaaacaaaaagaagccaataaatctatagaaaactcatcatgtaatttcaaaataactatcattactgtatcgcatttgtagtcaccattgtatttaaagttaatgtcatcgtatctcacttgtaatcatcattaatatcatttctaatagatttgttttgtatttaaaataaattaaacaatgataggtaaatacttacttttattatgtgaggaaaatttttttatagttttgatatattagttaataattttttttaatgaatcatattagttaatattaactatatctctctgaaagaaaaattgtatgtagttttaatacatatttatttattagttattatatataaatatatagttgtttttttttaaaaaaaaataattaattagtgatctctaattaaataaagcagaataaaaaattagaaaaatgagagaattaaagagagaaaagatatttaaaaattttaattttttttaattattaattaattattataaatttaaaacttataaatagatagtttgactttgctttattattagttattatatatgattagataatttatgtttttaaaattatttattactaaggtattataaatatattttaattatatttattttattattattagtaggggtgtgtagaaagtcatccgatccaat

SEQ ID NO: 16239 - DNA, 4778 bp, Cannabis sativa
  modified_base (2372)..(2377): a, c, t, g, unknown or other
aaattgcagacaataaagtccaatgtgtagttatgaatgatgataatgtaaaacatcagcataattagacataaaagttacctgatcaatggcagaaggatgttttccatggtgaaaggtagatacaagtatagctaaagcatgaacatgattcatactgacattaaattgatcctgtaacatccgggctcgttcatcacacatattagatagtgtttccttactcccaaaataatgttttctactgaagtgccaatataggaaaaatgataaggcaaatccaagcaagaaaaaaacgactagaagctttttcctccattttccagcacccctaggaggactatggccttgctgttgctgtttgtgtggctgcttctcttgttgagccagcggtctttcattaaccaatttctgctgttgagacaatggctggtcatgaacaatcttctgctgccaactagctggatgctcagcaaccggtaatgtcttttccctccgtaattttgaagctagtttgtaactcaatataagtccagcaaggaaccaccaatatccgattaacaaatcacaaaaaagctggcactgtttccttgcacaggtagtcaaggctgctgattgtaacacattctagaggccaaaatgaacaaaattagtttcagatcaatatcaagtacagaatctctgaacacaaagaatttagatctttcaacagaggataatgaacacagaaacaatttatagaaacacaagcatgcaagttacaaatggatgatttcatatgaaatagatattttagatgtaatagctgctgtgtggagtgaaaatatttatccaacttccgattaagggaaagtatgtccccataaaaaaaaaaccttaaagctgcaatgaccagagcatttagagtccaaataacaaaaagttatatgcacatgttcattgcattatcttcaatattgttatcatacttaagtgagtatacttgtaaaccttttcaagaataatcatctcccataggctatttgacctctacagacctcggaataatgttcaaatcaacattagaattgaagctaattacagttttagatatgccctcagatgattagaaaccaccagcaaaacaatagtacagtataccacacactctgacacacagaaatcagtatgtacatgtttctcatctttcatatatttagaggggggagtcaggaattgttaacataatcaactagcacaaatagaaacatgcataatatttcaaaactcaaaagcacgaattcggcattacattctagtacgagcagtgtacctttccagaaatctgacgcatagctgaaactataagctgcaaagcatgtgataaagatgtgtcctttagaggcgcagagtacagcttccaagggttgctttcctcttgaagatctaagcattgatttggcgatcctatatattccacatcccatttgtgaggctttagtgattccaattcgtctgagcaaagtaccctcatagaacagacaatgccatcacttgacatgcttttatttaatggttctttggtacactccagtgatgctatctgcaaggaacatagaagttagaatagtaagaggtaaaggaaattgataacatttacaacttttttcatcttgatgcttaatttgctagtaagtgtcctatgaaacagttattaattctcaaaaagatttgccatcaatcatttgacaatgataacagaaatatcacaagatatatagcaatgttcatttttggtctgattagaatctgagatattcttataagatctaacattatctatttatgagcagattttatatgtgaaacaattaagtttctttgtttgcagtaataaacagtaagagttataataaaactttacacaccagatagtttgtcatgaagagtgaccaaagctcgtaggagctctcttaagtcctaaatctaatttatgagaaattaggttcaataaactggaaatttggcattgcatgtagtgctaaagaatcctattcctaatacaaattaattcataacagtaagatggacatattggaaaatttggcagaacagctttcaaatcttatcccaacaaaattcaaacaaattaccgtatcaacacaagggtagtttcgacaccaaaaaaaaaaggaaagaaaagaaaaatgtaactgttggaaagcttatttatttgataggaaagaaagaattttgagatttcattgctttcacttgcattacttttcacaactctattcaagatgggttaatcagaagaagaatatagttaagatatacacatatacatatatgtatgtgtgtgcatgtatacagagagagagagagagagnnnnnnagagagagagagagagagaacagcaacaacacacagagacagaattagagtgatattacagatatcaccagtcaaatactcgacagcagagaataagaaatgactcaaagcaaagacaaggaggttctaagtatgcaagtttaagaatgatgaatagagaaagcacctgatctgatttggagaataaggaagctaaattgtgaagctggttcttgctaacattgaaacacttgtgcgagattgatgtgttatcctggcacgtggtcagaatcttcactttctcctccaaagtcttgtaatccaaactcaacaaaaaccaaatgctcccaatcgctacgaacccaaaaagccagaaaaacaaaagctttctggtccattttctcaaacaatttggccccaacaaagtctcctttgccttcttcacccttaaattagctggtaatctaccattcaggccagaaagcttgcaattaagagacatactaaccaaaacccacctatttatctttacaaatattctcgaaagcttaaagaacgttcctttttcagcagagcaactcatcaaaatttgacccccaagagtaaacccaactgagaaaaatcaacaatgaactgggattgaatagaacatggcaaaaaatctgagcaaacccagttcatcgaactcaaacaaaatcaatgcttatctgcaaacaagaccaacttaatcattgaagaagaagaagaagtctaagagaaaaagtaaatgggatatcttttatctttctacacttgactaaagttcccttctttgaagctagtttgaactcaccaaacttcactttcatgttagcctttaaccaaggccaaacactaaatatcaatggaagccagaacaagaaaaagctgaacccaacccttgttttatctcagtatcctctgagcgaatcattaatgagatatgaggaaaactgaccctttcctatatctgactgcttcttctctcccacaaagaactgtacaattaaaaagtggtctcaaaggagtaacatttttttcattcatgggcaaccaatatcaggaaaaaaaaaaaaaattggttgttttgatgtacgaccccagttttgttctttgcagagaggtactctcctactctagacccagttggtttctctagaattccaactggaatcaatgataaggtaaaaacaaaaaataattaaattaaaataatatatatttaaaagaactgtcttttctttttttcttattttttttaattattaaaaaaaaaaaaagccaacaacatctaaaacaacagctctctctctttctctctttctcctctcagtttggtgtccagctccagcagtggatatgaggttgggcacatcattatctcatcatctaagtgggggaaggtttaaccaaaaataaacaaagcccaaagttctattttactcaacaaataaaccaaaattaagtatttataactttttaattttcttctatttaataaacacatatataatatattttccttaaaaaaaataatcataaatatgcaatatgatttgtaacactggccctccccctttgctttttgtaatacttgaaagagaccgcaccttacactgttttttcattattatttctttttttctccgcacatatatatttataggtagagagagaaactcatatcttatttttattttgtttttattattattaaaaaatggttatcgatgcaggaagcagatggttcagttcagaatcagagttcagctcttctttttctttatcgggtttcacttattacaaataatataattatttatattcttattctaagtatttctgattagcagttattgaaattatacataaggagaaattgggcaattactcgggtaaacaagcaccatgcagctggcgttatatagaagaatctctaaaaaatgtgcagtgtttggaaggtatatatatactttcattattttatataatgagatgatgtgggtatcaatgaaaatatatgtcggctatataccttacccaccaacttaaaataatgcaaaattaattaaaaagaaagataattaagttcattataagaatgcacaaaagaaagtaaatggaactttgaaaaaaaaaataaaacaaaacaaaaaaacagctccttatacactaattctttcaatcaaaaccatcattagtcttaccattattattactttgtttatttattctctagcaaggtttctattccatgttgccaatcctacattagtatcatttaaactattttaatttggacattaaatgtaattaatattttgttaaacttaatttagttggtaggttgtattgttgtaataatattggatttgattattataaatttttagctttagacaag

SEQ ID NO: 16240 - DNA, 6277 bp, Cannabis sativa
  modified_base (5754)..(5777): a, c, t, g, unknown or other
  modified_base (6086)..(6086): a, c, t, g, unknown or other
accaattaaagatcatttaaaggtcgattttatggactctggtacgcttccgctattccttaatcttattgtttgattctcttgaattaattagggctatatacagatttacagtattctaatacaaggtgctaggggatgatggagagctgacactaggtactctccccttaaagagtattctaagattttagccttctaccaagaacatatatgatttttgctatatagacatatggtcatcaccatataccaaatcatagagtttcttaaatatgattgcaccattgtattcgtagacccaaataaatggcgaataccaagtcccgtcccgattcgggtaatattgatgatatttacaaaaatatcactaccgtacaaactaagcatcagcatgcacacaaagatgcgccaccacttgactttcacttggccaccttgtgggcatcacctagcttgtattgtgccatcttgaatgacacattaccctaggcagtggggtaagctagagattttgaagtgaatgtggcagaatcagttgcccttagactgaggttgcatattgctcaacaatatggtttttttttatatctccattattaaaagtgatttgacaggctaaattaatagtcataattctaataatgtatgtcagtcaatcacttttgatgtgatttctttttcaggaatagttggtggtagttcttacagggttattttaccttctgcaaactgcgaacgttgttgctggtgcactaaaaaaatgaactattctagctcattgggaatgcaaggatactatatgtaccaacattaatttttctatggcgttcttttttttttcttttttttttttaaaaaaaaatatttttctaaggccaatttctataaagtcaactaatgtcacatcatttccaatggcatataaaaaaacaaaaatgtcaaatataatcaaaccttaattaactcgtattaacagccatgtgacaaattttaaaaccataacaacttttcttttcatctttttccatcacttgacaaaatagtgatgactttttgacacatgacaaggcaagactctgagaagaaattttggaacaagctcgggagaaaaacatagccacaacgttttattgcattgaattttaaactttgtatacattaaatttcatcaattatgactaatatgtgtgtgtatacatcggcatgtacatggatggatcgatcatgcccatttggccatgagagacatgccaccagcacccaaaaggaccgcaatgtatgatttaatctgaagattaatgctgccttgaagttttgggcccatgaaatctgctgagagaagatctaccaaagccatgtatatcaaaagcccagctgatgaagcattgagtaatccaacggctatcaatgcacttgggctattttctttgtatatactagacattccgattcctagggcaatgccaaatggagttgtcactgagaagaagaacaccatgagtgccttctttaggaacttgtattcagcctgttgtcattgcaaatatatattaatcatatatcattataacgatgagtattttccttttcctaattaatgataattatgatacaagtttgacaaaaagcaaaatttagtactgttatttgaaaattatacgtacgaataaataagaaaacaatgaagtatgtggtaggtagctaattgaatatttatattctataaataaacagttaagaattaagcgttaatctagcataaaccccaaataataatgtgtataataaattattaatgtttttaaatttgatttttttacctgtaaaatgcaaccaccaagacccattccttcaaacatttgatgaaagcaaagggcagcaattagacctttgattgagcatgtgttgtttgaagctccaagtgataagcctatgactactgaatgaacaacaattccaagttctaatacctgcagcccccaatcattaaatttacatatctatgttttatataatactaatgtacagagataaatttagatatcaatatcatatatagtcacaaaagtctatgcacttgacccccacatgaataataaaaaaatgttaatgatctcattactactaacaaaaaaaatataaaatatcacatgataagatcataacgtaataatcaatttttaaaatcaaattgttttggatcacaccactctaattaatctaatcaattgttaaagaaaaaaaaattactaatatatggatctcaccattgcaacaactcgataacgaagaagttgagtgtcgaaactctctcgatccttgcccataccatgatggtgtccatgaaaatggccggccggcctcggctgtggagcggccaccatctcttgttctcctctctcaacaacagcctcctcatcatcttcaccttgatgatgaggtgcaatagcagtactactgcttttcttctggttgctgctataaattgcagtggccatggaatctaccatcaaagtaacaattgcggataacatggccacgaaaccggtgaaagggaatttgtgccagggattttctttaagacaatccgaccacaacatgtcgaaggagtctggcaaaacgtgcatgaatcctgtggcgaggatgatcccggctgcgaaagccttgacgatcacaaagagattcctgtccggatgaagggcaggaatctttttggtgaagagaggtagggtgacgccgatcatactcgtcacgaggatcgagacaatggcgatgatcttcagcggtagcgctgcagatttgtcgttgcagctgttgttggactgtgagttgcattcgttggattgtgcatgggctttgggagtgaagatggagatgagaaaaattgaaattttaatgaggttgagaagtttggttgtaatagtggccatgttttgatgagttttgggatttaattagtagctaataatttgtgttttggttactcaatactcggaatgtgttggctttcagttatgcctagactttgatatagggcatgtatatatagtgatttctttacataatgttaaataaaaaataattattaaaaaaaggtagatcttagccattagttgtgttgagaataaattaaaaatataaaattgtcatatctagatattacgaatattattattattattatatttatataaatgctcattataattaatttgccatttacttactcctacactaaaataatgttgcttgttatacatttaagataatattgatatataaattagagattaatttaacaataataataaaggaaaattataattacaatatacttgactatatttgtatttgtttggtctgtgacattgtcaaacatggtttgacgtcagaaaattcctttagaatagttcaaatgagttttagaaaaagaacagtgtcatatactatctaggcttgtgttggaatgattggaagagtatgaatgttgccgtactacaaaaagtaagtgtgccgtacttgtgtttgcatgtgtacggcttaggttttaactagttgagtgcgtgcttacagtgcttagatattaattaattattttttactaaaattaaccaattcatcaaatctcggcctcccttccaaccgtggcatgctacaattaaggggaaagtaacgatatcacgccgcctacctctacctctctacccgacgacgatcgacgtcgaaagccgaggcacgcagttgctagtaaaaattagaaaaccagagaatgtacgtcatacgccattctatgatcgatttctccttatagggtttcgatttttctgtccccaaatccaaaggtattatcccatatccaatatcaatacgaattcaataatcatttaatcaattcattcttctcctaaggctttactctgtttttaatgtatccttacggagaagaggaaagaaaaaccagactagagaaaccgaccaagggtggcaattttgtttgtggagtagcgttggtttagattttgtgtttagcttcaccaaatccatttttcttttttgggttctttataataaataaccttatatgtgttttgtatgtataatcaccctcgaaaaagtctccatctcctcaatggcacagcaatcagattgtgagaagctcacttatctctatttgattccagctctctcactttcattcaaattatttatttttgtttgagtattttaatacttaacccctttctctttggtgggttgaatacagtaagagtagttcactgaaattttagtcaatagcataagtgatccttcattagactaccaatttaacagatactttgaatatgcatttgattgttgtaatattttcagtactcgtatcttagtttggggtcttaatcttgcctggtctgcttctaagatgcttgttctgttcttgacagcatatgtagcccatgtacgtgaaagaatcttcttctgccaatttgtttttacccttggaagattactcaattggatcaaagacttgtcctttcaagatgaaatcattgctaggtatgcttacttaattgaaggcctttggtgctgaggtttattggagactagcttatcatggcatgccaaatataattttgaaagtactgtactagctaattatgagttattttattgggaagaagaagaagtgtaggaaaaaattggtatttatccatatgatatcttactcctactttaattttttctttatgggctagaaggaatgagtactcatgaaaattctgaagatgaaaggaggcattcgaaaatttgtaaccacaagcagaaagggactaatgcctaataaattcactcattaactaaagagagaaaaagagaaaagaaaaattgactacgggtccctcaatgtcaatagaggatgtacaagatttgcaccaaagtctccttgacagggatttgctacgacctatgcacgatgactactttactttgttgaggtcagtggatcttccaactacactcccacattttcttgtttctcatatcattgtctatttattgttgcaattgcttctggttaccactttgcagagttttgaaagctcttacgttggaaaggtaattcaaatgtggggagaaatgcttaactagataaattattgaaaagacaatattttggaggtaggttgtgtcaacattttacaactctgtaaatgtatgcttgagagtatctcagtgtagctgaaaaagctataaatataatttttgggtaaatctacagtggggcttagtgtctttacctcatgatatagggaagtaaattaagtcaatcaaagttaaaagaattagattgtatagaacttttgctttttgtatgtgtagaaagattattatattaattatactatatgataatattattgtcttattattttttattttctgtaaaagttataaatatattaacagttagactttaggttttggtttcaacactaatatactgaatatatgtaattttaattttttttaatgaaaaactataagataatggtactttacgcagggaaaaaacaatgaattacttttttttgttgggatttttttatttttacacttcaaaatagtttttttttgtaattttacggaattaggcataaaaacccctactgcaactagcgctgcaacctaaattgcaacaaaaaatcgtacagaaactcctactgcaactagcattgcaaccactttagaaannnnnnnnnnnnnnnnnnnnnnnnaaaattaaaaaaacagtatatggggtaattccccttttttgttttataaaattatttaagttccttaatttaatttgaatcataattatcaatttttttatcacataaaataaagttttcataaactcaaaattaactcttggggccacatgatcccactcaactttttataatttatttttttgtatatatatatatatattttttttttatatatttgtatttttacccctataaatttaatttttattttagttttaccatcacatagtataattttgcccatataaatttatatttatatatatntatattttttttttatttttatcttcacatattttcataatctactctaatctctataaaatttatatttttctttataacaaaaataatattttttataagtattttgtctccctaatatttgtggctggctccaccactaacagtatgacttgtagtttttccctcatgctataggaaagcaaattcaa

SEQ ID NO: 16241 - DNA, 8917 bp, Cannabis sativa
  modified_base (31)..(50): a, c, t, g, unknown or other
aaaaacttaatgatttttttatcaatttttnnnnnnnnnnnnnnnnnnnnattccattccattcatattcttattctcattcctatattttcattcctcccaaccaaacttatggctaatgtggattttttggttttgtaaggctaatatgcttagttttgtaagtgttttgttttgattttgtaaggtcaacgtgaccagtatgactagttttgattttgtaaagttgattagtattaatttgtaaggtcagtttggtataagaataacacattaaaatatactataagctacaatatcaaagaatttttatgtgaccatatttatatatataaaatttcatattttattaaatatttgttatatattaactttttagataattatataagacaccatttttttttttaaaaaaaaatacatttttacgcttaaaaaaatatgataattatatattttcacgcttaattttatatatatcatattattttttaataaatcatgccattttattaatagcagttaactaaaataatagtttacaatccaatcagaatattttactgttcgagatacgactaagactaaaattaaaaaacgaactgaataatcaaccacttaattctcagattgtttgacaaaacattaaaaatcaaattagatcaatatgattgcagcatcacagttaaccttaagaacaccaatattcagtttcatttacagcttaaaagatacaataatataaaatattgcagcaagtttgtttaatctcgtaactttagcactcaactattgtacaatgtacgtaattgcactactaacaatctcttccgtcgcagataacttgttattcttaactactaatagtgatgacgagtcatcaaagaacaaaaaaatattaacaacaaaacagaacaatacaaaaacatgtcacataaaacaaaaataaaacactcaaaactatattatagagacaatattaaatactcaaaactatgttacagagataatactaattataataacaaaaattgaatcgaaataacaaaacataactctgactacgccgcacttacacccaagaaagactgacgagcctgaatggagaaagaaaataactttatgttgctataaatttaggaaaccctaaaatatgttttttttttttaaaaaaaatatcctattattaatttcattcaacaattatataatagttgctaactaaacttttcaaaagcatccaattaaaaaagaaaaaaaaaatcacttttcaaaacacacatatttaagctattgtagagaagacaagtcatatatgtgaaattaaattataataattattttttatacattattttaaaaaagcaaagattatccaagtatgcacggtttagtttagtttagttgggctaatcacttacgaagacttctgtttacttaatgtgagacaatgacacacatatttatataagataatgtagaaaaaaaactccccccaataaatatttgtactttatttgaaaatttctgactcatattttctttaatttgtaacatgattataagattggggaaggtttggaaagtcattttgtaattagattgtagtgtaagtgtaattcaaattaattatttaatttaactaatttatttgattataactatttattacacaataactatataatttgaaatagttaataatatttaactactctctctaatttttagactcttatgggagtgtaattgcgtgtaattattatattctcatgttatataatattttattttcatgtatttactaatttttgttaccaaataaattagaagtaattacttttaaataactcattaggtgcgaatacaaaatgcaagacatttgcgagatgtgcttctattaattttcattctttcttactacccattgatgatgagatgaggaatccgagatgaggacaagacggaaaattttctaatgtaaaaataaaatttattttaaaaatttaaatatatacaattattaaattaaataaaaattaaaatgtatacattattttttattcatcatactaattattccatttcaacaaaatatatacttattattatacaaaaagacaatttaataaattatgaaaatcacactaatatactaaaaaattataaatacatactataacatataaaatattaataaaaagataattaataaattagatgagttcctattaggaggggagtaacattcctgtctctgtctcgtttaacattcagggataaaaattattcttgttcccaccctatttcccatttaattgagaaatccctattctaataggacaagtccccacgggaccatcccgagaaaaatgtgcattcttactcagtaatttaatattaagtacaatatatgtatgtacatataaatttaacacccagtaaatttataaaaatatgcgcaattactactattaaaatcacacattcatttttttatacaatttcttttatatatataattatataattcttttttaaaatggagaatatatattttttttgtttatgattatgattattattattattttctgtaaggttgtttattattatcttctttttttctttgtttaaattattatcttgaaagcatcttttgtgatcactactttaaagtctctctttgatatataatttgtttgtagtaaatatatttaaatataaatggaataagggcctacataattggtttgataaaatgatcattgaaatggaatgatatttcttacctaaaatattattccattattggtttgaaaaagtgacatgcaatatagagggtgagaggaagaacgaagaagtagtatataatatttcttaaataataataataaaattatttatttatttatttttttaattttaaaaaaattcgacccataatctgaaaatatattatctattcgcagcactaagcaaaggctttcctttctctttcgtttgtgctaataattggcgaagaagaagaacccaaaggggccaggccaggccaccccatcagaatcgctacgccagaaggtggtggggtggttgcttcattcaaccattttctgacccccaaaggggactactctctccttcctcacgggttagctttcctttcattttcttcctcaaatcttcattattacccttttatattttttctccttttctttttgaacaaacccatatgtttatacccattatgaaaagtatggttttttggggttctttcttaattttcagaggtgggttctgtggtatttctttcctggaatcgattttccgttggcttggatgatttgggttcttccggaaaatcttcgtctcgactttttagatctgcaatagctttattaatcttccatatattgcagtgcaggcatggggtaagtattcagattctcatttcgtattcaaaaagtttcatcaggttttggcttgtgaatggattcaaatcctctcttgattaactttgctaggttattgaataggtgatatataggaaaaaagaggatttagatgttttcttataatctattcctaatcttgaatttagaatctctgctagatagaagaatttgatgttatgtaacttaaagaccattatcataacaaaggtgtttgtgtttttcttgttattgatttggtttagaaaactatatgatggtgatttgttttatgtgattaataacagaaccaactatctttgtaacagagcagtggttgtctagcttgccatacgaaaccgaaaccagttagtgtggatgagcagccaccaaaaagattatcacatcgacggtcatcaaggaaaccaagtcactcagaggatttttggaccactagcacatttgatatggacaatagtgcagttcaatcgcagggaagcatctcatcaatcagtacaaataaccaagcgcttgatcccaatggtgttgctcttaatgctaacccaaatgagtttgtaaatcatggtaagttattgcaattgcagctttcgaattttcgatgactttgctagtttggcatttcctatgtatcttcgtttggactttgtaaagctgttagttactagtttaattttccataacccagttttcccatgctattttttttactagttttggtttgtttatatgtggaaacatattaaagatgttaattgggattttatttgcaggtcttcttctatggaaccaatctaggcagcgttggatagggaataaaaagcccgataaccggccaccacagcgagatcccaaattaaggttcgattttattgtttttacaattttaagaattactcacatccaaccctatatctgcttacttgtaactctcttaatattttttatgatcagttttgtttttgtggcatctagagtgtgtttaaaagttaaaacatctgtttaaattatggaaatggaattgtctaaaagtatatagttggttataatgagaaggataaaacaagaagaaaaaaccatcattgaacaactaacaacttggattactctttgtataactaacttggataaagtcagattattacagttggtatgtatacttattcaattcaaggtagcaatacttgtagtcattaggagttaaattgttcatggaacactttggtgtgttttgtcagcactcattctgtctgcatggttctatcattattatggctttgcagttggaacgcaacttatgaaagtttactcgggagcaacaagcctttcccgcagccaatccctcttgctgtaagttttgaccttttaccaagtctttttgattctctaaccattatttaaaggtttggctaaaaagtctactaagcttgccgggtttgaaaatgatcaggaaatggtagattttcttgtggacatttgggagcaagagggaatgtacgattgagcggagcataatagctgcgtggttagccatttcagaactcatctaagctttgggtaccattatttttttccctgcttccatagcaaataggtgaagaagaaacaaaaaccgcggcttgtacatcaacaaccttaaatgataaaaacatttgtttggttctcaaaattctcctcatcttcattgtgccctttgtattgaatttgaactaattctcaatctttgcttagattttgcgaaagttgataggttttggtttggttctctatctatgtttctggggtcctcaagatatggaagatacgaacattttgtataatggcttcacatgcttgttattattattattcttgttttccaatgaccatattgatttatcatgatttgttcggaccagcaccatgttcttacctcttcaagtcaacattgtcttgctcaaacacgtttttgacttctcagcaatagcaactaggaaaattatgctatcttaactttggacatccatatcatgtgtaaagtatatttatatatttattttattcttgagatagtgcatctccatttttgaagttagacaaaactagggaaaatcatatgaaaatcatacaagaccaataagccaactctataagattattctctctttatttgttagtactggataagggaagaaaagaacaagaataataagataaaggaaagaaacccaagaaaagacgtggcatcttatgcattttcctctggaacactcttcgaatttcctcaccagtatttgctatatggcatgtttgagaaagaccaagaacttgttagaagaaaatagatagacaataataaataataataactaaaataaagaaaccttttcttgtgcttggtcacattacacaattatagttactaataataattaattttaggtgtccctagtcaccaccagtacctcccagaatctcttagagccttcttcatctattgaaaactctgtataatcttcaaacttctttataactctcttatatttgttttattttttctatcaagtgcaatccttagcaagttaactaagctctaatttcaactactttctaaccgaaacaggtagcttaataagctatcaatggctttggctcgtttggctttgaagaacatgcaccaaagggtactctcttcaccttcatttgtgggtcatggtgctatggagagagctgctatcattggtggtgctcagagattttccactgaagctactgaaaaggtggctactgagagctcagagggaaaacaagtctctgtctcccaaggcaaaaaatctagaccagttttaccaaggagacaaaggaaaagaggcctctggaggaggaaccaagccgattatcctcctgccctttttggtacttactctcttctttcatcttttcttgttttatattaatgttatagacttggccattgtgtgtgttacaaaagtcctctttgttttttttttcttttcttttggtggcagagttctttccttcaagccttggaaatgcactgatgcaggcaacagagaacgtaaacaggttgtttgagagcctaaacttgtcgccgtggtcactgtcggggagaataaaagagcacgaccagctctacaagttgaaattcgacgtgcccgggctggccaaggaggaccttaagattactatagatgacggggttttgatcataaagggagagcacaaggaagaggaggaggatcaaagtggctcagacgacgagttttggagctcgtcgtcgaagaggttcgggtactacaatgccagccttgtgttgcctgatgatgccaaagctgatgatgtcaaagcggagttgaaagatggggtgttgtctattaccattcccaaaacagagaagcctaaaacagaggctaaggaggtccaaatacactgataatggaagctgcatctctttaaatctatgtacatttcttggcctgtttttgtgtctttaatatgtgtgtgtgtgtgtgtttttgtatgatgaaaataaggatggaggaagaattacgatgaatatggcctttgattataatgtttgtatacgaaaatattcgaagccatcttgccaaaactcatgatcaaaatgacgatgtcgaaggacaacaacatcactacctaaaagcatcatttttaataaattactttccatcacaccacatgaatcacaaaagtcattattaattcaggcaaaaaggaaaaattttaaaggcaagcccttttcaaatggcaaatataagttttaagagagcacacgtacgagcgcgcgcgcgtatgagacattgagacatgcgcgcacccactttgcgccaacacgccacagcagcagggcgcatcacattaacgatgcatgcacatgcactagatcactgaccagtcagactatcattatataataaaagctataatttatggttaacaacttcacaatttcttccattttcttattctaattaaaggccagggtatacgaacgaatacgatccattgttcttacatggacaagactggccaatgaaaagaacagtggccctctgacacgtgtcggctgtaaggaatgacgttattgttatgatttgaacagttatggtaaagtatagtacactacacaacacaagggtcttgtcaagcacagttttactttgtattttctttcttttataaatcaaactcattgagacttcttttctggggtagtaaataattaaagttttaagtagtagtgatagtatatgctgtacgtacaaaaaccatgcagaagggggccgtcctagctatatatattatatatattatattatatatatatttatatgagatgagatgaccaaagatagttgatgtgaagagtaagtaagtaggactataagtttttgtcagttaaaggaacttttcctcttcaacctcaacatttgtgtagtaggaaatagcaataggattatataggatttgggtttaatccatttttctccttcctcttatattatggttgattaacacaaattaactgcttatacaggaatatatatgagaaaagaaatttgggttttcaaaatttttgccactatagtaaagtaccacgaatatttatgtgtacttttgatcaataaaagggaacaaaacaacatctatttcaagaaaaaaataaataaaacaagaaagatgtatgcatatttcgaaggaataaaagctagactaaccctacttacatgatacatgtatggttgtgaataacttttttttctaataaaattttgtcaacaactatttttctttcaaaccaaacaaacattttttttattctcttcattttttttctcattttctccaataccaaacataatccaagtttctctctctttctctctttttttaaaaaatctaattcttggattttgaccaattaataaagtcgttattattctgaactgcctacttgcaagtgaattaaaatgtatatatttatattataaaaatattaagttgcaagtttcaaaaatgttatccaaattgtttgacaatatgaagaagattggtatggtaattgagcagaggagtaatgagttaaaaaccattgttgaattaaaaaacctgtgttaaggaaaaaaggaacagagacttcctcagttgcctagttctttgggaaattaaagtaacctgctctggaagcttcaaataaataagtctttttttttttcctcactgcacttcaaactagttcttttttgaattcaacctctgaaaaagtctacttaaagaaccaacacttattaattcatctcgggaaaagctcaccaactccattgatttttcttcacctcttttaactccaacaatattaattttatgccccttttggaaccaatgatgaaattagatgattatgaccatgttcatatttatcaattttgagtatatttttttgg

SEQ ID NO: 16242 - DNA, 4823 bp, Cannabis sativa
aaaacaccaacttgttttgtttagtttctcattaataataatgtacgtgaatgtatacacataaaaaatagattaaaaaataaattagtcgaatataagtctcataaaagaagtgttattttctgtattatagatatatatatcacatgacttaatttgctttttttttttttcaaatattaattaaagcatgcagcacaattcaaggaaattaacatgttctaagattattaattttatatgaattcaataataacttgaaaaagttgatagcaagtatgaacacacaacccatatgttattaattattaattatataagaaagaagactatgtaataaataaagactaaaagtataattaaattttttaatacattaatgtatacaggacatcattaatcgtaaattttagctatattagactaatgccatttaattaataatattcaatatatatatatatataatgaattcttttagcaagtagtatatactctctcaattaagtctctacaggatctatctataaatatacaatttcttatatcaacttaattcacccaattacaaaagtattcattcagctctaagagaaaagaaaaaaatgtctgaattgccaaggtttgtggtaatcaaatctaaacacaatggaaaatatttgacaaagataactaaggaagagagcatcgcaaaaggattgtcagaaacgttcgtgaattttcgaggcgaaaacattacgagtcctttggtgaaattcgaattggagagagccaagacaaaaccgggatggtttcacatacgttattgctacaacaacaaatacttaaccttgcaaaaaggttattattggtatttcctggcctcagccgaccagcccctcgaagaagacgaaatagattggaaaaataccatgttcaagcctatcaaaactaatacttttgatgatgataacaacaaacaagaatatcttcgatttcaacatgtcaccaaccgttacgcttgtcattcaacgtgggaaaagaattacgaggatggtctctatgtgagcgataagaaggtggatgatttcgatactttcaaagtcttggattgggaatcgcttgtcatatttcccaaaactacagtagcatttaggatgctcaccagtgcaagcttgtatattagcaacaaacaagatgcgtatttgagggtgctcaaggaagccaacatcgtcgataaatgggtagcacatgagatctcaatcgttggcgatggttatgtccgcataaggaacctttccactaaccaattttggagaagctttagcaatgttgtcgcggctgactctaacgactccaacgacaagtacacgatgttccatcccatcaaagtagcagacaatgttgtggttttgcgcaatttgggatttaacaagttggtgtcggtgaacaatcctgatgctgacacagcagcagttagatccatgtatgagtctgacattatcgataaaaccaagctcatggtggttgagcgcgtcacatcaagggaaatctacaacattaattttcgaaaagaggagggtagggtttataacctcagcgttatggagatgagtcatgcagtggccgataaccctgacgatgtacataacactatgggattgacacttgaattcaataaaacaagatcaatttctcttcgcaacagcgtttcactactatctgacgttaaaacaaccattgaaatcaatgcaattccattgatagtcaataaagaaaatattaaattgtcagctaatcaggttactgcggtaggaaagtggggaacaaccaaaactatcgaaactttaaccaagactaactacactgttagagtgcctcctaagactagaacaagagttactcttgttgtgacgcaaggaacgtgcgaggttccattctcttatgctcaaaaagataatttctacgatgccacttccaaaatcttggagatggaagatgggatgtacactggggtcaatattttcgacatcgatattaaaaccagccatgaaaaactaccctaataataatatatataacaactacgaatgtttctagctagctagatggttcatgtgtcgatttgttgtacgttttcactctatgtttttttaatggatccttctttatgcttctttaatattattatattgtttatttttattatttaagaaatttttgagtttagtagcttgtttttcatcaaaatattcttgaagatccctatttcaagaaaataaatcccatccatagttaaatttgggttttagtagcaaatttattgtcttatttcttttaagcaaaataaacaagagatctctaatcgaagagcaagaaatataatcccaacatattgtttaaataaaaaataaaaacagatctcacttgataacgtttgataacgttatgatcgaagaaatatatatatatatatatatggataatatattttataaattctaagtgagatacatagataaatatatatggatcgtttcttaacggaaacgtcaccatcaatggaataaaatatattattttattgctgttgtggcacggtcaccagcttgacatagcaagtttttaataactttgaaaagtcaaattggtgagttggcataatataagattctagcatttaattcgagattcttctttttttttttttggccataaggaatggtgattcttcaataaaatacaagctctattaccaatgtaaaatttaaatttgttaatatttttattacatgctcatacattaataccattaattataatttaattatattaaaataaaaaatactcttcttgttcacattttctcttaatggggcagctctcctccttctcctcttcttcccttaggaaacctaatctacagttgacctcaactttcgccgcctctttccgatacgctgctgtttttgtattcgcagtacccccaaatccaatctctcgcttgggtttacgatcaaccaaacacatctatggctttgcactcctgtgtaggctttttcaagatcctcgtcatagccgaaacatgtattattattttcatattttatctcacactggcttcttcattcaaaaagaccttcttcattcaaacaagtaaaaactttgaaatagtttcgattccagtttcagtattttgttttcatgtgattaataaataaaaacgttatcttctttctttccattttcttttttttttttttcaaataccatctcttcttttttattacagcaatttattttttaaaattaaaaaaaaaattacttaaaaaaaaagaagaagcaagttatagccaaacccaatcattctcctaattaatacttttgttgtaaattaagctaattactttttttttttttgagaaaaagtctgttatcataaattaagaagagtcttttacaacaacagagaaaatggtagaggaaatatcctcgtaccacatacaatcattatctagcgctaatgcatgtttagccaagccatgagcagcttggttcgcatctctacgaacatgagatacacaaacattagggaaaaaagataattgatttttaacatctgaaataagatcgttgaagcctaaatttcttgatgttaaaccatttactgcagagaccaccatcaatgaatccgattccactatatcgacttgtaaatgcatattcttagcccaaattaagctatgatagagccttaaggtttccagtagctggtttggagagaactgcaatgacttgtccattggtatctcggatgatagctccatatcccattttattgcagcctgaagaactcgctgcattaacattcagtttcattcgtgagtttggaggagcttgccacggctggtgtggagctgcagatgaagaggttgccttagaaattgaagccaaattagcctgttgaaaactggtgagataagccatagattttccataaattgcagcaggattaagggccaatttgttatggaaaatattgtttctgtcaaaccaaataaaccacatggtgcatagagtcttttccaaatcaaatttggtatataattttgatagaagcataagtaaatccccatcttgcatttgacttgcagcttgaaaatcaaagtggaaatctgacaatccccaaacggctttagcatgcttgcaactaaacatcgcatgtcccactgattcccaagcattagaacataaactacaggcagcagaagtaattattttacgctggtatagagctgctgcagtaggtagtgaattctgaattaatttccatccgaagatcttgacctttgaaggtatgttcaaaccccaaaaatgattccaccatgaagagtcagagctggaattagaagaggaatgttgatccaccaaagagcaagcaaaatggtaaccagattggtccgtatattccccatgagtggtgtgatgccacacccaacaatcgtctagagaagtggaagataaaggtgttgtaagaatcttatcaatatcaacaacagagaagtccctttgtaatagaagtaagttccattcatgatcagaagtgatatattcagcaaccgtagcatatggtgaaccagtaaagtgagttggtgtgaacgttgttcgacttggaagccatggatctgtacaaagcatgttcaaaccattcccaacttgcatcctcattccttgaaccattaactcacggccccaaacaataccttgccatgtgagggaggagttataacctttgttagccgaaagaaagtcaccatttaagaaatatcttgcttttagtaagc

SEQ ID NO: 16243 - DNA, 6934 bp, Cannabis sativa
tcaataatccaaaaagtaagatgtaaatgtttgaggttgacactactttacagaagatgcatgaaattttgtatgaagagttggatatagaccctctttgtgtaagaactgaaagtagaggtgtgttacatatacatgaaagacaatatgatacaaccagaggttttagtgaaagatagtcaagtaagattattcttaagaatgaagacaaaaatgagtgtggagaacttgctgccattgtttgtgactaaggttaagaggcatgcgattttggggcctactctgccaactgtccccccaagaagtgttgttgggagttttgtcccaaaaacagatctagcaataggtttgaataagtaggctcctactaatatagatgaggataggattgacaatatatttggcctgtttgatgagtttgatgcttccttttacaataataatcctatggtaaattaaatgaggatggtgatgcggagttacaagttgatgaagttgtagaggtaactgctttgaggcctccactaccttcaaggaaccaaaggacaaagcaagaaagaaaaatccctcgtagtgaaaatagtagccggccagatcctcctcgtagtactataccatgtgattttgaagtttgtacaaaatccaaacttactgtgcggacattgtgtggacaaggaaagacatagagaaaaataatatttagtttctaataaataaaattattaataataatattaaataagataatatatttataattttattatataatactatttattataatattaaaaataattaaattaaccgcgcgaaaagtgattagattgcttagtttttaaaaatgaaaaaataaaatttcccttttaatttgatggtacaaaattgtgatgatcattatttatttatatacatttttaaatttggatttactttattaatgaaattggaatttaaatgagaaaggattgtatcggataaatttgttttccgtacaaatgctcctcccataactatagcaaaatttgtttcaaactagaataaataaaataatattaatttaattacactaaattaatacatgatttatctataatattattggataagtgtacactttccaaaagatttctcgggataccaagtaactacatgatagattttggtaattgaataaatattatattcaatgtaattgtatatataaaaaaaattaattaataatttttttcttgaattttgacatgtaccaaatcgtgtttctgaatttttttaaaaattcttcccgaactattgagattattaaatttaagaacttttgtctaatttcattcaattttattgtctcaatgattgtttatgtactaaaccatgctccctagactctaatatctaccaaatcatatcccttaagctttgatatgtaccaaatcatactccctcaacttttatctatgttagaatttactaaaattagacaaaaagtccttaaatttttaacagccaaaaaagttcaaaatgcatgatttgatacatgttaaaattcaggggaaaaattactaattagcctaaaaaaatgttctcgtacacccctatagactctttcagcaaattttttatttcaatatgtcctggttatttagattacctgtaaattttaaaatgctaaaattaaagtttaaatattttattgcatgcgtataattattttttcttatacgtttaataaatatctgtttaaaccttatttttaacattctattttatttaattttaaaaaaatttacagagaatcctaaatattatattatatgcaatcataaaaataaattcgcttaaaaaactcttaaatgttaaaatagttataaatatactaaaagaacattgttattaagcaccattagtatccaacactttctaaattattttcttaagttatatgagactcgatacttataacactaaaaatagtgttaaacaccattaatatcttttagcaattatcatacaaaaacaaggatacacatcagattttttctcttttttcaatattagtattattaattattaataaaaaatactaatattacctagcaatttttttttttgtttgtgtgtgttatatgctataatacaattaaatattaaatattaaatcgtatatagttaaatataacaacaatataactaaccaatgacaaagtaccacatttcttaaataattgtagagactgtgacgctacagtgagtcagagtaagcaataaatgcgagctattaatatgagattatgatgccatgccattgtcactttgtcaccgtaggcatagcatagcattgctccaaaaacaggtcacggagaagttgtggaaaaatcacagaggaggggtcaggtgattcatactcatactctctcatacatatatgttacctcgtataatatgtcatgtcatatcaaacatctatctcattatattatattatttaatgtcaaagaaagtctcaaatgagtcatgatcaatttcccaattaattacaatatccaattctatttacaaatttcatacaaatccacaacctttttcttttgactacaaaattgtatctttcttctcacttgtattctacccattttctactcttgtttgtttaaaggttcaaacaccaaccatgaatgctcttgcagccaccaaccgtaattttctcaacgcaagtcgaattctcgggttggattctaagcttgaaaagagtctcttgataccctttagagaaattaaagtaatcatcattttctcttcattcatttttttatttgttttgaaataaagttgttgtttttctttctttttttttttaattgtaatctggttgatattttcaggttgagtgtacaatccccaaagatgatgggactctagcttcctatgttggatttagaatccaacatgataacgctcgagggcctatgaaaggagggattcgttatcaccctgaggttttttcttgcttcccccaaatctactctctatctatctctctttgatttgtaatatgtctttgttgatttgggattttttacatttgagtctcatctcattttaaggtgatagttatatttgatgtatgaatttcaatggtgtatgtatattaaggttgatccagatgaagtgaatgctttggctcaattaatgacatggaagacagcagtagcaaatattccttatggtggagccaaaggtgggattggatgcaacccaagggaactcagtattagtgaacaagaacgtttgactagagttttcactcaaaggatccatgatcttataggcattcacagggatgtacctgcccctgacatgggaactaatgcacaggtattattattatcatgtgtcctatgaattttttttaaagaaaaaaacaaatataaacttctcatacattatatgggattttttttttggaaggggggtcaatttagtttccttctaatgatatatgttttccaatagacaatggcatggattcttgatgagtactctaagtttcatgggcattcacctgcagttgtgacagggaaacctattgtaagtatcaaaagagtgacacttaatctatacaaagcttaaaaagcctattgtattaatagatggtagtgctttcaattttttgatttgtacttgtttgatgttaggaccttggaggctcacttggaagggaggctgcaactggactaggtgtggtttttgcaacagaggctttactagctgaatatgggaagtcaatctctaatctgaagtttgtcatacaggtttctccattatcactatgaagcttcaataattatatatgtactcttaagtaacagaaataaatgaaagaagtgttgggtgttaaagaagaggaatgagaaatagaatgatacgagtgttaatttggtctaatttctttccagttgttgtattagtgatgcttctttttatttgtttcgatattgatttgcaatttttcagggctttggaaatgtgggatcatgggcagcaaggttcatccatgagagagggggtaagattgttgccgttagtgatataacaggtgcaataaagaacccagatgggattgatatcccagctctgatgagacacaaagatgcccatgaaagtttgaaggaatttcagggtggagatgttattgatccaaaggacttgcttgttcatgaatgtgatgttctcattccttgtgccttaggtggtgttctcaacaagtaagtattttacttaacaaagaacacctaattatgacacattgtttcggtgtgtaactagtcgatacaacatgaaactgatcttttatagaaagaaatgcacataggacttaaatactgtaaggtgtgtagaaatggtatatttgatcttttttctcttctgtagggaaaatgctgctgatgtgaaggcaaagttcataatcgaagctgcaaatcaccctactgaccccgaagcagatgaggtactgattatagtattaccataatccttgatcaaatccatatataccatttcgaaaagtgacttttagtaacattaaaagaatttgaactgtttgcaaaatagcctttcatcaaccatgctcatctcaatcaatctcatcaccttaattggtgaaatatatgcagatcttatccaagaaaggagtagttatacttccagacatatatgcgaactcgggtggtgtaactgtgagctactttgaatgggttcaggtaaaataacagacatgaaagaaacttccctcactctaaaaatgtctgtcaacatgtttaacttgtgatttttatgcgtttttctgatatagaatatacaaggatttatgtgggaggaagagaaagtgaacagagaactaaataggtacatgaggaaagcttttgttgatataaagggaatgtgtcaaactcatggttgtaacctccgaatgggcgcctttacactaggagtcaatcgagttgctcgtgctaccctcttgagaggctgggaagcttgatcttcatcttaatcttttcaattagtttactttaattgacagctgaaactaagtagttctgttggaacaaaactaacaacacttgaaataaggtgtttttttagggaataagttatattttagttactttttttgaccaggggattacatgtttattaatttgcaaaaacaaaattaagtaaaaacattaatcttccctattttttatttttttatatactctatttatcttatgtttttctcaactgtttttattttgattaaaatgtcagccttaattctcaaaaatcaaataatgccatttatataagtaaagataactttacattttttttgtacctttttgatgggggacactaatacttttcagttttcatgttcttctctattaataattttggtatcatttgattgccacaaatctataactgaactaatcctcctttcttcaaattttctatccttatcaattttcaaactcaaactaccgctttaaattgatttgcaaaattaaggattattattagaattttctttttgaatggaaattctcgcattaaaattaagcattaaattctactaccaaacaaggtagcaagttagttggaacatcatctaagctgaaacgaagaccaagatataatatagaagctctagcaaagttatgagccaccatattagtcgatcgtttaataaaaacaataaaaaacattttgcaaaacggaaagtaaacttttacaatcattaattacttgttcaaatattgaaatcatatgaacggaattttgtaaagtctgcacaacagttaaacaatccgtttctataatcacctgctgctattgacgctctttgatccagcttagaacctcacgaaatcccaatccttcagcaagttctggggtggccacccaattatttacccatgtacagagccccacaatttgacaataagaaaagattagatatatttacccaacatatagagaataacactaattcagaagtgtaaagtccatatcaaatcatcagttttggataacaactactcacatacaaaattttataatgataacctgtacaagtgaaaagaaacaaagaggattagaaaccatggatctaataataagccattgagatactcttatctctcttacttatgactaagtagtaagtattgtatctgatgacaatgttgaagaaaagttcattagccaaagctgtatgtacgtagactaataagctccagtgtacagaaagagacaagaaagatcactatcagtccatttggtttcctaacactcttgaagaagaccaagtgggatatgctgattttttaaccaaaacttgaaatatgagctaatgtggtccgaatcctaattaatctaatctcaaacttcatgcaaatggttcgaaatttagaaaccctttatgctatggatgaagtatacaccttcgttaaacaacatggctcatgaggaaattgaacccagaacaagttctctattaattgaccaagtattacattatcaaaattgaactagaaggcagtggctaatgtggacagaactagtgaaatagcaagaattttatttttgactctgtaaattattcagaatttataaaaaatttacagggataatactataatcataacgaataatactatgaaaaaaaatattctgacatgtaatttcgagcgtgaaaattgactaaaaaattataataagaaattgtaattatcaatttttttttttgtaacaaaatgtactttacatatacaaaacttgcattatataatttttaaacaaattgttgaaattaacttgagagtcataaacataaccaaaaaaagtctcaagttccaattttcctacttatgtaaaaaaaaaaaacaaaaaa

SEQ ID NO: 16244 - DNA, 5956 bp, Cannabis sativa
aaaaaaaaaaaaaaaaaagtggttgaagtggagacaagtcatgaaaatagattagggttgtttgaaaaagattctaatgttctttatgagacttataaccattgaaagaatattgaaaaactataacatggagatgctgacaatatatatttggaatattaatttgatttttttttaaaaaaaaatgtagaatttgcaaatgaaaaaaaaaaaaattatcatttgaataaatattatggttattataaaaattttaggccgtaaaattataaataagatataaaaaaaaagatatttttgaaaatatttctattgaatgtttaattttgaagattcatgctattttatattttaattgattgttatttatttatttatttttgaagattctccttcttaaaactttacatgttatgtatataccatcaataattaatgttattggttactttatagtatggtgagaaactacatttttttggaagcatattaagttaaaatcattctattattatgtatataaaaaatatataaaatttagtgaaaaaaaaaattgaatgttatataaattctctcctaaaaaaatattatcaaagcaaattttcatagtatgtttgagttttattaaattagtaatacactaattattttgacttactagttgtaattgacactaattgaatatttacttttttatggacaagaaagtttatttttcacttagaaagggttcttattattattatttttttttatgttttctttgtaatgtaatataattacttaataaaatatttgtaattgggagttggtggaatcaaaacttgtaacttttgttgtggtttatcacttttataataaaatattatagtagatctcataattaagtagatattatatcattattcatattgtatgctttatgaaattattcactaaacttttgtattttcctttttaattttctctccacgtgttacacatgtatagtcataaatcttttacaatattaaaattaatcaacaaattctttgaattaatccaaataatggaaatttatttttaattacaattacaatttctaatttttagaaagcatgaacattgttgtttaggcatcttattcattatagcttttttagtggaggaaaaatttcattaagatgacaaatcttctaataaaatgtacataaattcagtaagagtacaacattctcactaaagattcgatatgaaaaagaacaacaagctttagtaaaattatgagtcaccctgttagccagaacgataaataaacaaaaaagtgattttgctcaaacaagtaatcaaaagtatacaatcatttacaactaaattcaaaaggagagttaatcaataattgactgcgaatgaccttaaccgccgctaaacaatgtctcaagtactaccattaaccaatctttatcattgatcaaactgagagctttcctgatgtccataactttggccaactcaggttccacatcaccaccataacaaatggtacgggcttcaacaagactgctcaaataatcacgagctaccaagtcgaattgatgagtcacaacaaacaatacattgtcaatatttaccttgatttgattctcttgaggttttacccaaaccttcgcactatctattaccacactaggcaattgagtatatagtcattctttatttgggcattcttctattgttcaagatacaactttgttaaagtaatcccatcattcatattataatttttttcatttcaaataagttcatttccaacccaccaaatagctcaacagatcattttcaccataccttgtttctccttattcattaacttagagaaaattgaattgttttgttaaaaaaaaaagaataaatttgaaatattttaagattttattgttctattcatatcgttaaacaaaatattattattttctcaatataatttaaattttttattaacatcggtgcatggcatggcacgatctatcttctaagttcttttcatttaaacttttttttgttatatgattttggttgaaatattttttttttattcatagttataactatttggatgttttcttaaactaatcttactttatgatgaaaaaaattgttagttaagtaatatttctctctttttctaagggaaagtaagtaatatttcacattatatttgctatttcaaaatgcaatgatatatccatttttatacaattttggtcatattgaatttgatcatatccatttagtaaaaaatcttatccttatctcattcatattcttactcaatttttcactccaatgcctctagtttcattaattccaaccaaagtatccatagtacaagcattagaaatgggcttcaaacattacataccaagcccaaaaaagtaacatgggcttcaagcattggatacctagcccaaataagcaacaacatgggcttcaacaaatggataccaaacccaaataattaagaatcacataaaattcttatcattgctagctaaagaatatacaatccaatatatgtggttataatagaccaatttaattagttgcaactattacatattctatgggaatgaattattacaccaaacaaagctcatctaaagtgcaatgacaatatgtcaatgtattaaaatccaccacatttgtaccaagaaaaaaaaaacggtataatgattagaaaggacaaaaggaatgatatgccaattaccacccaaatttaaaatataactataaaaaattcttcaattactaagctacttagggaataagaatagaattaataataaaataacaaaaaaaaatatatgtattatatatacaaataaaaataaataatattaagtaattaactataccacatagttgattggtaaattaatagataatatttgacaaaattatgtatctaataaaatacaggaaaattatacaattctacttctatctattttggtattccggagaatattttagtctaattgttataatcgtgtatgttgtagttatttaaaatattttacaaaattttgaaacatttaaagaaattaacatgccaaaaatagggtccaaactgtttgttgcacgaatgaatattttattttatacacgtgtaaaatagactgtttaaacactgctttttatattgtaaattattccgaatttcttaaaattttacagtatatcttaaataactataacatgacaataaaacaaattagactaaaaaattattccaaatactaaaacagattaaagtacattaatacactatttttaggagtgtgtattataaaagcactttaaaatatatatttttttaatttaacttttcggattgagtactattatataaatatatttttctaatgtaaagtttttggtgagtaaattaaaaattagttaaattatatattctaattttgaaaagagctttacaaaggtttttttttttttttggtgcttttacaatgcatattttaaaaaaagatgtactgatacattatttatctgtttcgatatttagaataattttttaatttaatttttttcatattcgtgtacgttatagttatttaagatatcctataaaaattttaaaaatttaaaataatttacaatatagaaagtattgttcaaacaacctattttatacgtgtataaaataaaatagttacgtgtgcaacacattgtttgaatcttatttttggcgttttaaatttttctgaatttttcagaaatgtcttaaataactataacgtacatgactataagaaaaaattttgactaaaaaattattacagatactaaaacagatagggatacattctaaaattttctaattttttttttttagagaagttataagactttaaaatttaaacaattacttttatttttatctaaaactttttaggataatttttggagaattgtacgatgcatcccttaaaaggattgtactaatgtatctttatttattttgatatttgaaaaaaaattagtccaatttttttttatggtcgtatacagtgtagctatttaagatattttacaaaaatttgaagaattcagaaaaatttaacatgcagaaaacgaggttcaaacggtctattacatatgaaacttttttattttatacgcgtgtgaaatagactttttaaacattaatttctatattgtaaattattttgaatttatttaaattttgcaagatattttaaataactataatatatatgactataaaaagatcagatttaaaatttattctgaatgctaaaatagatataaaatttattgatacactcattttaaagggattggcaaacaccaagggacgcagcccaccgagccaactcatgagcaaggatattgtggtttctaggcacccaacaaacattcaccccattaccattacacatcaaagaaaaaagtttagaaaaaagaggtaacaatttccaggaggggcagctacggtcttgtaaggcttgcaccagagtcttacaatccgacaggaaaagtacctcagtccatcccgaagaggcacagaagtccaaagccgagagaagaccatgagcttccgcttccaagggcgaagaaacctggaacttgaaggttgcagcacctagaatttgaccctccgaatccaagataatagtagcagtgaaagcagaggatccacgaacagcagcatcagtgaatgctctcaccgaggcttgggaaggcaaggacaaattcaaggggagatcagtcgtttcagaaatcgatttggagcaagagattctccactcctgcacctcagttaaggctttacagagaatgacctccggggaagccagaattccttcatggaagcatgcatttcgcgcattccacaaggtgaagcaaagagagaccgccacttgggtaaacaaatcattatctgggggagaaacctgacctggagatttagataacagccacaacaccaattctttcggattattcaaatttagacaatcgcttctaattccccattgtgtgctaaaccagcattttcgagccaacggacacttgagaaagagatgaattatcgaatcttcctcatcctcgcagaaaatacatctcatattagttgggaatatagatgaaagacgcttaccacaggggaggagatcccttgccaccttccaaatgaaaaacttggacctttcatggatcggagccttccaaatctgagtccacaataactccggggcgatcaaagtatctttgattagagccttataagcccctttgaccgagaagatgccagattcattacttctccaaatcaattggtccgattctcccataggcaattttatcacttctcccataggcaatactaacttttaatttcttagaaagtaaaccaaacaaaaccttgtttgtatgtatgctcttcttattttttttagagcgaaaaattggaaacttttttttcttagcatgagtcacacaaatcactaccacccattaagtgggcctagaaattacactatgggccgcatgagtactagagtttgggtcaagatgggctgaaaagcccacaagtactatcaattgacaagtatatgtatatcgtgtctcgtagtctcatgataattatttttgacagaagcaataatgggagaattatatatatttaaataatatttattattttacatattatgggtaagtgtacattacactttcttaaaaggatattttggtagcattaaaagaaaatatttcggtaaattttttatctattttaacatctaggagattttttagtccaaagttttttttttttttttttcatgctcgtgtatattataattatttaaaattaactgtaaatttttagaaaattctaaataatttataataccgaaaataagatttatatatt

SEQ ID NO: 16245 - DNA, 4982 bp, Cannabis sativa
aatatatatcataaacaatgcatcatgattacttgtatgcaagtttcatttccctgaatctagagttctaatgtactttagttgattccagtccatagaagagaaaggagagagtagagaacatattatgtcttttttgaagctatctagtggcttacactacagccattgtctttctgaccttatggcctgttgaaattttcttttcttttatttatttaccattttcttctaagaatttcaagctggaacatatctctgcagcttgaggaatggtgggagcagccagcatccactgtcgttgactgggtcaccgttgatggattaaatgttgcggcttggcataatcacgtgaagcagctccttgcattttatgataaggagctcttgtgaatatcattatcgtgttaagtgcaacgaaatgtgttctggtttctaactagtttactgcctactgctttgccactttcatgtcaatagccacggaaaaagaaattgcagcgccatcaggggcaggctgctcgcaagtcgaggaacaaaaggatagggaagcattcaggtcaaggatattgattttagtacagttgggagggtaaaggagaggggagagagtctgattattttttttgttataggccacacaggtttccttcattttccattttttaaattttgtatagaattttgttggtgggtgctttgtaccataggcaatgttttggttggcatattccctttcaagggtagtagtgtgataaagttgtagcagcctttgcatttgttgttttgaagtgtgattaagcctatttgagttgaaatgatactgttgattgtcataatcaacatgtaaaatacctttgtggtagtcttgtattgtattttgttgattctctccctattaattacttaattcacagtttttcttttctttctttctttgggctggtttagaattctactcaagtaacttttttggtaattgatacacaattttgtgggtatcctaagtacataaaaatatgttgttggttgttccaacttccataaccatgatcataattattatactcatttctattaattaagaatctcaattaatgaacttttgttctttttgtcgttttacactaatactagaggcgtgtcataataattatgtgcattttaagaaccccaggatattctaaagtcattgttaagacccctttatgtcattttcattgaatatttaaatcatcatattatttaggatattcattgaaaactctttgtattgggacacttgtgcaagtgaacaaaggttttaagtcgcccgtgaaggccagagaagaagatagttcggaacccgtgattatagtagtcatttttcttcatgattagacaaacctctctattttgattctaatgttaatttatgccatcgttttaaaaccctaattatgtgttaaacttgtacataatttattggtggtcacaagacaaatatgccctctggtgttgataaacttgaaccgtttaatgaaccaatgtgcgaaagcataaaaagatttactttgatcgtgtcaagcggtggctgctttttaattattaataactcacagctgttgaataattgtattaattcggctacatgatttttgtatataaaaatagaactacttgcctatgtaattctctcaaaagtcatctaaaactaaaactgggtcattttataaactgagtgtaataaaatattaaattttaatctcgatattttaaattatttaaaatattttaagagtgagcaattataatatacacaattatataaaagaaaagaaaataactatccaagtctcattgacacttaaaacacggtcgtgtgtactagtaatcccgagaatttgcctatggtaaatacaatgttacattgatattatatttgagtcttcgtttagggtagagaatataagaatgatgaaacaataatacatgaaataataacctctaataataatagatgaattaatgaaagagaagttcgtactacactacacaacacatgggggtatcaccaagttctaggactgactctgttgcgagtgcatatattttggaaaagcttaataacagagattccttttgtcatctaccacctcttaaaaccttttctttcattagatttagtggccactttgctgtaaaataatagtgacatggtcattctagtaagtcaagtacatcacaaaatataggccaagttttttttttttaacttggttggaacaatatcatgattcatcttacttatatatatatggtatggcttgagtgaagataagttagatccaacacacaatatatacaaggagcacaacactgccacatgttctctgcttctatagctgtttgatagaaaatatataatataatgtatgatatagtataggccaaagtattattcaatttaattatcacgtcttgcttatgacaacaaactcatattgaattgatgatgagtacgttatcctcattctgatgaggtttagatttcacagtatgtggccactcccactgctaacattggattttaactgtttaactagttaaatactagatatgtatggtttttgagagatgtgaacaaagatatataaatatttatatatatttttttatatatactacaaacaaaaataaatgtcttgttcaatctgtataagtcacggccaaatgtctaaacaaaaactttgtggctggttttcgcgtctcgtgaaccaacaggggaccctactataatacatactcattttagttcttgatactcatacataccaaactaaggaacaaaattcaataaatgttgagttcaatcacacacatcaccccaaaaaaaacacaaaatagaagctttctttttctttttgatgatgagaattttacttttcattcactgcttctagtttgtggttgacttgtttttgcatgaatgaaataaataagctttaacaagaatgtaaaattagtaaattaagatttattaggtttaatacattgcaatagtaatataaaaaagccagctctcttttcttttcttggtcagagtagagttgagttgttgaatagtgagagagcctcaaaatatgaggtgggttctatcaatacttgctatcattctcacaattagtcatctttcagaggctaatcatgtgagaaagcttccatctgcaattgttgttggcactgtctattgtgatacttgttttcaagaggattttgataagagcagccacttcatttcaggtaaagaaagaaagtgaaaaaaaaaatgcaaacttttttgtttttcttatacatgtttttattgactaaaaacacttgctttgtttttcaggtgcatcagtggctgtagaatgcaaatatggtaaagcttcaaagccagtgttcagagaagaagtgaaaacaaacaagcatggagaattcaaggttcacttgcctttctctgtaagtaaacatgtcaagaaaattgaagggtgttcagtgaaactcataagcagtagtgagccatactgctctgtagcctcaacagcaacttcatcttcactccatctcaagtcaagaaagcaaggaaaacatattttttcagctgggttcttcaccttcaaaccactaaagcaaccatttatttgtaatcaaaagccaagcattcaaaactccaagaaaccctttactactactagtaatgatctcaacaaaaagccatctttacattcaaacaatcctgaattatcattcccaccaccactcaaagatccagagactcctaatgttggtggtcttcctccacttcctggattccctttcctcccaccattaccaaatctccctcctttaccacctttaccaaatctcccaggagtagtttcacctataattccaggaccccagaaaaaagcagaacctaagccaattcaatcttcactaaacacacatcaagaacaaacctatactaaagaatcaaccccaggttttttcttcccaccaaatcctttccagccaccacttatcccaaacccattccagccacctccactcattccaaacccattccagcctcctccagccccactcatcccaaacccattccaaccccctccagctccactcattccaaacccatttcagccccctccaactccagctcctcttattcccaacccattccagcccccaccagcaccaactccagctccactctttcctaacccatttcagcccccaccagcaccaactccaaggccattgtttcctcctttcccaccaataaatgtaccaggttttactccttcaccaccacctccatcaccaccacctccattgttgccattccctttccctccattgttgccattcccatttcctacacctcctagcccaaaaaacccaccttcttcttcctctccttgaatgaactaaatatgtaaaaccatgtataattttccaataagctttttcataattttttctttttcttttaattgtaaattttagtaatggtttgtcttataattgcccaagaacaagtactatagagttaaaacttaaaagtttgtagaatgaatgacattatcaaacttggaatactgctattatttagaagcttgttttatcttaattcttaataaaaatgaactggtttcccataattttgttttgtctgtgatatttcttctcatatattatatatgattgtcttttctcatacgatttagtgctttgagtttacaattttcacatactaatgctataggttacatttcaacactattttaagaccattttcaaagcaagttgttgcaaatcaacaacgctgtttgcaatcaaaactaaagcacaacaaagttgcagatataaatactgaaacaaagtcagtttattaaaagagttaagcgcagagatgtatctcagaaaatagtagatgcaactaagaaatcaagaaacta

SEQ ID NO: 16246 - DNA, 2886 bp, Cannabis sativa
attaacaatgcttctttcaaaatcacctcctgtagtaatactactactcaccctttttcctctcatctttcttcaaacactttcatcatcatcatcatcaaatctagacaacttcatcaaatgtatctccaccaattccgagttctccactccaatctcagcagctttcttcacaccaaacagtccttcattcactcctcttctccaatcctcagctcagaatctccgctacttggtcccctcagctcccaaacccgagttcatcttcacacccttgcatgattctcacgtgcaagcatccgtaatatgctccaaacagcttggaatacatctcagggttcgtagtggaggccacgactacgagggtctctcttatgtttctgaaatcgagacccctttcgtagtcgtggacctcacaaacctcagggccgtgaatgttgacatagagaacaacacggcttgggttcaagctggggctacaataggcgaagtctactacagaatctctcaaaagagcaaagtccatggcttccccgcgggtttgtgcaccagcttaggcgtcggtggtcacataaccgggggtgcctatggctctctcatgagaaaatatggccttggcgtcgacaacgtgctcgacgccaagatcgttgatgttcatggaaaagttcttgaccgtgaagccatgggagaagaccttttttgggccattagaggaggtggtggaggaagctttggaatcattctttggtggaaaatcaagcttgttcctgtacctgaaaccgtaacagtgttctctgttcctaaaactttggaacaaggagccactaaaatactctacaaatggcaacaagtggtggataaactcgatgatgatctcttcattagagtcataacccaacccacttcagtcagtaaaaacacaaccgaaagaaccataatgaccatttaccaagccttgttcttaggagagcctgaaagacttctcaaaatcatggaacagagcttccctgaattgggtttgactcataaggattgtatccaaatgagttggatcgaatcagttctttacatagcaagtttcccaactggaacaaaacctgaagttcttctccaaggaaaatcaacgttcaagaattacttcaaagccaaatctgactttgtcaaagaacccgtacccgaatccggtttagagggtctgtggaaaaggtttttggaagaagaaactcctttgactatttggaccccatacggtggacaaatgagcagagtttcagagtccgaaacgccttttcctcaccgaaacggtaccgtttttatgatccagtggctttctacatggcaaaatgaagagaaggagagcactgtgaaacacatcgattggattaggaagctttatgtgtacatggctccttatgtttcgaagtttcctagggaagcttatgtgaactacagagatcttgatattgggatcatgaataagaagaaccagacaagtacatcactggccagttcgtggggaaataggtattttaaggataatttcaacagattggtcaacgtcaagactaagtttgaccctgaaaatttcttcaggcatgaacagagtattcctcctctttcaacctctgctagatgatctccaattattatagagtaattatctgactattggaaaaataacaatggtaattttatattttaattgcttggagttgtgattttcttgcactcgagagatgatgaatagggtattttatgagttgaatggtatgtgtttgtgtgagaaatgatgtacgatcatattaacttaagataaaagccttataataataaaattattaaataaaatacgaaatttgtcacttgtgtttgttgtcatgtaaaacaagatgaagattgaagtggtataatattatgggtttaaatctagtttaatggaacatacatattaatatactttaaaattgataatacttgtttattttatagaagaataaaaggtgtgataattgatctatattcttctaagcacatgcacgcgtagacagtttggaattttgtcatggtgagtgggttggaatcggtattttgtagtgcttcattatcatactttttattttatccatatcaaagtgtgtgaaaattgagtcacccattaacacttcatcttaaattttaacgatttattgttgatctttaaaagtaacccacttttcgtgatatggttgattttttttttttttttgttatattaatgtagtattttatcatgtaatttcgaggttgtaattagcactttttttttgagaaattaacttatatattattttttaatatgttttttataatttaaggtttgaatttttcctataatttttatgtgagttgctacatgaatttattatgtaaaactctgtaaaaatataaaaaaaaaacaaaaaaaaaaaactgttttaaaatttaaaaataaaaaaacccctctcattttttatgtttgtagttttgtattatttaacgagtattaggttgggcggatccatattgcatatttttggggcataaaaccaatctaatctgcattaggtatatgaataatatattattaattttcatgtctaatcactaaataaactcgtgatatgaatcagcaaaaaagattacaaatacatactcaaataataaatttaatgcaacctcattttttttttggtctattggtagagtggtctatctttttaagttattttgtatgttggtttaattttgattattttttacataatgccctccactccactgaggaagccagaaatttagttgagtgaaggtttgaataaatattaagtcaaaactaataaaaataatgataaatgtatctttcaaatt

SEQ ID NO: 16247 - DNA, 3404 bp, Cannabis sativa
tcgaaattggtcgatccattttctacttagaccaaaattaattttcttttcacaacttcttttgacttacgaagtcaaaagtacccattaaacttaatagcttaggttattcaccactcataatttacatggtctaaagtcaatacaaacggctttgaattttcttcaaaccaaaaacaacactctattggtttatataatctagtcaatgttacaattattatatacatagcttccttcatgactaaaatgtatatatatacctctttaaattatttacttcctcaaacaatcaattataagtctacatcttaatctctcattttcttgagcatggggagctatgttagcacacaaatgatatttttgctagctattctttgtgtattcatatcaaacataagtagtattactacctttagttgcatggaaagagagagacaagctcttttaaaattgaaacaaagttttcaagatccaacacacaagttatcctcatggaaaggtcaagaatgttgccaatggaaaggagtaggatgcgacgaaagctcgggccatgtcgtcaagcttgatctcagaacatgttcttcatattttacaaattactcagacaacttacaagctaatgaggtgagccctagtttgttggagcttcaacatctcaactacttggacctaagtggaaacaacttcaattcaagcaagattcccaccttctttggctcaatgaacaatcttaagtatcttaatctttctcattcaagctttggtggaaggattcctcttcattttggaaatctaactagcttgcaagttcttgatcttcaaggtcttttcggtgttagtactcatactttcaagtgggcttcaaatcttttgtctctctaataccttgatatgaatgatgtgaattgtgggaatgcatcagattttgtgaaggtacttactaagctcccttctttgtcacacataagtttatcttcatgtgatttagatataaattactttggttatgatcccatcaatttcactttctcatctaatcttaaatacctagacctttctaagaatactcataaaaaatcaattctcaattatctccaaaacatgacctctcttgaagtacttgatctttcatcaaccttctatgatattagttccaaaattccaacttggttaggtgattttaagagccttgtttatctaaaccttgcatttaataactatgacacctttgaaagagaaggtggcttgttgtacatgataaacaatgcatgttccttgaagttgttggatttgtcatacaactcaattggacaagtgctagaccctcataatctaaattggacaaaatgtgccaaatataatctagagatattaaatttgagtggtaacataatgaggggtcctttgtctagttggttagagcaactagaatcattaaagaatcttcacctttatgggaatttattccatggtccaataccatcatcatttggaaaattttcatttttggaattattggatctatcatctaacaagttaaatgggtcaattcctgaatctttaggaagattgtcaagtttgagagaaattgatctttccaataatgagttgactgggattattccaaaaacaatggggagattgtctttgttgaggaagttatctctttctaaaaatcaattgaatggaagcttaccaaaatcccttggaaatttagtatccctagaatctttggatatttcaacaaatttcttggaaggtgttgtatctgaagatcactttgctaaccttacaaggttgaaagagttggtctttaattccaacaatttctcatgcaaagttagttcaaattggatccctccttttagtctaaacctcattcacatgggttcttgcaaagttgaagggtctcatgggtttcctaaatggattcaaacccaaaaggaagccactgaattgaatctctcaaatgctaatatcattggaacatttccaaattggcttcatagtagtatctcctacttggatctctctatgaacaaaattagtggataccttccaatgaatattggttacactatgccttatttagtgactctaaatcttggcaacaacctattaaatggttcgattccatattcaatctgcgaactagaatctttggataatctggatctttcgcgaaacaagttttctggaaaaatgcctcattgttggaaagaaagccaaatagtaaacgttattaatttttcttataacaagttgttaggcactattccaagctcaatggggaacctattcagtctaaaatggttgcatatgaacaataacaatctcaatggggaacttccttcaaccttgatgaattgctctgaattagagcttattgatcttggtgataataacttttctggacctctaccaacttggattggaggagatagccttttgatgataaagatcttaaggttgcacaagaatatgtttagtggaagtatccctttaaacttttgcaagctttttgcattgcaaattttagatctttcgggtaacaatttgagcggagaaattcctcattgctttggaaattttagcggaatgactatagaagaagatatacctgaagattatgcaaatgcaacattggaagttgtttctccaagctatgatatagaatggaacaaagcaaaggtgtcacaagtgatgaaagggagacaactagagtatacacaaatattgttgcttcttgataatatggacctttcaagcaataagctagttggggttattccagaagaattatgtcagctctctggattacgtggcttaaacttatctcacaatcatttgtcaagcaatatacctaacaaaattggtgaattgaaatcattggagtctcttgacctttcaaacaacaaactttttggtgcaattccacaaagtatgtcaaatttgttatcactaaacaaattagacttggctcacaataatttgtcaggtaaaattccaacaggatctcaacttcaaacattggatgatccggacatctattttggcaatgatcaattatgtggattgccattgcgaaaaaaatgccttggcgatgatgatggaagaaaaacttcaccaacaagcaatgcccatgaagatgaagactacaaagaaaataggtttgaaagaatatggttttactttgtggtaacacttggatatgcagttggattatggggagtaattgggagtttgattttcaagagaaattggaggcttgctttttttgggttttatgaaaacatcaaggattggattcttgtgacaatacaagtgaaaatgggaagatttaagaagagcatcatgaagtggatgtggatcaactaataataatcatgtttaccaat

SEQ ID NO: 16248 - DNA, 9517 bp, Cannabis sativa
agaaaccagtcccaatccatagaatcatgttagaaacaaaacaaacatctcatatccaaacggaaatcttattaatcttaactatgacttagccaaatcagaatccaaacaaatactatgatactatttagtcatataactatttgcgtataaatataattcctgagttggcttaccaaaacaaaattgattttacaaacaaatcataacaatatggcattggagaagtctacaatagcaaaggacgtagtgaagtgaagctcaactaaagtgcacaaatgagtttgcggttttgtgccaagtgcatagttaatgttttacagaagaactaattgatttgagataaattgaaaactaccatttttattaagcattaattaaatataactctaaaataattttaattgatacaatacatttttttatacttaaagtaccaaatataatcttacataacttattaaaattagaattatcaacgcacatagggctaaaacctataaaattgaatataccttacagagtattaataaagtaaaaattaaaataagaaataaaaagtgagtataagtgtaatttcgtcaattaattttgattttatttgtggtaattgattggtaacagcccattagtatatctaaacaatgtcatcgatggttgtgttgctcgaattgctgaaaaattagaaaccacgtaaccttgctctagtgtctatttttgtgtcttatgatgttctttttattgcctttgaattttcaggattggttatagcaagattgtagttgcaaaggctaagggcctcatcacacctgaacagatttgctaaatattttgcacacattatgattgtatatttctaatacaatgaaagaaacaagttctttgatcttgattgctggtttggttggtttatgtttcaaaaaaagtgtcctaattgagccaacgagtggcaacactggtatggatttaccgagctttcggagctgagttggttcttactgatcctgcaaagggcatgagaggagctgttgcaaaggctgaacagatattggccaagactcctaatgcctatatgcttcagcaatttaaaaatcctgccaacccaaaggtaataagattattacttcatgaaatgaatagagttgaagtttgattttgataatgtgtttttattgatgaaggtacactatgaaactactggaccagagatttggagaggtactggagagaaagcagatgttttggttgctgggatcggtacaggtgatacgataacaggtccaggaaagtttcttaaagaggaaaaccccaacataaagtagttttataaaaagcattataggcttgttcagtttaatcagttatttcttctcatttgctttcttataaaaaccactcgaaagtcttgttctgtctggtgggaatcctggttagtgaactaatgattctttgtaatcattacatattctatcaaattattctcacccaacaagaattcgccatttttaacttgtgataactttctcaatatttaagattgaaatggaactttttcgtgagctttcaatatgtttttgaccattttgtgtgagcattctgcacatataggtccacacaagatccaaggaatgggggttggttttactccttgtgttcttgaactcaatcttatggatgagatataattcaagtaagcctcaaatattccatagtttagatcttccatttaaaggaactcataacattggtttgcgtcagatattgctacctagttcctaaattgctgaattaaccttcatcatctgatgctttcacaaagttcttgtgaattaagcctaagataattttaaacatataacaatatctgattttacgcagatatcaagcgacaaagcgattgacactgcaaaagctcattgcactgaaagaaggtttactggtatatttatctactctacaaaccaaaataactaatacttattttttttaaagaaaaccttgaactcagacttctttatactacagaagttaacaatcaccatatagtttctttcccataataggtttaattgtgggaattgttatatgtttacaggtatgaatatcatcagggggccacagctgcggctgcaattaacgtagcaaagagaccagaaaacgcaacgaagctcattgtcgtaagtttgatatctcgtgtttatatacataataaaggtattttagttgaaacttaccttaggctaattggaacttattaaattcatagataaacatgttaatgcaggtaatttttgctagttttggagaaaagtacctgtcttcggtactgtttgaatcggtgaaaagtgaagctgaaagcctaattgacgagccctgaatagagtagcgaatttaactgtctcattcataataagtgaatgttgagttataatcagagaaagaaaagaaagatgaataaatcgagacagaaatagaagagatgtacaataagagtcctatgatctcacttgtaaaactaaagtaagattcaatttttttttttttggctgaatctgaaagatgattactttcttatgcatggtgtgtattactcccaatttatggcaattattttttttatgcttcatcaaatcttagttggaaactgaatatagataagagagggatagaacatcctgctcagcacacacaaagataaagcctaaaggtgtcatttttttttttttcttttttctattggcaggaatattataggtttgataaatcaataggacaaaaactttacccaaaaggtttttccacagctcttctctttctcaaattggaaagtgaatttacagtcaacagcagaaacaataatgcttcaagcaccaaaaatagtatagaatatgccaaacccgatgtgacttgcgctacttacaggagccaaattgttaatctgccaaaccgacgcacaagcattgtatgcaatcatcttcaaaatctatttagggtttccccttcttcggggttcctgaactggtagcctcaggtttccgctttattccaagaaaatgctcaacctgtaaaaaaaacaaaaaaaaaaaagagaaaaattgatcagttttttttttttttttgctgaatgcaaaattgatcagattagcgttgatgtaaaatgtagatatagtagcatttctttgtcatttgtattagtatatagtaaacaatgtcagcgcggcgaagaataatcccaactgggaaactagatagctaagctagctattagttaaaccctaacgcagacctccgaaataacaatagagtgattccacatatgtgtcaagatatccacgcagaaagaacaatagaatgattccccatgtgtcaacatatatcaaattcaaatgcaatagttaactgacctttctatcaccgagcatgggcgttaatcctccagggagatccttctcaacagtagcaaaaccacttctaggatcactagtttgtctgaaacacaatgtcgtaaacaaaatgagaaaattcatcattgtattgctataaacacgcatattattagtatatctcttaaaacggaaaaattggtatcactcttcaacagcctcacagattcactatcttaagagtgaaagtgatttaaagattttattaaacttgggtttaaaaaaacaaaagaacaaaacataccctggtttgacatgaccactgaggacaagatacggagtcttcaactgagcttgagcttccctcatccgctccacagataaagatggcgtatctgaactcttcatctgcttcaacttcagctcttcatggaattgcttcatccgcttttcttgtttcattttgccaggtccctttccatggaacttatgagagagaattcgaaaggcttccttgggagtcaactgtcaaaataaagcactagtgagaaaagagatgcttcttcatgatcatcaaaaatagcaagacaaagaagtataatgtcaaaattcaacttattagttatgcaaaagtaatcaatcaaattatttaatataaaattggtggatgaatggctatagaataagcgtctaatataaagttaaaaaaaaaatccctttaatcttgaaatgagtgtttggatggacatcattcacttgtacattgtgagtgtccaaacacatctgttgattggcatggacccaccatgtaaccctattgagtcctagccgatgcacaacagagtaaacactacagcctgtaccttaagttgattcttaatctaaaatataaattcgtgagagatctataacccccaaagccaaagaatttacataaacatttaaaatcatatataacagagtatgtgaaaaggtacaaaggctaatatgatgaaaaatgcttacaatacgcccaaattcatcagtcctttcaatgcggatgtccttttcttgatagactttgggtgggtgagtctcctttgaatggcccaaagatgatgtacgagtgtcatccctcttttggcgaggtggatgcatccccttcttgggctcatcatcatcatctccaacaatgccaacaagtttactcttctttttgtccatatttctgccaccccaatcaatgctttctttcagcgttcctctctctttaagtagcttcaatgcacctgacaatcctttaccaactgaaacttcgtgaataatttcatctggaacaatctcctccttatcctccttactgggatcttcatctttttcagtatcattaacttcagaccacccaccaggctcagttttcatttcctcatgagaaacttctggttcctcatcttcttccataaaaacatcttcaccatcagggttatgggcttctgaaatataaaaaacaaacacataagtaatttgtttccattcatcacatcacatgcagtctaagttttctctaaatctaaaatatgagaacaagatttgacaccaagactcccccaatctgttgttattccttataaaataactcagagaaaatgagaatacagaaccatgtatgtacagtaaatctaaaatccaagattattacttgtgaaatataaacagatccctattctcaacaaattactttgtatttttattatagttaaaaattaaacataaatatacctttttcaagctgaagaccccatacaaactcttccatctctgtaaagacaaccttgttttcctgaagctctccagtgttaggtatttgttcatcagcagtctggttgttggcagtgctggcagcaagaagtgcaaaagcctgaggaccagaggacgtatcatctttctttttgagagctaatgcccttgctcttgccaaagatttatagagctcttcatcatcatcatctgcataaactgaatcttcctcctctggtttggagggaagagtttgttccatgcgtaatgatttagatgcctcatctgctttagctaatgctgtctggtatgcaatattcctcctttcagcctcagctctctcctgctgttgtttaacagactgccgcttcccatcattacgggaaccaatatcaccaacacccagccctgcagaaactgcttctgcttcaagagcatctaggtctagcttatcctttttccgcaaggatttctttttcttgggctttttaaactgaaccatttcttcagaagtatagtaatctgatgtcgtttttccaggcaagttgagagtttcgaagcgattggttgttgaagaaccttgtaaccttttacgaagctataacaagaggaaggggggaaaatctcgtgagaaaacatactttggcatatgaaaacacataacaatataaacattaaacattgagaaaaggaacaataagagatattcaggaacaagaagagaaagtccaaaatcatatttaaataaacccaaacactgtcatgtttcataaagcataatgatttaacaaccaaaatgagcagaaaagagagaacagaataaattaatgaatcaaaggaaaagaagagaaaaaaaaaaccttcaactataaatatcatctattttgctattgttaatgctaatgaaaattaaaagagaagaaaatgatacctcttcaagtctcttctctgcttcattagtaatgcgtcctcgttcatctagagttatcccctgagtagaattatcaatacaatacagtacatcagcattcatgcattttggatttgagaaataaaaatataaagtaacaaaacagaacaaggataaaagaaacattagatgtgaaagtaaacataacgccagaaaaagaaaaataataacctcatctgttgctggatcgtcatattgaggaagcattttcttctctacatttggatcatcattgaacctaaacaacaaacaattaacaactatgagagctaaaaactttcaagaaattaattactatttaataggatacaacttaacgacaaacaactatgagagataaaaactttcaagaaattaattactatttcagagaacacaacctaatgaaagtagtcatggttcttataagagttctatcgcacagcaattaactaatgtcagcacattgaagagctaagcgaacagtaaaaatatgcagtagtaatcttacttgtcagcatatgtccctggtttcttctttgctgctttgtaagcatcatctcgctgcttctgctctccaagttccacgttttcaagcatatcgacgtctgccatgttagaaaaaaagtttatcttaaatattgagatgacatcaaagagttcagagtctagatgccggaaatacagaagatattacaaagtaaattcaccttcattaatatcgccatcagccagaatattctgatctttcagtgtcaaaactactgcaccaccttccataactttgtcaagcccgtgaaggactttaactccagctaaatctgaaccagatttgaacttaagttatttttttttaattaaattagtaaaattctgatcataacatatcaggtcattcaactaaaatggtcattaaaaaaaatgaaagatagttgtcaccattgcacattggttcttaaattaatttccctattaccaaagtgttcagaaagcataaccaggtttaaattcactgactaatgacccaaacaaagacatatgagtactcacattagtagtactatctgcacttttttgtgctttcatgtaaataagtatcatggatgaaacacaatgtgactataaataaatagctccaaattgattgattaagtacacattggtatacaagatggactaacgaaaattcccttttgtatcttaaaaaccttaaatcaactagtcagcactaggtacttcaggagaagtttaaactaaaaagaaaaaatgcttacgatgatgagctgtctcctcatcttcactttctccttgaacaatgttatcctgaaaagaataataacaatacttaaaaacatatgaaagatgataaattcatttccatctatacacaaagcaaggaaaaatagctatgacaagcattaacctgttcctcaaacttctttgacagctgcatagccttctgttttactacactctttttcacttcaagcttgcggctcttgctaacccaagcagaaacttccgaactatcttctgtttttttctttgatctttcttccttcattctgagcaaataataagaggaaacactagtataagaaaaagataaccgcaagtttgtaacacaaattaccctctggttttcacaatcaatgacaataagtaaatacacagaaacttgcttacttcaaaatacgctcctgaagctctgctgatgttggatgtgcttcacgagctccatcgtcatccattcgttcatcttcagtgtactgtgaagacttcccttgcttagcatccctatccttgttattctcataactttgcctagatctatcatcttttcccccatccttactccgatcgtaatctccatctggactttttctactcactctatctctggacttgtccttctcctcatctgcttccctttccttctctttaattttttctttgtctatatccttgtaattttctcttcccttctccctatctttatgtctctctctatctcgttctctctctttttccttggccctgtccctttccttatccctatccttgttcttctcctttcccctctctttatcccgcgtccgatcactatccttttcaacatccttatctttcacacggtcttttcgatctttatccctttcccgctctttttctctattcttttctcgatcatgatctttgtctctaaccttattgtctctactcctatctttctcccgctcacttctatcatccttcttcctctccttacccgagcttcgatccttttctggatctttagcctctttctccctttctttcaatgagtcatcaccactcctcctcgacctatctcgctctctacttctatggtctttctcttcccctcggctactcttcttcctgtcctttacatcatctcgctcctcacgctgttcatgctcagaccattccatgtccatatctaagtctacggattccaaaatatcaacaatttacagatttttatcaatccaacagatccttgagtagttaaactagaaaaagacaaaaaaaaaaagaaaaagaaaaatgctaactcaatccaatccaattcaacaaaacacagctcaaataaaatttatcaacttaaataatattcaattcctgaaacagttaactaaattcataatcttcataacttaagcagggtcacacattcaaatacatagacaggaataacaacaaactttaacaaaaatttactcatttcaagtgaagtagattcaaatttagtataaaaacaagttaaacataattcccgagccctattaagcttcgagagagaagaaccgcggaaagtgtagaatataattaaacaagaaaaacgaaaacaacaaaacctaaaagatgcatacctggtaaggaggatgagcggtgaatcaagaaagaaagtggcgcagaattagggcttgcggaagcaactttggggtggcgctcgctcgctcaaaaatgggcggaacaaggtcagtgttttcctcaattaaattttacaggagagatgtaaatgacaatcaagcactccttttttttctttttcgaaatcaaattgaaatttgcaatctttccttctattttttatttataacatttttgttttctaatttttaatcacaaaatgaaaatttttggaaaacaaaaatgcattttgtaaccacttttattttttaattttaaaaacagaaaataaaagcatgttctgtaaaattcattttttgattaatttacgtcgggtctaagtccggggttggatttagattcaagttgggtttagcgccaggatcgtgaggggatttgggtccggatcatgatcgaagtccaagatattgattaagaaaaaaaactgtttaaaaaaatgttgaaagtgattttt

SEQ ID NO: 16249 - DNA, 3086 bp, Cannabis sativa
tgaaaatgcaagataagtagatcaatgcttcacattcaacatttaataacagtagccaaagaaatctgtaatttgcagtaattcaaggtgtttcctacataaatttcagctctataagttattgtagcacattttggggataatgtttaagagtttgtttcggccagacataacttttttccttggagcttctgaagtgtctgccttatctctatttgactttcagcagaatattcaatcttctgttgtttttgtgatcatgttgcgttattactcactttttaggcctattgttacacatgacaagcgttaactaagtgattatttccagcatatgcattattaatcctgaattctgtcttcatggtagaaaaataacattgagatttttgcacccctttaaaccttcttgctgcagaaatgaacagctttgagcatcgatttgccattatcgacaatgggggccgaatttctgccatgagacacggcaagcgaatccccagactcagcaggccagctgaccaacgtaaagcactgcttcgaggtcttacaactcagcttctgaagtatggtcgaatcaaaactactagagcaagggcaagcgcgatgaggaagtatgttgataagatgatcactctagcaaaagatggttctcttcacaagaggagacaagctcttggcttcatctatgagaaacagatagtccatgccctgtttgcagaagtacaggataggtatggagagagaaatggaggttacacaaggattatcagaactctgccgaggcgaggggataatgctcctatggcctacattgagcttgtctagcttctaatcacatatcttcttgcaaacatatgtgaaatcggtttcttaattgcgattcttagctgggaaatgtagttctgtattcaagtgagacaaaaattctttgtatttttactttttccttgaaatagttctcagattttgcaggcttaagtattctctattgttacaaaagttcaagaacttggtgcatagaagaccttaatgaaaaatgtttataaaaccataattgcatagttttcagattgtgcaaagtcatttgctatcccaagccatagatcaaattttattcatcacaaataaaaataaaataaaatctagagccctgtactggtcttggctcagcttgattcatgacagaggcaaacaaatcttacttcccctcttagttttgttttcgggtcttggggtaatttgtaactatcatcaattcattacttgaagtaagcttaaaaaaggcttatgctaaacaatattgaaattgtctcttgtgtcgacttttctctatgctcccactaatagtaatacataactaaaacttctcaacaaaataaactaataaaaaatagtatttaatgatctaatttgtttttaaaaattgtcttttaaagcattaaagtacaaaaagaaatggttattattaaataattttagataaatatagaatagaaaagataataaagaagataaggtgtgttatcttttcatatatcgcctacctctctgaacagagagagacccaactcacagcacagcaaagatcgaaactttggcttactgacagtactcaacaaaggaagagatattcagagcaattgagataaaagaatgagcggtgtggcgactctcggtcaagggtgctcggcagccacagcttcgatggctacccaatttcagaacccaaagcttctccaccaaacccaagggggcaaatcgataatgtcgcttcccatgtctgctaatcgcaattgcaactctttcttctccttcaattccaacgcttcacctccatcattagcactcgcagtcaaaccgtcctcagtcaagaccgccgtcgctgcagtcgactccgaccaaatcagctcctccgattcccaagagaaggtctcagatgataattttaagaaaaaataaaaagaaagaacattttttgtgtagtttttgcgagtaattcttacaatttgcgagatgggttttgttttgacagggagaagcaaagaagtattattttgtggttgcgaatgctaaattcatgcttgatgaggaagaacatttcaaagagcttatgtatgagaggcgtcgtctgtttgaagagaggaacatggagcaggatttctggcttgtgatcgagcctaagttcttggataaattcccaaacattactaaaagattgaagagacctgctgtggctctggtttccaccaatggcccctggatcacgtaacccctctctaattctcttgctaaattacattactttcttttactatgaaatatgaatttcagccttattcttaatcgtaacagtaacacagttcttgagaacttttgagttttttttgttagtagtatcatatttatgagagtgatacttttggtgggcattggttgcagattcatgaaactgagattggacagagtattagctgagagttatgaagctgagagtcctgaagaggcattggcttctaatcctactgatattaagtttgacaaacctgaaaaatgggtggctccatatcaaaagtatgaatatggttggtgggagacctttttgccccaaactggaaccaaagaggaagccaaagtatagatcatataatatcacccttcttctgaattgtcatgtatttgattgcatatttatcattataaactttgatggtgtattattattactaactagccatttaagttagtgctttagacttttttagttagttgaggcatttagtgaaatacttggtcaaggtgtagtagatgagaaattttagtgtttgtatttggcctaataaacttttcaggcttgaagtcgaatcatgctgaggcctcatttgttattacagtaccttattttgaaaatcataaagctcatgtgtgtattattatctaaaagcatgcttttcatttttaagaacctgcctataatatgaagttgagcttgattatgtatcgattttggctgtagttgtagactaaattcttcaataaactgctgtttaaatgtttaccacagtgtgcctatttttttttttttt

SEQ ID NO: 16250 - DNA, 3809 bp, Cannabis sativa
ttctgccggaaccagaggtccggcgaagcctatgagaaagcagaggaaggaaagaataagagttgtcttcattatttagttaatctctgagttgggtttcggtcagggataagtataaatttgtagtgatctatctctctggcttttcaaggctgtctctatttaaatctttttgggtctgaatataaaggaagaggaaaaagatagaaggaaagaaagagagagaggttttaccatatatatatatatgtatatatgctcattacaaaaacgcgtaagggaaaagattaattatattttgctgtataagttgaaatctgaccaaatctagagattattaagatataagtatatttacatttaaatatgtttacttagttttattacggttgggaggctgcttttcatggctttgaaatatgttttattttgtttgttgaaagtgattttgtctctttttttgtgaatatctacattatttatcctcttacatgtatatcatatgagaaatgctaaaagacgagagtttcacattgttaatgtgtgaaaagataataaaatatataagcaatggactacgagatagaacttcattcatcttatcttaaattctaacactaactaatcacaaaatataatttacaagtagtgtaccagtcaccactaatttaatgagtaatagcaatactcataatattcttaaggcaaaaagaacacgtttgatctagttaaggaaacgacagtggataacctagctaggggatgtatggaaattacatcaaaacatcaccacatgaaaaaaccaaaaacatagagaagaatatacattaataaatacatatatataattaggtcaagctacatgatatcatatatagacacgggttttttatatatatatatataatattttagttttccaaaaaaagcgaggtacctcttgttcacgaagaaggctttactttgtgtttcagagtaacccagttggctacagacattattatattctatagtacgaaagtttgacaacaacgtttgggtttcaaattactgaataaaaaaaatgtgattttttcttttgggttcgacattttaaccaattggtacagtagtctaagtccttcctaataacctatttctatcgaagtaatgatgaaactaaaatcattgtcatggagaggagctcatcacttgtcaattcccttatagctaggcacttctagtacacaaattattaaaagcatcttcatataaaaaatagtctaattaagattttggccccctgaattttgataagtaccaaatcatactcatgaactcttaaggtcgttaaaaacgccatctgaactattgagattgttgaatttaggaatttttgtctaatttcattcaattttactatttaagtgattgtttatatactaaatcatgctccccgaactttgatatttaccgaatcatgctcctcgaactttcacatgtactaaattataatccctgaatttttatccatgttagacttttttaataaaattggaaaagaatccttaaatccaacactcttaatagttcagggggtatttttaacgaccttaaaattcaaggggcatgatttggtacatgtcaaagttcaaaaatcctaattagcctaaaaaaataatatatgctagcaattattaataacataattaatttttttttcctgaaataaaaataattgttttctagttcaatacttaaatgatttttttttaaaaaaaaatttattatgatttcaattattaataatatttttacttttttttttccaccaagcttaaatagtttattttcatgcttgtaagtatttttaattattcctttttgttttttatccataatttcaaatttcattatgcttgaacaaaattctagaaattaattttttgaaaaaacaataatatagtagtaaatttattctacctacgatagcatataacattttttaatactgttgacaatattttttatttctactttcccctatctcacgtgaaataatttttttagcaagattttcagattttccttaagcgacataaacaaaatgttgtaatatattaaaatactaggaaattaagctacgcttcgctccaacttctgtaatctttatgtatatttacttattcagtgatataaaatataatatctagatgtgtgtattataaacaaattagtaatattattgaaattaaaaactaatttattatttttaaaatatataaaaagatagtgatattgtgacaaatatagaaaatgatataattaacaaaaaaattttgacgtatttttaaaataaaaaaattaaatgataacagtttttcgctttaataaattggacttgtaattgatgatgcaattatttttcaaagactattgacaatatttttttttcttcaataaaaaaaatattttaactactctttatgaaagtttttacattttgctttgtggtttcgtttgaatatcttcaccacaaaagtaaatgtagttggatgataactgtaaaagggattgcaaaatattatttatttttataaacttaaataagggatttatataaatgtaaatatcaatttttcttagagcgtctgcccatgttcatgctctgtggcagttttcaacggtttatttgtatttgtgcggtttctgctcatgttcttcgtggtttaggggtctttcttcctgcttgattacattagatttgataagttttatccttttctttcaatctcatggatccttttatacataagatgaagggggctatctctttaactgaaaaagaaagtgatgttcttgctattactgatgatagcacagacattggggagtctcaagaatttattctggttgctcggatccttacgaacaagaaagtgtggctacatacttttcaaaaccagatggccgagcattgggatggtcgatttaaggtaaatattaaggaacaccattcgggtctatttcttctctgttttggctgtgaaggagatcaattacgtgcgctggaaaaggaaccatggcattttcagaatcatcatattgtgcttcttcaaccaactctgttactgaatgttaccccagatattatgatctatactcctttttgggtgcaagcatacaggctgcctttcttaagcaaatcgaaagcactggccaaggctttggcctctattctgggtgaatttgtggcagtacatgaggactctttgaatgaaggatggggtccttttttgagatttagagttcgacttgatattaccaggcccctcttgagaggtagaatggttactctacctagaattaaggatgagttttgggtggaatttcgctatgaacgattgccggattattgtatggaatgtggtatcattggtcatctctatcagaaatgcccaatctttttggaaaaacttgacttaggggtggaaccggaattggcttatggtccatctttgaagggttctcgacttccaacatcatcttatgaccgttacagaacggattttgccaaaggaaatgcatggccattacttacgagacttgcaaggagaacgatgactgatactatcccaaaattgaagacacaaagtctgcctcaaccttcagttttgttaacgggagaatcatctaaacagggccaacaaagcataactacttctcaatttaatttgcaacatcctgtatttcttgatgtctctactccaccactgacttactctcataacaatgtcccacttggacctgctttgaattttaatccacca

SEQ ID NO: 16251 - DNA, 11701 bp, Cannabis sativa
  modified_base (8333)..(8338): a, c, t, g, unknown or other
taagaactcattgatgctaacagactaaaaagaacagtaaaccaccaaagtagaatagtcagtcatcaaccaagaaaaatggtagcaacaagtaggggagagcagaaaaaaaaaaatagtagcaagaatttgtatcatgacatatgcaagactaacaaggggttcaagtagaaatacctttcctgatccagcaagttatatatcaacaaaatattactcactaaactataaaacataaaagcaaggattgcaaaataaaaacaagatctttgcatgcttacttgtcaactcttcccactctaaatcaaaagagcttaatgaacagtatacatacgaaaattttcattagcgaaaaccattttgacactggcatggatcaggccaactgcctaaatagccagctcaaaaagtgatataaaatagcaagaaaagtaaaatgggtaaaaacaagaattcattttcattacaagtttgaactgtaaggaaaagtggggaaggggaagtaaaactgtttttccatcaaaaaaaaaaaaagaaatgagaacctggagaacaaaaaataaatataaactaattcaaaatcaatcagtagcaccatatacgaaaccaaaaagaaagagaatagcaagtacaaccttcttcgccctttcctccctttcagcagcctccttcttcttgtccttctcagagccctaagcaaatcaacaattcaagtgatttagacagttatcatcaaattcgattctgattcataaaatcataaccaaagggctcctataaaatcataaccaaagggctcagtgtaatcaccaatttgataaagatgtcctgattctctttcttgcttgaaatctgttgcatggatgcaaactctttagtatccacctttctctcctcagcctttagtgcctgcagggccttcctcttttcctccagcaccttttcatactcctccagagtcatctcctattgaccaaacataaataatatttatcagaatgtgccgtatattcatcacgtaagaagcactaatcaatcagaaaaggcaagttatgccacagtagcattcaacttcagtaaaattatttgtagggcaaatacctaggaactcaaatattcgttaaacaagtacaaagtgcaagtcttaaactacaatacagaattgattaaaagaaaataggcaaacaagaacctctttatgaaatcatagaacactgggagaaaagaaaaaaataaaacaatagcccactaaggattagtttagcctcattcttaaccatctcatttgaaaagtaatgaattcttatccagttaaccaaatgatgttaaattactagaaaaccattcaccttatcctcaggttctttttcttcttgttcagtaggaggagcctccttgtttccatctgcagcagcaccttctcctgcaggattctcgtccccgaagttcttctcggtctcattgatggcttcttcagttactctagagtgtgggacaatcatgaacaaaaagggtcagcttaataggcaaatacactcaagcatgtagtagcaaggaattcatttcataccaagcgaatacgcaaattgaaagtagatacttacggagcaaatgcatcagtgtctgttccccagttcccgcggccagccccttcacgtttaaattcactactgcaaacatgaaatattcatattaaatgcctttgaatatacagctaatgtactttggtaatcaggtggccaatttaaaaaggctcaccctcgcccagttccactacggcgttcaaatggcctgcgagagcgttctccctcaccaccttctccattactgaaatcaccacgacgaccaccacggtagccaccacgaggtcctccatagccacgcctttctctcccagagtctccctcctcaacagcaccctgaccagcagggctttgttcactgttcgaaaacccacgattgaacccaccactgccgccacgaccacggccataaccacggccacccccacggccaccacgaccaggttcattcttggactctctcactagtcgaaataaagcaaaataacaaaattagttgagtggcatacacaggcaacaattcatagctagtgtggtggaagaagataaagaaacaaatataaatcaccactgaaaagaaaaaggtactcaatgatacagaaatagcgcgaaagagcaaagattgtatatatgggacacaggaaaaaaattattataaaaaataaatccaacagcactttaactcattaagccagcacccacagccattttacaaggccgttctcctgaaaaaattattagaaacgccttcctagcatggaaaatagtacagctacaaagattttttaaatactatcacttgtcgtaagacacattaacaaaattattcagctttgacatcaaatatttcttcaaaagcatatcagtaaaaaaaaaatcccaaacaaagtacaaaagaaaactcaagtccaattttttttttctttttggatggaagtagaccaaattcattagaagtctgtccaattgaagtataaagacttgatatttgaaactgctgcctcttagaaaatacacttattttgcagtaaaggtaaagccacaaatcttagtgaaagactgaatttgttatcccatatttgctttttgtgaagaaataccaattgaaaagaacggtagctgatactgagcatgtttcccatctatattacataaccactatcatgttgtcattatttatttaaacttgatgtaaaaatacaaattttatatttcctaaccataaactaccacatagacagacacgtataaataagaaaagcaacgtcattcatatgcatatatggaaatatgtaagaacccaatacttaccattctacactgcaagaaaactataaacaaacattggctgaagctcatcccaaataaagtatatagtcactcaataaaatataaacatacatgccaaaatacaataaaatcattaagctcacagaaaatacttccctcacagccaaatccataacaaacagcaacaaatattcaaagaaacttataaaactaataaagacacaacaaatagatatattcagagcaaaaaagctactaaagagaaaaaaaactcaccagcctgagcaggaggaagaggcttggaaggcagattagccgccttattctgcagagcaggagaagccgccggctttccctgagctgaccctttcttcgacggcgccgacgcagcaatagcagcagcagccgcagcagcctgcttctgagcagcgatcaactgtgatgggtcctcagcatcgtcatcccccaacaaatcaaaggggtttgcagtcgccattccccaatactaagaaaaagctcaacaaccaaaaagaacaaaaaaaccaaaaaaatcgctgagaagagaatctcacagtgaagggcgaccacgcaaccctagcttaaaaacaactccatcaaaattttatataaatatatatatattcgcacttcactgtgtaaatatagatctgaaagagtgaaactttttcagtgtgtttgaagagagagaaaaaccctagcggctagaacagaagtgaagagtgaaaacccaatctaaataaataacaaaataatatttattattctcgattttttttttcttctacggacttcgactcgtgcggtatttatatatgtttaattatttatttatttatttttcaagatacggaaaatgtgaaattacgaaattgggtttgagtttttgatttaattacgattgtgccattaagatgagacgagatgacgggggagagggctttggtttgggcttatcggtctcgaatggttgatctgtttgccacgtggatggatttaagccgttgataaatgtccttattttttatttttattttgagattttgaggggaatttgtttttaatccacaagtggggaaaggaattgtaataccatgataaagttgtcattgtctttttcaatatttttttgttcgtattaatttgtccactttctattttgtacaatgagaaattaattctcattttgcaataattttacattggctaatattttcacccaattctatctttggccttcattcaattgtgttatgggtatgttgtgatcaaatatattatgttgggtaaattatgtatgtgattatctatgttgcatatggatgtatagtagagttgactacattttattcttcaagtttgaatatcatcttaagaaaatataaagtgtatgtaaatcaattatggaaagttaaatattgtaatgttaattttaaggataacgacgcataccacgtattttttttttattttttttgtgtgaaaaatatactgcgtattttaagtgcattaatagtgtgtcttcatatttattagtagagtttattcctcaacgacggctcctaatgaagtaacttcttcaaaaaaatatacttatatccaccactcaatttgatttgagggacataaatccataatcacaaaattaaccaaaagtagcatttcttttaaaaatctttttggattgaactttcgatcatgctaacagagaaaaaaagaactcaatttggtcaatgaattgtagaagcatttactcgggaaacttatgcttaatatgaaagttagtatatagtatgttaataattatacaacttaataattatattagattttataatatatattgtgcgttttgataataattatatttgaattattattgtaacataattagaatgtatttaaaacatattctataattattattctactcgaataattaaacaacttagttatgaagaaaatcacgctttgcgctgtccattaccattttggtaaattaaaatttacacaatatattgttttcatcatattttgctatgagaattttaattttattattagttttaggttattttgaaatttttgtttttaaactattaacgctagtaaattgtactttcttaaattttttgtttgttaaaaatttcttagaattattcacagtgaagtgattaagtataagacttttgttaaattttatcctataatatttttgttagtgttaactaaggttttcgacatccaataaataaagttgtatgaaataattaatgagtgttagaagataagatttttacgtgatttgggcattaataagccttagtccacgagtcactgtacttattagagtatttatcacagagtttctccgatcgattccccttgatatacatcattgggaatatttataggcttataatggtggtaaaaaggccattattatcgtgtttgtgtgcaccatactttgcacaatttctcaaatctaattttagggcattgcctacttttatgatgaattttaggttgtttataggtgtttggtgggatttgacttatcccttacttatgacttgacggcttatttatgcagtcgtcaattgatgtatagggtctcatgaaatcaaagaatgatgggtttaaacccttaaacacgcttgtcagagtaagtcatcagatgttctttcccatgccgcattaaattcgtatatagtgtcttgatccttgagtgacatgtcatgtttcatcaatcctctagtacctttttccgggtagacttcactcgcagagaggaaaagacaagagatactcattgtccagcaagaccctctcggagatgactatttttgtcatactctcctgaaatattgagcaccaacagtaatgaatgtgatgtgtcttgttaggtgggtcctactgtcatctggatcgctctgagactgccacgtattttgggaaaaattatagacagcatttacccctcaagtcctttcttataattttgcaagatgagacttgcgatgtgcctcctggagtgttggcgtcatgctgcacgcgatcattttagatgttgttcattattttccctcgttattgataacaacgatttgatttcttactcaattctgatgccattagttactggacgtcagatggacatttgagtagtgtaactgtccttttatgcttgtatgtatgccaactgccccctggcccttggatcttggggtttttaatctttgagctaggatcgttggatggtcgatgatccatatcgcctttggatggtctataaaaacccctcattttccttcttcaagatttttaccctcatatttttaagaatcctcaaaccagttaaaattccaagcagcccaaactttcttttactctttctttgacgttgtcaagctcgattttactgatgttttgcaccagcatctgcaactactcgatttcttctatttgtaagtttctaaccacaagaactttttctcttccttattttatttctgtaacttcatttggtgatatgcttacatgaacgttttattgacattgtatctgtgatttttggggtattttccccaagtagtttttaactttcatcttttaggcaagaggtttatatgtcagggttagtaggatttgccattttcctttttcttcgcatcatttgcaccattgtttttcaccatggtgcagtctacaccttatgcatggcatatgaaatttctttatttcttgatattcttgcatctagaaggggtctcttcttagcagttaggggacccacattccctttttgtgtttagggtttgatatgggactaactattgggttaattcttaccttttcagatgagtgacatcttgagggatctttgtaaacacaatttttgcacttttgacaaaaaaaaacttagaacttcactcaacaattagaatgtcgaatcttgaagcttttgcccaaacttcttctcaagtcatggtattgcggtaccctgtagtgacactatctatcgtgatgcagggtccagtcctggttccaaactatgtgcaccgagctactgcttgggaggcaaaagagttgcactcatccatgggttgtgttcaccacttaggagccattgtgactgagaatggaatcatgccccaggaccagaggttttccaccgtgtggccagggagactgaaacccccaataataaccatggagagtttggggcatggagacaagcacagctcatgtccgacatgatgcttctgttgttgaaaattttgtaccaggatctaaatttactagcatgtatgtttgattataaatttttaatctaacatcctaaatatgaattctctaaaacaatgaattaaacacatataaagttacaaaaaaccttacatttatggcagcaaaataatatgactcattccgttcagatctctaactcttgatcctttctgtcgtagagtatgatcaagatctgaacttggtttctcccttaggtgacaaaaacactacacaatcttccacactatcttgagtattaacttgaagtgtgtgggtaaatactcatacactatagggcacaaaattatgaaaagaagaagcaaggaattcgaaaatagaagagctctttttattttctaatttgtctggcaaaaggttatgaaaacaagagctatgagtttctatttagtgatagctattagggttaggcttagaatttaaatgaaataaaaaaaaaaaagaaaaaaaaaagaaagaaagataaattggctttatttaaaaccctatggccaaattccttagtgggcctattggctttcaattttgtcattttattgaaactaatctttttcacaaatgacatcttttaattctaactctataaatatcaattatatttatttaataattataattaattattaaataaaattaccatttaacttatttattaattagacctttcaaagtctgttaattaataaacaaaccctaaaatctcttttcttttcaaataagctcttgcttagtgaaaactcataaataagatgtagtctcatttagaagtctaatcgattaattaaaattaattaactgagtctacaagataatattatcacaactagtgtgaggactatgggtctatataatcaagctcccaataagtagttttagaatttactgagtaaattcactatctttaattcttcctaactccactatagattcaaaattgcactcctgattatatagaacgttttataccaagtatagatacgctataagttatctattattttaatctaaataattaatgatcctctattgatgatctccattgagtagggaaaaatttaccgttttaccctttaatatattttatccttaaaatacttagctacttgtacataatatttcagtaaactaatatannnnnngaaatgagtactccaccatttaaaatcgtttagctaagctcgaagaaaattatcatttcacttttatatatatatttatagaatttatagattctgtatctatgattagtgttctcactcaattgtactaccgtgttctcaagatgtaagtattgggccaatccaattagttagctttaacaaataagtcaaagaatacaagtaatacacttaaaccagaacttaaccatctcaggattgagatcattgatctaagattaactaagtgatatttgcttagaaaatatattacgataagtttatgatatgttaactattatagaatttcttggaacatattgaagtaatacatcaaatagtactaaattaataataataataatcaaagctattagatggtgtagtaattagtgaaggttttatatatcttgaaacaatcacaaactttatatgcatcaaataaaacgtttagtttcaaggataattcaaaataatgatagaattttaaaagacatatttaaagacaataaaaataattatagaaaatttacatgaaaaatacaaaaacttaacaatattatctctatacattgacaaggctactcttatatttttacctttgatattattttatttacactaatacattttacacatgtatgatgtcattataccaccttcacatactatttattttctctcattttctatcatctcttttttttttttttttttttcagtttcattacatttttcaatgtagctttctgtttgaaaacttttcccacgatcaaaaccattttttatccaaaaaaaaaaattgattttgtccatcttcttcaactgccttcctccatcatctggccacgtttttccaattttttcttcttttttctgttctataaatggtcattacttggtcttcatctttcccatcaccattgctgaaaaaatctttcaaaactaggtgttaaatctcttgccaaaaaaatttaaagacaaacggcctgttgttgaagatgatgattagactttgcttcgcctacccaaaaaagtgaccgccgccctgttaagaagaaatcgaaggttaatgttgctgaaaatatttctctccctgaagttaagaaaggtaagaactaagtttatgagagtccgatggtttctttctagtttttttatcgtttttccttaatattaccctaacttttcttattactagtttctttaggaagtaaaaatcatatttattctatttttaaatatcttattataagttttttttaatacaaagtactgattattttttattttttaaatgactgattaattgtaccaccgagtgtgtgatgtagttggctggaatgctttgcataaggttccttatttgattgttctttggagttcgagtcctcatggtaacacttatcttaggccttaaaaattgcgctattttagtaataaaaaacttttaaagattcaatagaatagtcaatgtaataagaaacattttggaatttcacattaatgtgtcaaatatgatattgataatgctttatgtttcttctaacattttggatatgacatacaaccttaaaataactgttgtgtaactaatgagttgctcattacaaagaaggaggtgttgttggttgttgttgtgttgccgaccatcttcacacacaatggataccttgtgaagtaaggttctttcaattttagttgtatgtagaagaataggcttggatcgtcatttatcctcaatggctggtatccttctttcatttggtatttcaattgcagccgaatattttcttggttgcattccagcacctgtttcaactttgtaatttacataactcgttcattgatcaaagtgtccattgcaaaatatgagaaatagaattgcgtctttttcttgacagtttgaaaatttaagcattgtaagtcaactatgggataactgtcatgaaactgtaatgcaacaattatatttgatatgaggcaactaatattaaaccttaaaacaactaataatgcccatatgtaatacaaacaaaacttaacacaatccagttttctctgtacgagtcgtgtattgccaattccaagccatattttttaaaataataatattgtagtagcacaactattattcaactaatatacaacttaaacgcaactagaaatagaaaatttgaatggacatcgtcatgaaaaaatttgtcagtattttttttgtcactgatcaacaatcaattgtaccttaataatattatgtggagaaacaactattagaattctgtaaaccaactttataataactaaatgaatatattaataaaactaaccatgttataattttttttaaagagctttgtgttggattgtcgatacgaaacacatgcaaatatcataaaaattattgtatcgttatcattttgtaatcattgatatgtctagtttcagagcgttagtaaaatattaatgcaactgcaatgcaactacgcagaaacttagaaacttaaaaactagaacaatgtttctatatatgtggctttagatgagtttaaattttctttgttattcgtgatttgatgtgaataaatctaccattaaaaatttagaaaacaacgttcatgaaacaggagaaacattagctagtttgttaatacatttttttttatacctgatttggattgatcaggaacttcaaaaattaatattagaatgattggttttcttcaattttaatcgtaattcaaggttgaattttagttttgaaccaatttttttgcccgattttgcataagtccaaaattaaatgtgtttggatttcttacgctctttttctcaggtgcagtcgccaaaatttatggtgattatccatctagcttggtttctttttagttggcctgctggtttggttgttggatgctgttgttgttgaagaaggtagttcgtgcgactgaatggttagagcacgaggtatttttgtagtttttttgttaggctgtataaatgtttataaagtactcggccaaatatatttgtataatatttttcctattttggtatatatataaaacagccaaataattattacttaccaataataataactttatattattagtataaacacattaaatcatattaatggcaattatggcatggtaaggtgaagagactctaatatgaccacaagtgagtttgcaagcaatagcatgccttgtttatccttacaataattaaaaaaaaggctaattatgattttttgccactgaacttttacatataccaaatcatgctccctgaacttttaaggtcgttaaaaatgtccctttaactattgagattgttgga

SEQ ID NO: 16252 - DNA, 3773 bp, Cannabis sativa
actaaatatatatttatatataagggctattacagtagagattgggtaaaatacctatcaatagggatagtaatttatagtctttgatttaatccaagactcaaattaactcatgaaaaccacaccataattaatatatatttatttataattaattttgaatatttttaattatagattcaactaacaaaattccaaaccataattttttgactttttattttaggtctatttaaaaattaaattatctatattttaaatttcaaatttacataaaaaaaaaatactttaattaaatttatttttaaaacaagaattatactttaagaaattataacatgttaaacttataatgattttataataatcaatataagtactcttaaaataatcaaaacattatgagttcaatcttttagaagtaatattttcttttttttttctttatttatatttaatttaagatttcaattaatttcaaaatttcaaaattttatcatattatattaattaatttacttttcaagattataatgttgaatgtatttaaaaattttagatatagaattaattatttactttaattacattatttatataatcatgcatgaaatagtatataatacacattcataatatgtttattcttcaacttagttcaaggtatttaaaatttctagatattgaattaattatttattttaattacactatctatataaatcacgcatgaacctatcaagcattattgtaaagtattaaaactattctaactcatgtcaaaatcaaacaaaaaaatataaacctaaccatgaatgtagaacaaatataaatctagaaactaaaaaataaaaaacatctacaaatggaggcagtttttagctatgacgatgagggaagatgcgatggttccactcattaataattaattttttttttcatctcaaaaaaaaaattgagagagtgatttgaatcacactatgacaatcgtcgacgcagaggaatttccagtcaacaaattaattgtctagccaaaaatatacaaagtcagaatatgagtcactccaagtaaaacaacttatataaaaccaagttttattattgcaacaaatatatttttacaaattattaaatcaatgaaagagaaaaaaagaggggtgtacatagaaacacccacctatttaaatataatgtggcaaaggactcttatcaaaagtatcatacattataatcctaaccctaaaccttcttacattgatcaattataaaaggtagaaaaaaataatgaaaggatgttatttttttttttttttttgctgaagaaaggatgttacaattggtagctctattttcaatggggaatgtttggtaacagcaaagctggtgaatgtctactaagatagttttggagccaacctacacaaagacaaattggattagattgaaaactttagaaagtgagttgattatatgccaacaataaaaaagagaacaaattggatgcaaatctattatatataatatatatatatatattcttttttggagatttggacatgatataataatcccataatttttttcaatgagattcttattctatagaaattatttggttgttggatgaactttttactaatctctccaatttcataacaaaatcacatgataaaattatttaatgtttttcaatctaatctttacctatgtgtatttattatagtattgtgtgatagttaaatagctgtacaataatgagagcttactaatacattatgcatatgcaagttcctgaaaaaccattcccctttgctcaaagtctcgaaactcgtcaaagctcgcgcaacctggacttagtacaatggcatctcctacaacattaacaagatgatgtatacaatgatcatactgttattggattaaaaataataaagaaaaaacaaattactggggagattaagcatattaagcattatcaacacccttagtataccaattctttaaactgatttcagtattagttttacacattgcaaaaaatttgaactaataaacttttgagtataaagatactgctaagttagcaactaaccgaaatttgccatcctcctagcaaaatgaacagcttcaaccagatttgaagctctaagacatggaatttcaagaccagcatcagacaatgtactctgaattaacgcacctgacgatccgaactagtagcacagacatcatacatatatgcaacatgattagctgaaactgtccaaaaagaaaaaacagaggaatatcaaattccaaatactgtgttgatattgattttcgaataagattgcatactgtgattacgcatctgtggttgttaagtacttccaccaagcgttcgaagccaatagagtcttgtccatctaatacctgaaaaagaaggaacaaaatgaagtcaaagaagtacaaagctggagatgttgaaataagaaagtaatatgaagtctaagcaacctttgcgacgccaccaagtaaaattacagactttcgcccctttagacccattagtcctgcatatgtcgcatcaacattggttgctttactgtcatttatccatgtaatcccgtggctatcattgcatactgcataagaacagcagttgaaaactatgagttgaaataaaacacccgaatatcttaggacaatgttgagttgaaagctcgagattaacaaaaagaacaggtcgtcgagtaaggtgtaagcacttgaaccatattaacatgtaatgctttccctccaatttcaaaaagatagttgcatttaaaattcagcaagagagaagttgcaagtacgcaaaacaaggatctatatcataaggtgtaatacatgaataattcattttcggctttttacaaagagaacagaaataggcatcaatttgtttagaagtctcttctgctatctttcaacagaaaaactatatgcttagcaatgaaacaataagttcaataataatactaaatgagtattgggttaaattgaacattttgtgataccctttatcttgtttaactaatcaaatccatcaacacttatagtcacttcttctgaactttttcgtagtatattcggagactaatttactggttatggaatttactctatttcagcttaccaatttgcatacggtgaagaggcggccttagcttttcaattgttgaaccaatggcttcaacatcaactccaattcccaatccaacaacagatagtgcagcaacagcagcattataatagttgtgggttccgataacttttattgcatctaactttagctgagaatcaatccctaaggcaggaacttctaagttggcaattttttcctctagatcaatctatttgagcaaagtttccactgtcagcattatatgtaatactcaatgaaaagcattttaaaataatataaagaaaatagtatccacgtctccaagtcaccacacgggagagacatggggacgtaaaattaagaaagttcttaggccaaatctcattgtaaagggtataaaagacaggtgttattgattgctgctagaaaatattttaaaaatatatcatacactacaagggaaacaatgaacaccaaaattaatcgaattctcagcttcttggcaagctaaaacgccaaattctgtatgtttatatgtgcgagtaaatgtaatacacatgtaaatatatgaaagaaatattacttactttaataccagggtagtttcctatccaagaaagattaagtt

SEQ ID NO: 16253 - DNA, 3342 bp, Cannabis sativa
agtattaactcaaagttgaatgcaaatacgtatatataataaaattaggtggggggtatatgtacatatatatttaatttctaggtagtatatgatgatagtgtatatgatatggtgtgttaatatagcattctacatgtttatttatcaatcaattgtttcttggcaaaagatagtattttgaggtgaggcagctacctttcctggtttgcatgtggcttcgtacatgattaggattattgctataagacactagtagtgtctgcttccattgattaacaatatttcatatcaaatatttaatatggtatactttaattatgtctacttagcatttcactttaattagagctggttttaatattagctagtagctactgtgttgttattcaacggagacgtcactgatgaaaggtctccatcactaaaataataatataataatgataattgaaaataaaaaaaataaaaaaaacatgaatctttagtatgcagacttggcttgtcacattgttgatgatattacgtatatattactctacccagaaggaccaatcggctttttagtactgatcagaataggaacacgaagtgtccttttcaaaacaagattcgtatttttttcaaattcaaaaatatttgacgactaggaagaataatacactaccaataaactcttttatgtgcccattaaaaaaaaaagaagaagaaactcttttatgtgcatacaaaatagagttatacatattattgttttcgtaacaagagaagacacacgataatttggggatcaaagtgtcataattatgaatatttttagcccataatttcaaactgaatttaataatgtcatgttaataacttaatgtaactttcccccaactaatttcactttttggtgaacaacaaattaattctagtaacaaaaggcgtgactagtggtgaaaagtaacaaaactggctatcattcattcttctctcaaaaaaaaaaaaaacaggcacttttttactacaaagacaaaaaaaaaagtagtcatctttagcaggttcgctcatcctcgaattcaaatgccatgaagttatttaagttaataagaagtcttttcgaaaaagaaaaaaaaaaaaaaaaagaagaagcagaaggaactatttcattaaaagtagtaaaaaaagactgggttcccaacaataaaaaacgagcaaataattttcaatttcaaaatgagaacaagtaatgggcaacttttttaaaatgtattatttgtatacgtgaacagaaagagggtgtcgactcgaggaataaatatacataaaagctcagacagaaaggtcattgtcacgtataccaacaaaaacaattatatataattttataattttatacggctaaaaagcgacatagagttatgttcatggaatacttgttcacatccaaattttaaattttgaatactataacaggcttcaaatatcataaacggaaactatatgaataaatatgacaataaagtggaataatattcaaaaataaatagatcagctatataggtcacaaactttattttaatttcatgaatggggactacttagggagctaggaccacctattccaataatttgtgttctcttcacatttcattgggtcatagaatgaaaacacattttactatgggtataatatttgcatataactattgaatctaaatctaatagaaaactgtaaaacacattgggtgcaaggtggacaagtcttatctttgacttttcttttactgtatttctaaataaatgaatgttcccctcaaactatgcaaccataaaccaatgtctctcctttcactgtgataatttacagtgatataccaagtcggcaagtcgacatagatatatatatatcatatatatatttagaaaatagcattaaccaaagataaattaaagacaaagacagaagagaaaaaaaaaagtgtaaacttagttaggatttttatgtgatgatgatgcctaaccaccaaatacaataaagataaaaaataactaatcataaaagttaaagagattaatagtgtggttcaaaaagaaagataccagaaagcgtggaaagaagccagcttggtttgtttgggtatgtgttgctgttggagcacaagtttttcatgggaggcgatccatttgacgccattaatgttgctttttccatcatcattttcctgcaatccaaacacttctagtcaattaattggtcttgtgttgctgttttctagttttaaatgcagatgaactttagggctcaaaaataagtactgttacaataataataaataaataaataaataaatgagaacagttagctatagatcacatcaaagaaacattgaaacgtgacataaataatataaaaaattggtgatgggtagaaattggtacaaaatctgaattgcattaataaaagaagaagccgtacaagtaccatataatccttcgtataaacattagaagaagcaacccataaagacaagctttttattaaatttgtagaaaagaaaacagataatcgtagatctcgaggtaataacaattaatattttaagcaaccattgaagaaaaataaaaactcaaattcaaatatgtcagagacgaaaaattaatacatatattgtcaatctgaacattcaaaactgtggtggacccaaatccccatgcatacacatacatatactctttttagtcactctagaacaaaaacaacataaatagttttaaaaaactcttgtttggttgccgagaaaacgctagaaaatataacttgcaaatatgaatatccctaaaaactaagccaactgacctcactcgaccagagtaaaacaatccattatttcctaaattccaaagtcacagaaagagtggatactagtttataggagatcaaagaaacaaaagtttctcgagaaaattcgttggttaacctaataaaagcttaccaggagcaccggcagagccgggtggaaaggaaactagaagagaggtgagtgagggaacgaatcctgtatacttgtatagttgtataggatactctcgctttctctctctctctctttctctctcgggctcagtatttatagtctgaaatttcgctcaaatccgcacccgatgtgggaccttttgaggttgactactcggctttttatttatttatttatttatttatttatttttggatatattacctttttagaggcacactaaatttggtgttacactatcactaaatttagtgtcaaaaagtattaccactccaaccacaacaccaaaaattacactaaaaaaatattccttattatt

SEQ ID NO: 16254 - DNA, 6234 bp, Cannabis sativa
tttccaatcatcttggactgcaggttggttttgtgttgggcctgagctaaatgataaatgagctgctgattctatattcctaacacactgtgcgaccataaacgattattacaatcgtaaaataatcataaatttaattaagtgaagttattttgtaaattttaatacaatttatatttgttaatttgacaaataattttacaaatcattataatttaagctttgaaaagaaataattaagtatttaaggtttattattaattaattcatgaattcttggagaaataagtggaatgaatatagaacaatccagtaattgttcctgtaatatctctggcgcacattcaattcaattatatatcgatgatttttataattataacataatagagtcaacattaatagatttaatttcctcaaaaaaataaaataaaatcattagatttaataaattaatttaaaacacgtaaaaatatgcgttaaggtttaatgtagattccatttagtcaacttatcataaaagctattgtatatatataatatgaagcaagagatctaacatggggcattattagttcatgcatcccaagaaaatataaataaaaactctgataacatggagtgagttgatcatcatgataatatatatgaaaaacatcatttgattaacaatagtattcatataaatatatgtatatttttttgtaaggtacatatgaagttaaatatttaaatattaacttatataattaaacaatcgctcaatttgcatgtaattttaataatggaaatgatataacaaataattaaattcggtcataatcgataaattatcgttttaatatttatatgcttccaattagtaatagtaagtcacttgttaattgttatagatctttataaatattgttttagaaaaatggaaattttcattagcaaatagacaaagtccattaattgcatatacaatttataaaacaaaatcaacaaaaataaatatatcaagctgtttataataaaaagcgtaaatagtagcataagtacccaaaatcttaagtttgtaagtggtataatctcaattttagcggcataagtaccaatatttgtaaaactgtaaattttttctaattttgtcagtacaagctctatcattttcttaaagaccacatataaggtccagattcttgaacattgggtctagacataaacatatagtatcagttacttctaaatattaaatattaacagagtctttactgacaactagaagaatattacagttttacaaacgttagatacttatgccgctaaaaataaacattggatttatgccgcttacaaacttaaaactttgagtacttatgccgctatcctaataaaaataaataaaagcctaacaacttcaacaaaaatattcaataaaccactagcgattaagcatacaaaaatgtgatgtaaactaagttttcaacccaaataaatatttgacagagttcatctatggactattattgactattagcttatgatcgtccaataaaaattaagatataacaaccccattattcacatacgaaataaaagaacaatcaaacgactaactatgacgagacatctaaaaaaacataactaaatactacgaaatacagggccgccaatagacaaatttaaccaaatagaaagagacaaatatcactcatgctaaagcgaattgatccatacattgaaatatcgacgcaccacttgattagagcaaattccactatagtcccttgaacaataataaactaaatatgtatagtgatagtacctttacccacacaaaagagtctttgagtcaatccagaacacatacccatagaacactactatatggatcccataataaagtcgtgtgagaacactattattaaaagggaaatttacaaaatactggaacaactaaaaaatatcagtataacacagtgaaaaacttaacacaatatactgcaatatgaaacttataaaaaatacagtaaaaaatatcgtctgatagtatttttgtaaaaaaatagcaaaaattagcatgtaaatttccctattaaaatcataaataaaaagtaagccaaaaataataaaatcatattaaagaatataacctccctcccatagattaaccaaaccatcaaaagcctcttaaaaccactggatcaacattcgtgcataccccaacactaggactagccatcctgatcacccaaaccccaccgcctcctgcaacctccacagaacaaggcatcgccaccaccacaacacctagatctcggcccacaccccataaatatgcaatcgaaccaatagagacgaaagaaccaaaacccatccccaccccacaacagacctccaccagatatagaacctaagataaacctacaacaaccatgcccccaaagcagtcggagaagacgagactagattgaaccccaacttccgacatcttaaacctccacgcacaaaacaaaagccatcagggaggagaacatcagggccaaccctgagttgaaatgggccatagacaaaaaaaaaatttttaggcccttactataaaaataaatggtatttttaaaaattattaaaagattatgtatattttttaaaagattttttttttatttgggcccctaaaatgagtgggtcctaagtgtgggcctagctcgccttagtctagggccggtcgtggagaacattaacaggctagaacactaaagaggagacgaccatccgagaaaggccaaactagaaccacaccttagaccacaagctgtcaacggaccctagtcaaaaattaaatagataagcgatggtggctagaaatcctaggagaaacctaggggtggcaaacgtatcattgtgtcgtgttcgtgtcatattttatgttactcgcttctataatgtcaggcatgtctcgacccatttttggactcgtatctaattttcccaatcctaacctgactcgtaaagaatcgtgccgtgttcgtgttgattcattttaacccatttgctatcattaaagatgaagttgtagagaaaaataatagatttagatttcattaaaaagcttatatatatttatgtatgtatagtttgttatgtatataattaaaatttaaaattttaaaatattttcaatttcatggtaaagaaaattaaatttaacttaacaataaattactaaatacatatttttacataattatattattattaataattttttattttactttatttaaaaaaatttgtcaaattcgtgttaagtggatcgtatcgtgtttgacccgtttttatttcgtatgaagtcatgtcgacccgttttcaacccgcatctaatttttccaatcctaactcgtaaaattaatttgtgttgtgttcgtgtgccatgtcgaaacctattttaccacccctatccataggccatagcagagtgaatacgactatctcaagtattatttttcgctttttgatattatacttttatttttttttttgtcgcaattatgtaatataattattttaatctatattatttattcaggatatagatctcctaacaagaaattgcaaatagggtcaaatacgatagcacactttaaaatttgcatacaaaattaacaagtttggatgtgcttaaatatgagtttcagtcattttaaagttcacttatctaacatgtttaataaataggccatgcttgggttgatgaagctaacaagaaatttacttaaagttaattttaaactttaacaagtcataaatgggttatataaaattgttaaatatctcataaatgtgttaaacaaggatcattaattgattagacgtgtcaattcgtttataaatgaattgtgtctgggcttaatttttgatacaagtattaaacgggattgtattcggatcaaacataacatgggtccacgcaacaagaagtgccaccactcccctaaattaaaatacttaccacataacacacttagtagagactagagttggcctcttggattgtttgagaacaaaaacttagaaaatatatttttggctaatttaatattatattttggcattttataattgtattttcttttcttctgttttggctaatttaattttgtattttcgcactttataaaacatataatattttgtttttgaagcttaagtttgtctaataaattaaataagagtaggtagttaatgattcatgacaactctcttgagtactactttagcattattagcactcactcaacattaaactttccttcgaattatcttcggattgattaaggtacatgttcttattgatggttatatttcttaattaagctcaatgattaaattatatatgatcacttgtaaatatatattgtattgcgtggacagcaaatacatataaaactgttctggaatctttaacgtacgtacattgagcgaaaattaagctatcgataatgcgaattaaaagccaggtatatataactagaaatcgttattatatttatatgaaatggaaggatatatatgcaatacttagtgtcgtttgtcgaagatgacgccgtttctgatctatgctatattggtaattataatattaggttaggtaggttataacttataattgttatcgtttgttactctctactctatcctttcgtattatgcaagataataattaagttttttaaattttacatcatattttggtcaacatatattaatacattatttatttgttaaaaacaaaaaatgtaaataaatactattttagattacatatttttataaaaatataatttattttgttaattaagatactatattattttttttttttaaaatggtacaaaataataattcaatttttaacattttttcacgtaaacaatctgaagtcattttctctatcaccaacagaaaaaaaaatatataatatataatcagtacagtcataataatactttcggatcaaaatattattaagttttcgtgagaaaaattgaaatatatatagtagcctttttgtacttgttcactcactgttgtttactagactaatctctcaagctgtcgtcgttttacagatcatgtttctctgattttttttccctattctctttgtagttgtcaattttcgaagtcatttgcgttgttttgttatatgttgtcggattttaattaattataggtaattgataaggtttcaaattatgtgaatgtaatgtgatacattatcaagttcatgccagataatgtagactgttaaattattaatttgttgtcgtttgagaaagggcaacattatttagcaaaatccttaaaggggaatctaatagtgtagaagggagaccataacaaaattaatcctatgttttgggttacttcttaatccccaatgaaaaatgcttaaagtttttgaaaaatatcatttatttcctatatatcaaaattcccttttatttttttcttttaaaaaatattatataataaaagaatacataaatatttttatattatattttattcaaatatatctacttttatgagtgagttgtttaatatactatcattttttatttaaatttaacatttaattatattaatttaaaaaatttaatgaagacatcatccataaaaatcgatatattttaaaaaaaatatataaaaaaaagtaaaaattaaaataaataatttaagataaatatatatacaatgtaatttcttctgaataaatactgaacctcccggtaaagccgaaaatagaagtccaataaaaattagactcaacattcaaccatgtcaccagttaattatttttcaattttactaaattaatcttggcttttctgaaggttacagaacctactagacaacttagatttgatagagtttaagaagattttgatggtttgatcacaattctcaagactattattattgttattattttctgataaatagtgtagaacttgtttgttatttttgtggagggccggcccttactttataattgggttggcccaaaccttggtctcttatttctaaaaatagcattattttgatattttttagaaaaatatgaattttagggccaaccttatttaagattggtgtgcgaaatgaatgtttcattctcctacataaattttgggagatttttcaatatacataaatgtgataataactacacaaataacaaac

SEQ ID NO: 16255 - DNA, 4061 bp, Cannabis sativa
attgtataattggaagtaattatataaattaatatgttttttatcatataattacactgtaattatatacaaattagaaataattgaagggttgtattttatactctctaattctgatggcatcagtataattacatttactaaaaattttctattttaaatattaattattaaaaaatattattttctcatatggtcatttcttgttgactttttctttgacagtttctggtcaaagatacaatgatactatgttttctttatagttgagcgcacataataaaatgagaaataagaatctgtcttatttataaaagaatcctctgtttgtcacacatcaaatgcagtttggcagcatataatcacacaaacatgtatttatatacttagagaatcaaatttgattttttattttaatattttttagattactaccaatgtggaaagctatgatagaatgtcacaagcggcaataccaagcaatttcagaggtgaaaagcttagatggcaatgctatcacatctaatgaaagactcaacaatgctgatcttgaagcgtccatacaactcaagatagtgcttcaaacgtggaacttgagcttctccaattggattttctcccaaaaggacttgattagtaccataaatggttggcttatgagatgccttctatatgagcctgaagaaacatccgatggcctaatacccttctcccctggccggcttggcgcgcccaacattttcgtgatctgtaaccattggtcccaagccttggataggatctcggagaaggaagtgattggagcccttcaaggctgtcttgcttgtattgatacccaattgaaagagcacaatgttgagttgcttaaaatggtcatttcggataaggaaattgaaagaaaagttaagatttttgagagggaagagcaaaagatggttaagttgattcagggtcgagaaaagaatctggtaacaagctttgttcttaaccatagtgacattatcaagtgtaatgatttacagttgggtttgaagcagatcttcatggctatggagaagttcatggctaactccatacaggtgtatgaggagcttcgtttacgcattgagcaactcagtgaatacaatgctgcggcggaaaacttaagtggtccataagtaatatttcgcatatggatatatatgtacgtacaatgtggtattttttttttttatatataatattggttaaaattgttttgtacccttttaagtagtttattagtaatgagttattctttaaaatttgatttgaaatgcaattttcgtttttaagataaaaacttactgcccctggtactcaaataatcatacatgtggtttgttctcacaagtttgagccttttctggacacacttggtgtgtgtaagaataaaatacgaatttgaatgtcaattggtgttatatgttttgtttgaatttgaagttattaccacttttgttcacttcaaatttcgccaacgacaacatatatacggtaattagaggatagagatagactcacattaaaaatatagaatgcaagaagtttatagtgaatgataataacttcacttaggccactcatattagtagggttattcatataacttcactttggatttctactgtgttcaagaaaaacgtgatgactctagggtgtggcgtggtactctggccacccttgagctgtgtatctctggtgcggggtatctcattagcaatggaaagattgatatttggaccaagccttgggtgacgggtttcagccctttggaggttcgtaatagtttttcttacaatgtaactcatgcttttacttcggtttcagatcttttcattccaggcacttaaaggtggaacgaaagattgattaattgctgtttctcaacggaaatagctgttgctattctccgtattcgtcctttggaaaggagtctgctttggaggggaagccggaatggaagtttctcggttaaaagtgcctattggatggcccaacaatctcggtttcatgatgagaaattggtgtggaagaaactctggaaggctaagatgcaccctcgacactcaactctggtctggagaattttggcaggctgtctccctctcaaaagtcgactacgattcctttagagggaggagagattatgtgggttgtgtggggctgaagaagagactaatttgcatttgtttcgagattgccctttcgcgagatgtttgtggttttctaacccttggggacttacaagtagtagcctatcaagcttgtcctttgaggatctttttgtgtggttgtgtaactttggcaatgaatcacttctattgtatgtgatctgcattattgaacagatatgaaaatgcaggaatgatctattgttcctgggggtgactccgaatatacatagctcgatcagaatcattgcgagaagagccaatgaatttagttcggctctgcttgacaggaacttgacagtggagaaagttccttgtgcttccttgccacctgaccccggttgggagctcagggtgcgagttgatgcctcatgtaaggacaactttgttggtttgggactggttcaaggcgaagttgaagaagatgttgttgtggtgatgatgcatttcaccaatgtagacaatactctggaagcagagttaatggccatccttaatgctctgcagctagcaaaggagaacaatgtcaactcggtcctgattgaatttgattcctcgatcgttgtcaaggttttgtccttgggcaatctcccttttgcttggggtacttaccctgtgttctttgaatgtcttgctctgatgcctttgttttccagatgtgttgtgtcttttatccctcaagcggagaattttgttgcagatgggttagcttattatgctataattttgcatgtttgtacgaggagtgttttaagggaggtagccccttttgtggctaccctttgacttgttttcggttggtttcaataaatctttctaaattaccaaaaaaaaaaaaactcaaatttattctgaccaaattatttgaaatcgaaccaaatgaatttgatgtcaatagtttagtcaatccggactgtttataattctctagtttgttcgtgattttaaaattctcatctatggttcaaaccaaattaaaccgcctaattcttaatatatatttaattttttttattaaatattgatatttaggaataattttaggcataatattgataattactttaacattgtattaagaatatttattttcattgttatttatgtattataagctttaaagtaaaaataattcagtcaaaaaatattaaaacatttacaaattacaaaccacggtttcaaaccaaaccaatcctttcttaagttgattggtttggttcgattttgaattttaaaaaaccaatattgctggtttggttcgaaaaaaatagaaatctagaccaaacaaaatcatgaaaatctatacttattaaatgagttataatgttgttttcttcaaaatatagtagagaaaagtgaaaaatgacaaaaattagctctatcagatggggcttcattgaaagtgttttgctgcataatggtttcgactctcgagcaaggaatttgattatgaactgtattactagtgtatcttactctgtactcttgaatggaagtccgcacaaaaagttcttccctcaaagagagcttcgtcaaggcgatcatttatcacctttcttattcctcctatgccaagaagtcttatccaagcttattcttcgagcagaacatgaagggaggattcatggcatcaaaatatcaagagaagcgccccctatatctcacttgatgtttgcagatgacaccatcctctttacaagagccaatgtaggggaagcaaaagagatcataaagtgctttttaatgcgaaaagagaaatgaaacatttatttctgaaaaggaaaggaatgaattgaatcaattacagagtggtatgtacaaaggtatatatacaagagaagagtcggtgggacttaattagttagtgaa

SEQ ID NO: 16256 - DNA, 5501 bp, Cannabis sativa
  modified_base (35)..(39): a, c, t, g, unknown or other
  modified_base (2530)..(2536): a, c, t, g, unknown or other
  modified_base (2742)..(2763): a, c, t, g, unknown or other
ttgtttttataaaaaaattgtaaaaatataaaaannnnnaaaaaattaaacataaaaatgtaattttttttttaaaaaaataatacctaatgtaattatctcttatatattatttggtggttggtattatactttatacttacatttgcacgtagtttggcatgaagagtcaataatgttagaataatagtaattacacataaaacttcattaaaatgtttcctttcaatgagggatatcaagatcaattaataaaaagttggttccttaattggtctagttatagtgcataaaaacaaatagtactttggcaaagcttaaaatttcattagtaaatgtagtttgctttgacaataaaccataactaaattggtgcttgcctagctagtgcctgcctaacaccacacttttcttctaaactttctattcagtccactcaatatttacattttcttttattattttagccccccacattgccctttttttttttcttttagggggtttcatctccaaactaataactttatagatcataatccacccttgagaaagctagtacacaatctcctcaacgcctccctatccggctcgtgttcatccaacttggccttcaattcctcagattcagaatcctacaaaaatcgaaaaatattagcaaaaatacacataatcgacaattagggttaggattaaaccgagcatttggacatacctcaatgaaatcgagcttaacaaggcgatcgattaggtgaagaagtatgtctttggtgtattcggggtggccttggatgcccatcatgtgatcaccatatcgaaacatctccactccagtcttatcagaccacgcaatgagttcagccttcggaggaagttcccatacctaagattttttttttcatacctaagttttcgggataataaaaagaaataaaaaacagataataacacaaagagacattgtttttgtacctcatcgcgatggatttcgtagatggagagtaagggtggtgttttgagagattgaaaaagctttgatgatgatgatgaagatgagaaatgaacggttctgattcctatatcccaacctgtcattgaacggcctgattttcctcccaatgctctacttagtatctataattacaattaagaaagaacaaaattataaagacattactaaagttaatcaaattgatagtgattcaattatggagaaaatgaaatgacaatatacatatcattcaaaaggaattaaatcaaaaaaaatacaaagtaacaaagaaaaggaaagatagtacatataatgtgacacttcaaataatcacaaataataacatcatttgtcctttgacagtgaattgatccacccaataaaaagacattcaaatctctaagaaccattcaatctagaaatataaaaaacaaaacccctttctactgtttatttttaaaagacaagacttataaccaaatcaaataattttgaaatgtttgaaaaatgaaaaataaagtatgagaattattgtataataactgaaaaaaatgataatacataatacaaaagtatcttagctagaatccaattaaattggtatcagtgggagacacgcaatttaattgatgcttgccaccattgcatcataatattaaagtacaatttatataaatttatatatgtatggtgtcatgtaataaaaaaataatcatattgaagagtttacctaataataataattattattaataatatttcaactgttatcacgtttttcaacgagttttaaactgattttgccgacaattttttgctatgtgacaagcatatattaagaacttaatttctttaatgtatcctattttgtccagatcatatgcaaccatatttttttttagctttaataaatatttattaactataattatataatctagttcaaatttacccatctcctcccccaatttaattaacatttaagttttaactcactaaacatgaaaaaaaaatgtggttggaaagcccattcggaactggatttgagtgtaaatagaaataattacactatttgataagtgtaattattaaaaatattttattttaattattcattattaaaaatttatttttctatgtaattactaattattttagtaaaaaaagtatttaaaactaatatgtagtttatatccaaaatagagtgtaatgactaattatacaattgcccttaccaatttctttgaataaagtatacatacatattttaatttctcctcatatatgttatctaattataatgtaatttaattaatttccatattaaaaataaatagagatctaatagtataagactaactcaatgaaatcatttagccgagtttagttggaggtaataaaataaaataaaaaataaacaatttttattctattcttttgtttggttgcattttaaaatattgaaatgacaatcaaatggaatgctctttagaataagtacacaaggcaccaatttttattacatttttacgtttaaannnnnnnttttatatttttacagtttttcataaaaataacatgaaaacaataaaaaaaaaactatataaaaataatatttaaataacatcaaaataataacatacaaataacaaaaaaaaatcaataacaaattaataagataacaacataaaagaccatattttgtataaataaaataaaaaaaacattaaaaatatttaaaattccgtgannnnnnnnnnnnnnnnnnnnnnttttttttgttatttttgtgaatttgtaaaattatcccaatggctattctatttaaaaaaaaaaaaaaaaaaatcattccaatataacaagaaaaaaaattattactcaattttttttatctatttcaaattttactccatttcattcttaatactattccgattctcattcctattattatatccagattagacttagtaccagttttaacgaagcatgcctttttcattttctgtataagtctcaatcaatataaatatagttaatatacacattaaagcattttttacgtgagtgatgtattatttatttattattattccttagctgtcacatgctgaaccacgtgcaccaactggctcaccaaacaacagaccatttgtacaaattaattatttaattagttacaaaaagggtcccaccctacatctctagatcatgcctgatgactcacttagataagcgagtgtaacccactcgaaaaagctcgcgactggatatccactgagataacacaacagaatatactctttttgtacatttaactcaatctggaccgtccaggtcccacaatcgtacggacaatatactccacaccgaaaaaaagttcggattttcactcacacgcgtgacccgagtgacagcattttaaaaattagttattttttaaaattttaaaaaagtaagtaataatcaattaggtggaccaataattctgaatatactgaaaattaccatgataccctcagtccccacaaactaaaaacactacttccaaaaacaaccacattcgtataaatattttttgtttgttatgtttcgagaaaattctgttacatttttagtaaaagaaaaaaaattggagtatataaaaattaaatcttaataattaatattatatatatttatatttaatgtacgaacctggtggccaaagcaaatgcccagaacttttttcttcatggaatcgagtttcttgagaaataataaaagcctggagatccacggttcgttactgtgggcatcttttctgctaccgctaatcacaaacccatcgtacgactccaattcatcttcgtctggatactcgccacgtgtcaccctatacatatcccaagtctccccttcttccttcagcattcttacgaaaaccccataataccctccgtacattttcttaacgtagtctgtatcatctgcgcaaagaagaagcccaaattttttgttcttcttcatcgttgttgtcattattatgctttccattcctctctccctagaattttggctttggagggtgtttggggagagaaagaaagaaggaaagtgagggagattggaagagaattgttcggactttctctctctaaaataaaaaaaaattaagagagagaaagagataatgggttaatgaggaggaagatgaagatgagagaaggtggttttaaagtaacgcgtttatgagaaaggtctttttttgggaagtaattacgattttaccaaacctatttaaaaaaaaaaagaaaataaaaatttaaaattggaaaaattttgatactgttaatgaatctaactcggattttggtcattatttgttcatttaatgtatctttgcgcaaatctttactagagtttaaatttctttttttttttttttaaacatagtatctttcttttttatcactatttttactcactctgtgttgtatttattattgatttttttaaaaaaaaaattatattttgtccttgatattttctacagatttttcttattattttattgaatactagagaaggtgttacacaatacgtgttacttctataattttgctaatattttgtgacgaataagttctaaattataaaatatgacattgtgttgttatggaaattattaatttttaaaagatgtattataggaattaatgttacatttattgaattagtaaaatacaagaacaatattgatttataattttggcagactgtaaatgaaaatttaatttacttacttgagagttgagaccacttgcaaagggtgctttcagcaatctttgcccaatttgtgagaagaaagaagataattatgatcatttatttttttaattgtgatttctctcaacagattgtgcaacaaattcataattggattggcacaattggtcattaaggctcacaattggtcataagtgattgtggcaacaacttttttaactataatttattatatttggcttaataaaaatacttgttttataatatttacatagagtgaatgtaatcgtagatatgatagaatgttagaaaaattaataatattaagatacaaaatttatatataatatagaatactataatatatagaataattagatatacatacttgattttttttttcttttttttgaaacaaagattgcaattttattaatacaaatcagctaataaaatagcttccaaaccaataggaacagaccccctataggaaagacggtcaggaacgagctaaccaattagccgcttggttcccagaccgtttaacaaactgaactgaaatatcaaacatcgaaagagatcgtataagactaatacaatctgaaacaattaaaccaagaggagaaagaatttgcctattattgttaataacattcactaacacgagacaatccgcctccaaacacaccccagtagggatccaaccttcaaacgaaccaccatcaccccaagtttgtttaag

SEQ ID NO: 16257 - DNA, 7760 bp, Cannabis sativa
  modified_base (47)..(51): a, c, t, g, unknown or other
  modified_base (2626)..(2643): a, c, t, g, unknown or other
ctgaatacacgtgtcctttaaagaggagtctggtctcgagtttctannnnngagaaatctcactataacaacaagcgaggtttttgcaagagaatgagcaattatattcttagacctactgtaatgaaacaaagaaatactttaaaatgattttcaaacattagaagtatcattaagcacaacatcaaactcattataatgaacatctttaccattgacaacaagaaccatacaaaaacaatcggagaaagttgtaacattcctgaaccacaaccgaaggcaaaggaaaaggccatgcctttcctacatgaggctcgaaggtaccaatatgtggaaaagcatcataaaaatacaaagagagttaggatttagaaatagaaataaaaaatcctaaagacaaggacaccaaaatttgatctcgtagttcgcccaaatatggttacacctccgtcaagctacctcagagcttgatttgcattcatcaatatcaggtgtacaaatggtattacagcctttctctttttgatttttctttacaatttctctctttgaaagtttcactaactttttttctccttttcttttgcaaatacaatctgagatacacaaaataaagtgttctctctctacagaagctcttttacagtttatatgttcttgaatgtattttgagcttcttttatttttggttgtaagttgtatttcagtaagagtattaaaggcattttaaatacccagtgatacattgatgagtgtacattcatatactcattcttagtcaattattaggtaaattagtatttatttttgtaaaaatttgatgtattttctctaagtgtgtaggtttgtgcctaaaagacaattttgtgattgaccgagatctttgagctaatttttgacagtatttttattattttctctaagagcttaaaaattcaaaataatagagtccattcttagcttttcaaaacatgttaaatcatctcatttagagtccaaacacaaaagttatgcatgatttattgagcaaggtcaaagtaataaaagagccacgaaaaaatggcttgtagcgctatagcgccgattctggaaaaaattatttttcttgcactaaaacgaagcctcgggagtaccgcatggcactatagcgtcgtacgtgtatttttaaatttaaatcctaattctaaattgattctttctattctaaattataaggaatgatgtaatttgatttttaggacgactgaagagatacaaacaagtaactttgagattaaaaaacacattgaaaagtaaaagaaaagagatttcaagcaatcaacatcaactaggattattaaagttcttttcttatttttcttctttattcttccatttagttatttaataatgaacatgattattatggttattatgtttgtaattatgaactaaatactttttctaaagtgttgatagaactattttaaattatgaattaaatttttttatattattctcatatttgttctggctatttgtttatgcaattttgtgttaattatcatcttgttaatgtatgattattattaattagtatagagattttaagtttcacacttgagaaaggtaatctaaaattggtttagaattgcatgatataggaaaagtacgagattgagagatttcactaattctatgagtttcatttaaagagaatcacattgttttattattgcttaattgattaacattaaatagaaatatcttgttaattaactgaagttaaatttattatcactcgatagaggttgatagattatattaaaaattttgaaactacaaattaaaaaataaattaaaataattcataaattttcttgaaactcttttaaagtttatatgttttatagggacaccttaagagtgttcataatatcttaaaactctagattctttgaagcttgattttagcaactcaaataatttatataataaatttacaatttctaattaattatgttaccgatgtgggaatcctaaaattccagttcaaaattttcaaggtgtaaaatcatatccaaacaatttacatgaaaagcttttttgttggggtttgattgctaaaatgcatattaatttctttctctcttttttctaactccatttatgatagagccgaaatgtgtgatagacaatgtttgatgaggaacagattcagatgagcaaatgagtacatgagtataaatagtgagatgatgattatgatgataatgattgttgtgattcaaacaattagagtgatcaagattgaattggacaagtaagaacagagtcctaactttggagccaagatccttttacaacagatcctagaatcttggagtaataactcagttcacacaactttcttaaagaatctgtattgactaacataaaaatacaaacattgttattaggtaataactctactcagctcacacaactctctcaaagaatctgttttggccacgaatcaaggctgaatctaactctttgtgtctcagaatgacagatgtactttctgatacattggactaaagtgactaactcacaggaccatagatgagacagagactgaaacaaaaaatacaagagagagagagannnnnnnnnnnnnnnnnngagagagagagagaaaaaaaagatagagggccgtttgtttgtttggttaatcaaacatggtttaattcatagatctttgggtttaagaaaacaaaagtggaagaaaaatgtttgggtttttagttgttatttatggtcaagttggtctttaattttattttataaaatcaatgtagctagttttattttgtacggctaatgttggctagttttgttttatacagctgactaattttaatttcgtaaagctaatatgactagattttttttataaggccagtatggctagttttggttttataaagtcagtacggctagttttatttttctaaggccagtatggatagttttagttttgtaaagcagttttgatttgtaaggtcaatatggtctaattaaaacacattaaatgtattgtagttaccttcaacaatggagacaagaacatataagtcctagtctttacattagattattatgtgtggcaatttttatataaaattttatattttatcaaatatttaatattaattaattttttttctttattttgtaggtactgtattggtgggtcggaagtcacaactctcaattttgaggtttattttttctaatattaagattttgttgtctagttatcctggtgtatctgtgcatgtccttaggatagacaatggacttttataaatggaaaaaatcttcaattatttgtataatattgttacttttgttattttaacctacctcggtttccctctaaaaaatgatatttttatctaaatttttcaacgacaattttatatttaatcctattaaaaatttgtttgacatctaaaattaaatttcaagtgtcaatttgttttgttttgtaatactaggccagaattgtcatttaacaaatttaagaagtcaaacgcatattcatgataaatagttaaaattttgaatttgaaactggtataaacaaaataattttttttagcggcataagtacttaatattaataaaattgtaattttcatccaattccatcaagatgaacttcgttagtttcttaaacatgatacatgtgaggcccacattttaaattattaggtcaggacagcaacttacagtatcagttatttctaaaatcttctttctacaaattcagaaattaagcctggttataaattaaagatactaatggagttcatattatcggaattaaacaaaaattacaggttttttaacattaagtacttatgccgctaaaaaaattcattaggtctgtgccatttataaagttaaaattttgagtactgaaaatgtttcttttatttaatttggacttagcttatgcaccaaataatcaattaaaaatctgaccaaaacaaaattgtcaaataaaatttaatttagtaaagcttaaaacttttctttaaaacatatttatgatggctatccaatacaattcggatttatttttgttataatcaaatgtaattttttatacaatttgctcttgatttattttctacttagataagatcatctccatataaaaattgtgttatatatttggcaaaaaaaataattttgtattatatttgcattaatttttagcattgtgtatcaataaaaaataaatataaaatgtacatgtaatgcaataactaagtttaataataaaatattaaaaatgatataaaaataactataaaaatagtgcatttattgtgattcaaaatcatgtcatttgtgaattgtgatctaaaattagatcaatttttagtgacaaaatttaaataaccttttgacacttagaataactttttttttttttacaagatgctatattttagcagtaattttttgttttttttttttttgcttcttcttttgagatgctctaacatgcttgttgagttgtaagaactaattcgagtatatcaatcttaaagattttaatgacctgactctaaaaaggagctttgattttgaattgctatgttattgttacaacctaaagtaatatatttaatattaaattgtctactctataatgcttctatattgagtcattgcagtgtgaaatttcaactagaaaagaaagcctaacacgacacataaatacaaaacaagattaaaatctaaaattgaatgttacattacatttcatccaacaacaagaaaaccattattaagtattagcaacaactatttttctttctatttccatggacaaagggggcattagctcattgtattatatgctaaattgcttctatcaaaatcttggtaagtccaaaatttctcaaccaaaatttgcttaaacacaatagaaaattaacaaatgccaaagaactgatcggggttaaaaaaaaatcctcaaatttgaagagagtttgttggtagcaaatcgccaagcacgctcatcgccaaagcctgctaatgaaaccctttttgtctttcttcatcctattatcaagagatggaaaatcaatgaagttgtatgcgaggtccaggacaatgggatttcgtggaattgcctgaaaagctggagggaaagcttcgatgcgtggaacacttttcaccgttggatcgccaaccgcagatccatagctctcaagtttctcaagaaggtatttctccaactgaagataaaaatcagtatatcaaatgtcagcaaaatgtaacttatagtttgctagttcaaagcagatatcagctggctcttagatgtgccagttttgcttcatatgattatttaatgaaagaacacttttgttgcgaaagaaaacgaaatgcagaataaagattaccttcttgtcatctccagttaatgaaatattagatatctttttcgatagattttcaggagccttcagttcttccatgatacctgttgcgtgttctatacatatgttggatctgcactcctcacacaacgtcttcaactctttgatcattatctgctacgccaaaaaaaaaaggcaaaaaccccagtttagatgatagtttaacagttacatttattaggctagctgttatttggtaaaatcttctaaaagtgtaaaactaaaaaacttagaccaaaggttaaatataagtaaagcatggctacttgaaacttctatacaagaaatgcagaagacagtaaatttcaagatgccaaaaaaaagggaaaaaaaatggacgcaagagaaagtgattatgctacgcacctgatcaccatcaccagtagcctggtatttctttaacgcgtcctcagcaagagaacgagcacgacagtacaatgtgtaagcttctgccctcataccagccatactgtatgattttcccaaaaagaaacacctacaaatagaaggtatgattcaaaagttatgtactatcactctttgatttctttttattgtagtactctatcccttgtacttaaggattatatgcatatgatgagatgtatatatatttctctgattaagagagtgagagaggaaaagataaatgtaatatatccttcgccacaaaataattgattagagtaggatactaaaaaaaatatagcttaaatggtcaaacatttcgataatgcgaggaaacatataatagcaggaatcgctacatgagatgggtaaagtagcagcaaggaagaaatgaatgagccgatgctcatgataaaaaatatttttccaaacatgtggtccataaagaccaaaataaacaatcatcaaattattaatcaagcaaaggagatggcagatatgattccactttgaataaaaaagtgatgccagaacaaaaaaaaaggttcataattttaatgcataatagattctcatggaaaaaagtataagaaaacattaaacgagtaaaaaaaaacttggaagagaaataaaatagctatttcatgagaagcaaacctctgggctcggaaggccaaacttttcaattcacagtcttcagcaaaagcaatttcttcgggctttctgtctcttccagaactgactaaatcagacagatcagaagtattctgcagacagacataacaaggttaaaatttggaattttcagcagttagtataaacactatccatttaaaaaatacaataaacaataaattcaaatacataaaagaaattaacctgcagtaagaggtcatacaaacgaacaagctcttcaggtttggtggctttctcatttttgtcatcacgttgcctggtaagcttactctttgcaatgctaaccaacaattggttgcgttcaatggttctttgtcctaatacagcaccaacagctttatcaagaccatttaggtcatctttcgcggattcagaactacctgcactgacctagaatgtaaattaggcataaggtactgaaatcacatcacaaatttgaatatagaaaagagtttccataagaaagaagctaccattattaagataacaagaacaattctacaagcacaagaagagactgcataccaaatcactacggataaagctcctagcttcatgataagcagtaaaaactttgtcaaaaatggcaagttttttctccccgggaagtgaatcagctgttggaccatgtaaatccttctccaaatcctgagctgcgcaggttcaagtccacaaaaaacttgagaacgcttattcagattacaaaatgttaaaaaagaaaagaaaaaaccacagacaatgcagacagctaatatttcccataaaatactaagggcctgctgccattagggaagacacaaatatagaaagtttcaggatggacaatataagataatttttgtagcaagtagtaactaatacaaagataatataatccaacaggaaacccctccaaattattgcattaatgcaacgatataaatactcagaaaacatcctgttagtttatgctactttcccaaatcacaaatatggatcaatgcatgcatagggtgttcacaaaggcacagcctctcagcccatacaaaaaaagatattgaaaaaggaaaaatatacatataactaagtaagttactggatagagaagatgaaagaaaaaagagaagaaatttgcatagtcaatagataacaaatatatgagaggaagaaggaattaaaaggccagagctgaag

SEQ ID NO: 16258 - DNA, 5414 bp, Cannabis sativa
aggcccctaaatcacattatttgcaaaattggtgagtgacgcgctaaatcacttttcggggacttaaacttgaaactaaaagcttccctatcgatggataagatagcaataccctaaatatagcaaaaacgagaaaactagggttccaaaaaatgccccaactggtagaccaattccctaactagaattctagttttgtgggatttcttggagaccaaccggtcgaccgattcctacaggtccccctgaaccagtcgatcggtttagtgcatgaaacactaaaaactccactacaatctcaattcaattccaaaccacatcaaaccttccagacctgcttaatataccatagagagcatattccatgcaatgaaacaccacaacataaccagaatcaaaaattaccattaaagaccaaagtttgagttctaaaactcaaactttgtctaaaaaccaaatcaagccacaaactaacttcaattcagctcaattaacctaattttaacctcagaatatagtctcaaacaacatgaatcactacaggtcctaactcataaaaaatcatataaaacttaacttgaaacttaaggaaatcaacaagagatgagctagaacattactttgagtttgaatacactaatgacttgctagaaatctctgaaatgaggtcgaaaaatcttaaaccctagctagttctagggagctcgagaaagagagagagttgatttttcttgattagtgggacaagattgtatagatatttggaatatcgagtttatgcggggtaaagatttttgactattttatccctaggtaattagttgcttaagtagtaagtaaaggggcattatggtataattgcctaaagttgatattattggttttaagggattttctagagtgcgtgtggtattatagttagttgcactttgtcaagaacgtgtgagacttagttatagactttttgatcgagtgtatgggcgcctggttacaggttgattgtatgtttatgttacatgcttttcttattgagtgtattgactcacatatatgtttttcatgtgtaggtaagggtaaggcaaaggctgagcagcagtgagtcttgagctagatgaagaatgtacatatcagggtggttagatttagagtgttcagaccttcagcacagcatgtgctcagtttattattcgttgagcgacacttttgttatagtgtgttttgttacatttgaaagtaggacgagatcccagaatttataaactctgtactttggttatgtaagaaaagttatgcttattattaaaagtttttgttaatacatttttcaataaaccatttggttagcaaaggcttgcacattaattaggaaaagcattacagtgcacctaagctagtagggcgctacagggtgcattctgcttacgtgtcatacccgctacctcagcttgttgtgctcgcatattctcttgcataattgtgtattatgcgactaacaattataccataccctcagctgtgtgggtaggtgtaattggcgggaaatggccagtgattgctatgggagtcgtcgtgtctcctatgactctagtgaactgtgggaacaagttaaatgggatagtgttcattcgtctaactcctccataaatattatcaacagtagggttcaaacccgaagttcaccattgttggttgagcagtgttttcgttgacattgatgtttttgttatcattctggtttacatccattgtgattttcctccagaattgtagaaatttttgttggaaagaccctccttctagtgccaaatgttttcggagaaaaatagacaacactaaaaaactgcgagtattggagctaagcaagaacacccacgtagagaactgcgagtattcacctagaatggcgaatactcaaaataaaaatgtggtcattcaaatataaataacaaataactaaagaacactagagagttatagtggttcacccagagctcggactgcttagtccactttaggaaaatgatttgtgattagttttattcaaataggatcactcttttatgtatagagcaagtgatcccttagttcataaaactgatcagacaagattattataattatatttaactcagatacaaatgtttaaaaataaatgataagaaaagtttcgaccgttattatttaatacccaaaccggtgcaactattgaagtcgtacattgaccattcatattcagagtaacatgaatttacgggttctctattgttactcgcgtatgaggtctatgaagttctcggggttctttatgatacaaaatgctgcgactatcccccgcgagcgtgttggtcattcatactgacaacacgctcgtaaagatgtgatattctcattgggcgcagggaaaacattttttcatcacacataatcggtatatgtgcgacttatatgttaacttctctcagtcttccttttaccttactatgctacacatagtgggcgactagaccttgttctggtcactccttcttgcaaatttcaaccatatgagaatagtcctaaaggggctattattgacatgtcatcctttttcaactgtgaactgaatccacgtgtcaaccatatatgagtctatgctcgtatttctaggtgaaaagttcatcctataacaatatatgtatatatgtatgatccagtctccaattagcacggcggtcggtgttgatcaatggcggtgcatgaaggacccgactaagggatttggaggattgctacgagaggaatattttcttgaaactcgtttggtgcgttgggacttgacgtgtggctggagtgaagccaagaagctttgacttcgaaaatgtattccacggtcgtgatcgacgaagacaggtcaaggaccacaaccgtgggaatttcaggaaccaatgatgcgacctccatctggtcttacgacgatcaaaggtggtgtggccttgctatgagaaatgagagggagcgagagaaagtgagaccacgagagggtgagggaggagtcgggtttgagtaaaaacaaaatgaaaattcattaaaattaaaaataatcaagtgtttctcaccttaaaacaaaattgccaatgtgacaactatttataagctaaaaagggccctatgctttagatttttttccctgtcctaacttagaattttccattatctttattcctgtttatagacaggcaacccacctttttgtccacatactaaaaagagaaaaacatttgtaaaacaaaataaaaaggatgatcgagaataataaaagtctgacagcacgtaagtcactttggtcatgatttgtataattgttatccatactttattttaaatttagatccgtatgatcttaaaattaaattgtaaagactggaatgatgacaatacttataaaaccttgtttgaccagtgtttcatttcatatgactattatgacgaacttaacctacctctcatcacttcaaccaatcatccaatacaatataaacaataatcaaagcaaaggcttctcaatggtctctatctctacttacaaaaaccatgtgcaattgaattgagccacagtactgctgcagcagggcactgattaagcttccatctgagttgtatttatatccctccattatattaaaaaaagaatctggtccgtactaatatcactgtaactttaaatatatatagattatatttatatatttgcctttcctatttgctatttttcgaaagttacacaagaaatggaggagatgaagagaaaagaaagtgaggagagtcagaagtgggtttatgattcttctgtggattataaaggaaaagttcctcttcgagcttccaccggcgtttggaaagcctctctttttatcatcagtaagtctctacataattttatactctttttcataaacaacaactgtatatacatataaattaatctttagtaaactccttcatactctgtttcccactccgtagtttctctctctgtcttcaagtttctaatgatgtataactagtttcaaaaactgtacaggctaattttgcgtagcttcatttaaaaataaaagaaaactctttatgtagctaacgtttctgtattaataaaaaatctttgcatgtatttttttttttcttttttccatgtgaaaatctgcaaacatgattgtttgggataaggatatcaagtaggagtttttgttaaaaacaattatccagttttggatcgctcaaggcctggctacatgcacagtaccaattaagaatattatatgtatattaatgttatataaggtttgtatttgctgtttgagtaatatttagttgtaaaacacttattgctttggtacattacgtgcagctattgagttcagtgagagactcaatttctttgggatagcaactaatctcataacttacctaactcaaataattcaccaagacctcaatacagctgcaaagaatgtcaattattggtcaggattcaccactattgtgcctttgattgggggcttcttagccgatgcctacactggtcgatacactatggtcctattttcctctttcgtttatctaatggtattgaaaaaaaaaaaaaaatcaaatcaaacttaattaagtcaattcagattgtatttcatgtaccgtttcttgctatagtatttacaactaaacttgttgtattaaaaaatacagggcttgagtctcttgacaatgtcccagttcatcccaactataaagccatgcaaaaatactagtacagaaaattgccaaaatccaaggaagattcacgaactgattttcttccttgccttgtatatgatctcgattggaactggtgggtacaagccctgcctcgagagctttggggctgatcagttcgatgatgaccatagccaagaacgacgtaaaaagatgtcgtttttcaactggtggaatttcgctctctgctgtggaatctttcttggagtgactgtaatcgtctacattcaagactatgttagctggggtgtggcttttcttattcttacaattactctggccatttctatagtaacgttctatgttgggagggctttttttcgttatagggtgccccaaggaagccccttaacaccattgatacaggtcttggttgcagccataaggaaaagaaaattaactactcctttagacccttctctcctatatgaagttcctaagtcaaaaatgatccacggaaggcttctttatcatacaaatcgacttgggtaagccaaaaaaagagtattttattttgtactctttacttttatcacatcattctcatcatgaattgaaaacacacactaaattccatcattattattgattttgtcaacacagagtattgcggaaaaggaaaagaacag

SEQ ID NO: 16259 - DNA, 3921 bp, Cannabis sativa
acttttggaaggtgagtccctatggacttaccaatatcgttaactcggcttaatggaagcagtgttttcttagcaacaaaaaattttgatacacatttccattgtcaacaaaaaattcattttgtattgatttttatgtccctcctacaaataatttaaatcagattagtagcctatatggcacatactgcaacctaaaaaggaacaaacataacatctaagtgtaaaattcaatgagtatgtaatagctaaatactaatagctacaacttcggtaaataatcaagttctcttggaaatgggattgagtggcagttctcttgcaccgtcacacaaccttgtttctttcaggtgaaaaaaaggtagctgttagcagctagactagacaacaaaactaccattgtcttctatttccaagagggatggtatttgatccggatatcaaagatctattgccaaagccaccacctcgtcctctcgagcggaagtttcctcctgaacctagcacaccataaacaagaacagataagcaagttgcaactttcaatagtatagcccagagctacactccaaaagagagccggttttagcaagtcacctccatggccagaaccagatgatcgggccaaagcagacaatgcaggactcactgtctgacctgcttcctgcaggatctttatcaattcccgagcatatttcacattagctagtgtgaaaaatgtgaaggctgttcccttagctcctgcacgaccagttcggccgatcctgtggacataatcctctaggcttgaaggaaaatcataattgatcacaaattttatgtccttcacatctacaaccaacaagaacaaggggttaggaataacaaaataaaggctttaaatctcaaaaaaggagaaaactgcaaacaaccttatccctgcaccctaagatctgttcaaatttaagataacacattcatcacacaaatgtgcccaccttaactttgcagggataaggagcagcttcaccaccgacaattccatatccaaaaactcaataagcatgtgtgagtcaaccgggctgcagaaataaccagctccaaacagtggatgggcaccacgaagtttattttatctaaacactttagtatcaataccatccaggctcctccggaaatagacttaaatcaaattcataaaggcagccacatcataaaccaccttacaacaaccgactttccttatggcaactatacctatggtaatatatggcctcaacattgctcaacgcagaaaaatcaaacttttccatcaatgaaacataagaacacctttagatatgctagcactggagtatgataaagttcctaaaaaacatgagaaagtcatactgcctccaatgaaactcaatagattgcttgctcaggttaaaagcaagatgccatcagatgaacaaaaatataagcagtcagagttgtcgtatatagataccctgccttcgcacccaaccacaatttatgttctcaggaaactggaaagcagccggcgactcgcttatcttggaaaaatcaagacttaaatgaaacataagactcctaaaacacattgatcctaccaagaccccgtgcagccacatcagtggcagtcattatagggcttctgccattcttaaattcagcaaggacccagtccctttctgtctggtttttgtcaccatggatggacagagcaggccacccatccattctcaattgccttgttacttggtcacatcctttctttgtctcaataaaaatcaaaatcttacttccatccatcacttctttaagaagttttatcagcctgcacaaatgagcaagtttccataaaaactgcaaagcataaaacaagagccttttttattgtgaagtagtgccaggataaaagacaaacctattgtatttctccatgtcggtcataacttcaacaatttggttaatagactgatttgctttcaagtgtgtcgatccaatgactacctacagaattagaaaaaaaaaatcaacagacatcaaagaagaatcaaaactagtacatgtcctgcccaagttaaaatcaacattcaacagaccttataaggattacgcagaaactgccttgctaggacttcaacctcccttggccatgtggcactccagtacaatgtctgtcgatctggccggatctgtggtaaaaaggttaactgcagtttagaagatgttcacgtcctagtgaaaagtggcacaatgatctacacctatactatgaattaatataaaaatattttagagccatgcagtccaaactatattttcgtgattctgatttcaattagtttgatcacttcatcggcaacatggatctacaatattgccactatagcagcattgaaattgtttattacatactgaaaggtaaaagaagggttaagatagatttctattttcagtccatagattaaggagaggaaaaaattattgactcctatgaactatggtaatgtagataagacttaaaaaaactcttaaaatgcaactataaaaatgaataaagccatacttgcgccacaattttccttatctgaggctcaaatcccatgtccaacatccgatcagcctcatccaatacaaggtaagtcactcttcgcaaatttgtgtgctgagcttccaacatatcaattagtcgcccaggtgtagcaatgacaatctcaacccctgaataatgttaagagtcattatgttcaactaagagtaacatttcacaagttccataatctgcaatatgttagtgttacctcttttaagatcacgaatttgaggtccttttggagcaccaccatatatgcaagtactcctaacattggcacgtaaactgaacttcacaacttcttcttgaatctgaacggctaattctctagtaggtgctattactaacacaataggaccttcaccataagctgaaaaatgtacagaagaataatcaaaacatataataaattacttagtaaattcaaaacgcatatacatgcacaagattatgtaatgaattctttacccaatcgaggttgagcgctgacatgaaccaaagctggcagcagataagccaaagtcttaccagaaccagtctcagcaatgccaattaaatccctgcccttgagagccataggccatccttgagcctgaattgcagttggttccgcaaagcccaactttgcaattacctcaagacaataatctgacataacaaaaaatatacatatcaatatataagccaaaactataatcacaaaaaagtcgatactagcaagaaatataacacaatggtattcaatgatagaaattaccaggaatattagcctcctcaaacatccgaattggcttcggaatatcgtgcccttcaacagtgatctcccgcctcgaacggtagagcattacttcatgctctgacattgccctgactgaaggactctcaatgtagaaattcttctcaaacggaaccaagtctccaaaatcctgtctaggaagggccacgttatccaattccccttttgaagaagcattaaatctgcctcctcttccaccaccacggccttcgaaacctctcccaccaccacggccaccagaatacccatatctttcaccacgaccaccaccatagctcttacccccagtcccgttgccatcaaaactcctacttcctccaaatctatcaccacctcgacctccagagtcaaaaccccttccccgtcctccgccacctcgacccatatcaaaccgactgccaggtggctgaaacggcggatacccattgaaatttccggcattgggtcctggtccagaaacccctcttccagccgaacctccgtacgacaatggacctccggggcggccatagcttggtcccgttcccgcctgagtcggtcc

SEQ ID NO: 16260 - DNA, 6244 bp, Cannabis sativa
aactttttaaaaggcaatatttttgttagtgggggctatagccccacattgttaagagtaggtccgtccctgatctaactagtgacagttggcagctaaccgaaccgaacaaccatcataactaactcagtaatcaactgttcctaatacacccctcaaacttagaattggtaggctcaccaattgtaagtttgtgtctataaaaagagaacagttgattagaaattggtttggttagaccattagcaagttgatcaaaagctggaacatgttttacttggaccaaatgccgaagaattttctctaggacaaagtagagataaagttcgatgtgtttggtgcgagcatgaaaaattgaattggcagtaagaaggactgtgcttaagttgtcccaccgcactataggaggtttaggcaaagcaatgtgcaattcagtaaacagggagtgcaactaagtaagttcaatgacagtgtgagctaggcttcgaaactcagtttcaatactactttgagacagtgtgtgctgcttcttacattgccaagctatgagattataataaaagaatattgcaaaactagaagtttaccttctgtcattggggtctgtgacccaatctacatcacaaaatgcaatgaactcatagtgatctggttttctgagatgaagtcaatagtcaatggtaccacttagatatctgaaatcctctttacaacatgacaatgagattgcagaaggttggccatgaattgacataatttattgatcttaagcctggtgatgactaagtattgcaaaacaccaacaatatatctataatgctaaggatcgtcaacaagaggaccgccataagctgatagctttagaccactgaccattggtgtattggatggcatgcgattttattgtccagaacctattctactattttcatgcaatttccacccagaaggcatgcgattattcaaagaaaacacattaaacaaagagtttttagaaaaaaccaacctttgatccaaaagcttattcttctgagcttaattatcacttcgaaaaagccctttgaacttcaaaacaatcttcaaccaatgattaaattttgaaaaagatttctcttgaaatttgagagagagtaatctcaatggaaactgaaaatgaaaaggaaaatgaagtaagttaattcatatcccaggggtttaaatacgaataagtctcatccataaggatcttgacacgtggcattagaaaatcaaaagtcactcaatccaatggttatctcaaaacacgaacacgcatgtacgaatcccaaagaatttgatgacgtggtagattgagaaaataaaataataaatgtggctgtcatttcaaaacccttaacaagacaaccaagagtcactgtcatgtgacaaaacaactaacctgtccctcatgaatagttttgctatttgacaaacagttgtcatcgcaaaactaggggcatgtattataatacgaatttcttgcctagaaatataagtacagtctcgtagatgactgacatgtggacccagttcccagtgaaaagaatgacgtgtcaatagatagctccaatagagctaatatcgcttgatgtaaacttatgagaattagatggaatcgagacagggtgtaatcgcatattatgcctcgcatagtaaaaatgaataagtaggaccaagaggatttaatactgaccgcgcatataccaattatatgcgatgatcaagtatgcctctcttgctactagtaaagattgtttcgttacatacgtttggtctaaatgactaatgtgttcgacaactcgacagggacttgcatgttccacgtggtcaacacagaatgtccgactatgcgatcgaatatgaactcagacattcaaataatagacccaaaggccatcctgggagtacaaacaccatagagccttcgagctcgcgtgttggaatatgaacgggcaactcacaacttatcaagtcgcatacgttgctgcacttaattcaagaacgaataaaatttttcttcatttattctttaaatgtttactctaattaaatactgtcatttattgtaaaaacggttctaagtccatcagttatggaatcttaaaagacacttgctttctatataaatgagtgattcaaatcaaataaactaagctgaaatcattatcaaattctattgtcttctttctatttctgttttcatttttatctatttagtagcctaaagtttgagtactcgctattctaagtgaatactcacatatttgtattctaactttatttgaatactcatacaaatttagtattatctaaattcttccgacaacaattatatatataactaggaaacagtttataaatattcaattcaatttagttagaggctcttccatttcgatttgtccctttcagtaagtttaataattagtaattaccagagactactcatgtgttggtgcaaccgaagctaactcctttattattattttaattctttaggaccactaataaggtacatacataacctatcttcagggacaattttctctttttgatttaattttccacattggaaattaagtaacaataatgaataatgagtcaactctatattatctcctttctaaatttattcaatttcatatattacactcttataataataaaccttttaaacatagagtcacaataaccctccccatttgtactattttcttttttgatgtaaatgagtgaatattatcactcaaaacttagctaagagtttctctataagaactcaaaatcccaaaccaattactatctactatattttttttctctctacctattacaaacatcacttttaatctttttgattatattatttaaagtatatactttttgttcccaaaaacatacgtttctagcttcccaaacacagtataccaacatatttaaagcagccacaataaattcactgcggaatttcgacattttttccctctttatacacttcaaacaagcttccaatgtcctctactgaactgtaataccaatacattgtaaaatagagcaaaaagtttagctgttgtacttgtagcagcattgaaaaattaggtgcacatgtgactcattaaacatttgttttctgttatactccaaatctcagcaatctatcctttgtttgaagacgattttgacaagctaacttggatataaaacgatattttagagagctgaaccttaaataagagcataccaagttttctgcagagtatttgaccaaagcttgtgacataactccccatttgtattattttcaaaattataatactatatattcattggcctagtgaaataggatgatgtatccattcaacttctaataatctttttaaaaaaatatttttatatttataccctcaaaataaaaaaatttatttttgttcctataaatttataatttatatttttttttttacatattttcatttttattctcacataataatttattcatattctcaaaaaaattatatttttatttccaatatatggtgcattgtagcacacggcatacactcttttttttttttttttaattaatgtgtatatatatatttatattattaattgtatttataaaattacagtgtatttttttaaaagtggtgcactgatgtacctttacttgtttcgtcatctaagagattttttagtctattttttttatagtcgtgcacattacagttatttaagacatcctataaaatttttaaaaatttgaaaaaatttaacatcgcgaaaaataatgtacctctttaaaagtggcgcactgatgtactgctacctgtttcggcattcaagacatttttttagtcttttttttttttcataatcgtgtatattatatagttattaagacatcttataaaatttcaaaaaattcaaaaaaatttaacatgttgattataaagtttaaactgtcagtttcacatgtgactctttatttggaggggtgcattttagttaattatagtgattttagttaattaatgtaatatattttttttattttattaaaaaaattaatataataataaagaatatttttttagtataatttttagtattgtcattggagtgaaaataatttttaacatcaaatttagtgataatgtgacactaaatttggtgtgctctttagagatgccttaacggtgtagaatttggtgtataatttaatgcattgttaaagtgaaatgatgtgaaaattctataccaatttaataaaatagtatagtaccaatagagataaaggaataaataggtgtttacgtaaatataaacaaaagaaaggagacccacacattaagatatataataactggtgtttgcatggcccatgaaattaaaagtgatatttatattaattttcaatgacccttgacgtaacagatctataatttgaatatcatcaaatgaaagatatatagcatattgtgtgcaagtgcaagtttacatttgaattgaattgaattattttcaaatagtattgataggaaaaagtagatttagttatgattaaagtttatttatatataacggtaggcagaagtgccaagcatattcaaaagttgtgcattgatggaaattcaattggaagttggccaatatctttacctttacaccatttaggagttgcgcagattcaaaatgaggtatcattgattttttttttttatttttttttatctaaaataacaaagataaagaaagaataattatattcatacatacataagtataaagtcatgtgatgagattgcttatgagatggttattgccagccctcgtccctaaatgttgttaaaattagtattgatgaatttaatatgtgattatcctaattggaatgaggatactttttcatatacgagttacctacttatattttttatttaaataggattattttccgaattttaacatatactaaatcatatttcttaaactttaaaaatcgtttaaattttttcctaaactattgagattgttgaatttaaagacttatgttaaattttactaagaaaagtctaatataaatatatatatatatatatataaatatatatgaaagttcaagggtatgatttgacacatgttgaaattagagaggcgtgatttggtaaatataaaaatctggagagcatagtttagtactggacaatcaccgaattagtaaaattgaatgaaattaaacaaaagtccttaaatccaacaatctcaatagtttagagtaaatttttaacggtcagaaaatttaaaaggcataatctagtacatgttaaaattcaaagagcaaaaattctaattagccttattattattactattatgtactctgatcacaatggtgttggttggtttatttaatttttttttatcaactatggtgtggttgaaagtataatgttcgatcccttcgaataaaaacgctgttattttgttttttttttaatgaatttgttaccaactcattgcttcatatatatttactaataatcatataatctactcatataaattataatacaataatatgtatatttcgtaaaggtaaaaggttttaaatagatgaaattgaatcctatgtatccccttcaataatgaaataaaacaaaatgcatgtgcgtgatcatttctcttatttaaataagataattgaatgaattataagtggttctaaaaatacattaattttgtggtcctttcttgaatttcaagccaaaaaagagaaaatcttatgtatgttacatatgtatatattgaaaagaaaggaaaaaaaatagtaatcctatatttattttttcccaaattttcatgtgagcatagtacattacatatacgattcctttctaaggaaaagaaaaacgccatcctaaatgattctaccaacttagaaaaataaataaaattgacaccaccaacctctcttaaaaatagaacattttttcaaggaaaatttggtataaactttaattagcaaaacttgagtttgtcccccaaattaataagtaacaaagaaaactaattgagtaaatagcggcataagtactcaaagtaataagtttgtaagcggcataaacccaatatttatttttagcggcataagtaccaaatgtttgtaaaattgtaatttttttctaattttgtcaagacagactctgttattgtcttaaac

SEQ ID NO: 16261 - DNA, 2569 bp, Cannabis sativa
ttaatttgttttaaaaaaaattatttttattaatatatttaagtggatcactaaaattgtaccacatgtatactgtgtccatgtgaataatctagcatggcatttaatagttaaaattggataaaaatgactaaatgctaatagaatctgagtttgggggattttagcgttaaaaaattaatttttggataagttactagcaaagtgacacttttgacaattcactcaatatagtagtaatgttatttttgcttccaaacatgacacaatgcttacatctcctattagagatagtacaatgaaagcaatggttgaaaggacaaccaagaaaaagggttacactttctttctaatttataatctaaaaatttaaaaaaaaaatcttaaaaaaagaaaataaaatctctattttctctctctgtctcttaagatgatcaaataacattctaattggcatgctttatttctctttctttttcttgattggcaggttgcccacaacatttgtgcccgattagctttcttccgaatcaacccattctatcaaccgatgagtttccatggctaattgggactttagctgcaaggaaagcaaggttcaagttctggaccaggacactagctcgatcgagaactcttcaatggatactcgccaattcatttcccgacgaagaatccctcaacgatgagaaactcaataaagaacttcttccactagttctcccaatcagtccattgagcaaaaatttaacaacaaaaaacccaagtttatgggaagaagacaatagttgccttgattggctagacaaacaaaagtccaattcagtaatttacatctccttcgggagttgggtgagtcccattggtgaatctaaggtgaggactttggctatggcgttggagtctttggggcatttcttcatatgggttttgagcaattcatggagagcagggttaccagttggtttcgaggagagagtctccaataggagtaaaatcgtctcatgggctcctcaaatggaggttttgcgacacagagcggtgggtttttacctaacccactgtggttggaactcaacaatggaggccatacagtcgcagaagaggttattatgttacccaatcgccggagaccaattcgttaactgcaactacattgtgaaagtttggaaaattggggtgaggattaatggagttgggttgaaagaggtagatgaagggttgaggaaggtaatggaggataaggagatggaactgagattgaagaagatgtatgagagaaccatgggagatgaggcctgtcgtaaagccacatccaatctgagattatttgggaattttcttagcaaacaaacactacttgggtcttcatttgttagcaaaactagtttctaaattttatcttttttctttccctatttgtaagtatacattaataaaagtataattaattatattattttttttttctctattataaatcatgttacaacaaataatgcttttttaaaaggaaaaaacataatacttaagaaaaatgtactatttgttgtaaaatataatactgcatacctttataccacagacatgagaaaaataaagtaaaagtgtgatcatactagcgctaatgtaccaaatcctatcaaatttttgtttttaagcgtgtttgggcgagagttgtactatgataggtgacctctggagaagttctcgtgttgcacctttaaaattttatttagccaaaaaaatatgagaaaaataagtgtgacaccatatctctcttatattaaatgtggctataaaacagattgcactattattttttaaacattacaattcaaatttaaactcattagacatatcttaaaaaaatatctttctattattattttttaaaaattcactacacatattttaaaatatatatatatttctattattaattttttacatatcttaaaaaattattttttaaatcactccacatatccaaaaataaatttctattatccgtatttctagaagatagacatgtggtataatctgaaggtaatcaccacttaaagttgggcttaagccttttcgctctcagaaggccattccaaagctagaacatgcccgtgcccaacaaagacctaaaactttgccttgggaacataatgttcttgcaaggcacgaaagcctccttagtcttccaggactcggaaggaatgaagatagggatacacctggagataggccacgcaagatgctcctggatgcctaccacaagatgatgctcagaagcctaccacggaccaggagccatatgtttactggaggataagtactggatctctactgcaagacaggaggtggatatgtttcccctgaaatgacgtgtccacctctttgacatatgatcagatattattccttgtgtaagatcaattccagtgattagccctttatctgtctgttcgtaatcagttttgataaaattactattttacccttctaattacttctttatcttttagtacttttaattcactagtggaagtacaatttagatcccatctaaatttgt

SEQ ID NO: 16262 - DNA, 2750 bp, Cannabis sativa
aaatacacacatagcaattgttatagtttcttgcttagtgtttgtgtgtgaatataatgtattctcataattcaggtggttaaggtagctgatttcggggttgctagagtacaagctcaatctggagtaatgacagctgaaaccggaacatatcgctggatggctcctgaggtaaatgcctcctttcaactgatatcataatgtggcaacagaactcgctcttaacgattttcctcattggtttttgtgatgaaggtcatcgaacacaaaccgtacgatcacaaggcagacattttcagctttggaatcgtaatgtgggagcttttaacaggggaagtaagtacttcaacacaatgccgccgatgcattgacatgtttggttgtgcaattaaggactcatgataacttgtatgttttattaacagattccatattcttcattgactccattacaagcagcagtaggagtggtgcaaaaggtctgtgcattgtttagtattagtttttctttttgataaagaataaggggacgagggggctacaagtgtggctccaaccccgcctaatgaatgttcgccaagaccctacttgacgggtctaaagggatcctaagttagaggtaaaaggtggcaaggttggcactgtgatttgaacccttgaccttcaagtttcaggcatatgccactttacaattaggccacttggttggtggtattgtttagtattagttagttaagttagttattttctgttatatggtagttagtttcattagtaactaactaactaactctctttacatttgtcatggttgtgttgtgctgtgttgttagggtctccgaccaacaataccaaaaaacactcatcctaggcttgttgaattgcttgagggatgttggcagcaagatccaaccgaaaggcctaacttctccgaaatcatagagatccttaggcaaatgtcaaaggaggtatggtattatgctaatctcatttaatttctagtttttgtcccatgaatcagttttaattggtggctttgattctgaaacaggtgaatggaaaagaaagatcaagtgggggaattttttcatccctgaaatggaaccatcatcactaatatcaaagaagagacatttgggggtgtagaaaatctgatcctgtgcacatactgatcatgttgtacagtctttttttttaacatagaaccaaccaaccaaccaaccaatcaatcctattgttctttcttagtaaatctttctctttgtgaatggatttgaacagctttagtttattttagattcctttcttactctgctgtcatacttgtctgtcttcaatgtttacaaagtatatatatcttatgaatatgatgatggaattagtcagcaaattgagccatctgtttcttactttcttaaagtattgctcattttgaagatgtaagaaatgataatgtgtaaaaactcaacattatataacatgagctattcagactcagataattgttacatgcagcttttggaatcactaaaaaagatgtctttgcaaggttaaccgattattgttgctgatgctgctatccccggcaaagagctggcgtgctcgaacactgacctgcagccttgtcatggcattcatacaatgcatagctatgcgcgcctgtttccttacttgccctcctcgaactatggcttgaagcttgacaagactcctcagggcccgaaatgctcgtcttgcctgacaaagtgttgagaagttaaccacacaacaacaacaacaacaacacgagtcatgagatattataacaaaagaagctaagttacgtacgagatggcctcggaattgtgcttggatttcgattgcagccaaatcttgttttgttaaaggcggcgggggaagtgtttgttgtgtggttattgaagctgcaacatctgagattagctgagtggtttcttcttcatgggatgatatgtgagagtaaacaacaatgatgttccttgaagattttgaagaccctttaacaaaatttcttctgattcttttgaaccaattgctacttctagccataatattctcttagtgtgattgagtttttgtattcagaaggtattaaaggaagaaatgaggaattggcttagaagaaatgtggaagccatgtctgtttttttcggttaagagtttatatataaaaacatatatatgtatatacatagtggtatgtcagatactataacgtgatggcatgatgtgatgtgttacttagtataaaatttggaaaaaataagaaaagggtatttgagtttggtagaaatgaaataaaatatttcaattattttagagttatttggtacataaccaaattaaatatatccattatttaattatagtaataatatattatggtttgagtaaatagcgcaactcaaagttttaaatttttaagtggcacaaatttatatgtatttttagcggtataaatatttaaaaggatatttcttaagaactgatactatatgtttttatctagattcaatgatttagaatctgggctttatgcgtgttctgtttaagacaataacgagatctacattaatgaatttgaggaaaattataattttataagcatttaatacttataccgccaaaaataaatattaaatttatattatttacaaacttaaaattttgattacgttattttttttttatattttatataaactacaaaaacaattcaagaacttttacaa

SEQ ID NO: 16263 - DNA, 5143 bp, Cannabis sativa
cacaagctaattatgtattaattatgcactaatggcatcctcttcatatttttgttaccatttaatgcacaataactaggcctatttaatcttcactttttatctctatacctaagttttttacaatattttttctcttcaataatcttaaaatatattttcatttatgtacaaaattaaagtacaactacaactcatagaatatgttaattcgtagtccttttctctaataaaaacctttcactcacatgatccacagttcataatcacaacaaccatgcattggaagaataactctcactaatagattctcttattcactttttactttgtttttttttcattagaggtcttttttgcaaactttggctctgatttttcactcacaatatctctatacacacattgaagagagactgattttgcaaccaatattgtttattgaaaaggggtctcatttatcatgaagtacatcattcagtcttcaccgtttgatcttgttaatcgtgtggctggtgatcataacattaatattcgatttggatctctatctctatcagctagtagtatttaaagacaacaatatcattggttgatcagttcctttcaatcttatttcgacaaattttatcttttgcatttaattaatctcacactttctatatataaactaattaaaagaaattctttttcttgttacaagacaagctgaggacaaaatcgtctttataaattgtcgaaggccttggctttgggagtcatgagagacatagagacacgagtagcaaaatgggacaacctgtaacagagtgtgtaactattacaaaacaaaattggagtttccctaatacccttaaattttcacttcattgcaaatatgcccccagctactaatgtattgtaaattcattttctaagatcacatgctctcctcctaagtcctaactaaccatctttaataacatggatatactgttgtgtacatgtacttgtaaagtatctaataaaagattattaatactagaagcttagatacaatatagaataatgaaaagtttgaggactatattgcaaaaaattgaaaaaaaaaaagaaaaattgtaggacaataatacaacacgtgagctgacaatggtctataagggcaaactgtttaagtgggcaggatatcattcgcccactagaaaagaagaaatattttatttatatttatttattggccccttatttattcatttatttaaaaaataataattttggaatattaaaaagaaaaagaaacttatggattacaataaaggaggtttctttctcttttctcttttcatagttccccatttttaactccaagcaaagatactcttcttcttcttcttctccatagagtgaagagaaaagagagagtttttagtttagtaaagacaataaggaggaatgttatctattgagctcctttgattctccaaccccaaaagatttatagagagagaaataagagagagaaagatgggtggtgttacttcatccatggctgcaaaattcgctttctttccaccaaacccgccatcctataaggtaattacagatggaactactggacttttgctcttagacccttttccacaccgtgaaaacgttgacgttttgaagcttccaactcgccggggaacggagatcgtggctgtttatattcgttatccaatggccacttccacgcttctttactctcatggcaacgctgctgatattggtcaaatgtatgagctcttcgttgagctcagtatccacttgcgtatcaatattttggggtaacttcaatttatatccacctctctctctttctctcttaactcctatcttacttttttttttcctgatgattttgtttctaaacatagaattgtgtgtgttgagatgtaattcatcgttttttggagtgtttttaaatgaatttttgttaaattaacagtaccattctggtatttataaggaaatcttgcgtttgaaggaatacttttgagcttaagttactgggttctgggaatcagaattttcaaaatgcaacttttggctggttttaatgttttctttttttcatttgatgattatttgggttgtttcataatatccagaagtttctaaattgttgattttagctaaatgaagtgcctccccatttttggattttctgtagatctaccacgttttcatcacataatttgaatcatttgatgttatttgtatagatctttttggtttttcaattttgggaagtgataaaggttggaaatttctgatgaacccttttaatccgctagttacactaactggatcaactgatttaacaaagttgggtaattagacactaatgtgagatacaggtatgatttagacgtgtattggttgtcttctgttttcaactttgagatcttagctttaatgggcagagcaaagcttcaaaagaatacagatgaaaagtgaacttaaatttagatggttggagctggtagattgcaagaggcagaaagttagttgagttcttaggtagagttgcctttgtaagaggtaaagacaaacttttcgtattgtggatgagttttaagtcccttttaacataagaatgtaccaagtatggagcaaaacaaatttatgaacttccttctcatgatttgtataattcgctcaaatattcatcgtctcaatgagaaccttgcacaatttaaccatgcgtcaaatggggtcgctgatctccaaaacggtaaaagataataaggctctaaatttaaatcatgttgctgattatgaaagccctcataaactcttataggaaatcagatccaacagttagtatcaagttaataaatctcatgttaacacgggcaaggccttccaacagaggatgctagctttgctttcagaatttttattgcttattgtaaggcaaaaactgataatgcagtgttgaaagtgtcgaatttggaatgctctatgcttaattgtaactatgtgggctccttatttcaaatctttgccagtagcaccgaagaaatgtacttgtaaatattttgactaagaaacaaacaggaatgcaattcttattctcctcacttaaatttatgcagatatgattactctggatatgggcagtcatcaggaaaggtaattgctgcaagaacaatagtcttattgttgtagtcttttttattgatatttaaccgattgctaaggtagatgtatattcctttctgcagccaagtgagcagaatacttatgcagatattgaagctgcatacaagtgtcttgaagagacttatggtgctaagcaagaagacatagtcctgtatggtcaatctgttggaagtggacctacagtagatcttgcttctcgtttgcctcgactaagagctgcggttctgcacagtcccattctctcaggtttaagagtcatgtatcctgtgaagcgcacttattggtttgatatctataaggtcaaaatcttattctttggtagatttcattcagtagcatttagctcttatgcggtttgtatctgaaacctggtttttgtggatatgcagaacattgacaaaatccctctggtcaagtgtcctgtactcgtaatacatgtaagtatttgtagtttgattctctaccatatttccttattgtgttgcataatagatttttcataaaaatgttatggtggtcggcttacttttacattatgattttacattcatgattttaagacgcccaccattaacatcgaatgtccatactatgttgtgctttccttttaactcggttctctcaattttataagttacattccaaacttgcccattttgtacactatcttatacctgtgagcttcttttcgatatcattttgcagggaacagcggatgaagttgttgattgttctcacggaaagcaactctgggaactctgtcaagagaaatatgaaccactatggctcaaaggaggaaaccactgtgatttggaactctatccagaatatttaaggcatctcaagaagttcatatcaacagtagagaaatctccttcacgaaggtttacttcaagaagaagcacagatcgtggtgtcgaacattccagacggagtactgactgttatgaggctccaaggaagagtactgaccggagggagaaaccgagaaagagtgtggacaggcttcccgacaagctaaaattgaatgaatacaagtttagcagcattgataagctagaaaaatatagactctcgtttgatcagatggagaggtcaagaaggagtgtagagtaccatgagaaatctaggagaagtgttgaccaacagttagaaaaaggaaggaagagtgttgactggttggatagaattcgagctgcttaaaacaaaaccacaaaaacaaaaaacaaaaaaaagagagaaaattttggtacaagtttggttcttgggggtaaagtgaacagaaaaaaatagtaacaggggggaaaacgacaacattttatatgggatctaacttgtgaaaaaaagggtcatggtttcagaatgtgtttcatgttgtttttgtaatttgttaaaataactctttcatggcttgtagagttttttttttttactttataaggtgggatttgttattcttgattgttaatttgttagtggaaagaactctaacctcttatgtttcttatttattgaagggaatgatatgaaatttcattgttaataaacattacttaaagtttgaaaatttaacaatttttatttaccccattaagttatttatgcatgtcttcttcaataaaaaaagaaaaagaaaaaaggtaaagcttttgatggggacttcacaaggaggtttaattttggctcactcatgaaagcttttctttatagcttcctagccatacaaccattgtacataaagctcttcctcttcatactttttgattttctctttaaactggggatttgaatttttctttttgagagaactagggatttgaattgaacatgcctattacattattacttctttttggaatataggagcatatataacaaaaggaatttacaaaaatacttcagttttgtatgcaatttatattaaaaatacaacaagggcataaatgcaaatatt

SEQ ID NO: 16264 - DNA, 6010 bp, Cannabis sativa
gattatattagaatatcataatcttcaatatttagaatatgtatattttgtatatctctttacgatttggtagacacatttttagcttgtaatatggtatatatatatatattacctaaaggtgaatgaaaaagatcaaggaaacacattttaccaattttgtcacttacactcgttagtgctctgttaaattctcatcctacacatttccactattaccaccattacgaggtcgaacctctctaacaattctggtgttttctttacttagtctttattttttgttgttattcaattattcttaatcgctttaatttgatttactggcattggctaaaagtgaggtcaatactttatgattgggaatataaccaataaaaacacatggagctgagcgaaaatcaagtttatgttgattatatgcacgaagatgaggaaaacacaaagaaccaaaaacccgaagatgagaataatttggagtgagccaaaaactcgaaggttggaataacagagagatttggtgaaggggaaagtgttggaaaaggatttatggtggaatgaagaggagtgtggataggcggaggtgggattaaggttacatgaggtatagaagaagagggtggaccggtggagacggaggatgaggagtcaccacaccaataggatccattgacgtaggtcaaaaatatttgctttagagaaagactgtgaaagacctctgtatatttaattaattttccctagagagaaaagagagttgcaaataaggtctagacaatactcaagagtcatgatctgaataagtaaaccaaaatacaatcataaagatgatgaaattaacaaaaaacatagttcattaaactaaacttattattcatgtcatgtggcactggcattacaccattaagttgttgagtttaaatcaaaggaattttaattaattcccaccacttatttgggaaagcaccatcattattatccccctctaagcctccaaaagagggtgagaaagagagtttatggtacatattttgggctgtacaaaaatcaaaaacaaaagattgaagcatttgtctaatacttgagaaccttgagttttcccagagatgttgttatgtttccaagttgagtctcaactaggttaggactgtccaatgtaacaacatggtttagaggataattcctgttagcatggagtatacgagaaccgttgccaactcccttcaatataaccgtcttgtgaatcccaccaatcagtccttcataatctgtgtccccacattctcccacaaacaccacagcacttgccaagtccataccccatcgcacataaagatacctgaacaaaatcaaaatcccctttttaattaattcttcttgtttttcaaacttaaaagaggatcattacagtggtataattatatatttacctgagggcttgagctctagaagccgtggcagggatgacattcagcttcgtaccattttggcagagtaagacatggcatcgaagagcttgatatctcattagtttctgtacttccgagacaggaggcatctgcaaccaaaccaggtggggaaaaataatttaagatgaaaattaattatagtattacagaaataaaagagaaaagaggaaccactaatataccaatgaggggtgtttcacttggaatgcatagcactgaggagttgatccagattcatcatgtgaaacaatttgctgattttcattttcatttatattgttattgttattgacagaagaagcccaacgaaccaaagtcttcttcaagtcttgtccaccccatctgtaatcagtgtgtgaacggtagtctaagtcaaccatgaatggaagaccagaaggactatctagttcatggtttgaagatggatagtagagctcactaccactgttgcatataaatgcatcgaaatctgatggtgcaaaacctcctgagattagaagagagtaaatttcagatatggttaaggatgttgacaatatgataccaatatccttttcttcttctttccttgctgcctcaacaattttctcaatgatatcaactaactctaaggttgtgtcacaatccacactgataacaaaaacatgcttcctcctcctaaatgctggaaataacaaatcttctttctcaacatatgatgaatacttttggcttccccctaaaactccccttgagaatgtagaaaaagcgttctctatcctgttctttcgatcacactcgttgtcttgatcgccatctaaattagcattatcaccatccaatgaaagcttcaggttgagtgagaggtcttgtatatctctcaaggaatcaccaggtgattctgatcttatattctcattttcagcatcactctgttgccactgaggctgtctttgtttgcaacttgctattctagttaggtatgtcttacagtgtgctagccaagagaaaaggtgaatatttttcagtccattatgcctacatcttccccagagttgcttatctgaaacaagcttcagaagggcatctgaaattgcttgttgatcatggggatcaaccagtacaccattgtcaagaacctgtcataaatttgagtgcttttgtaaaaataatcataataataaaggtgccaaagaaaaaagataggggggtgaataggtaagcaccctaagaatatccacaggacctccatttttggtggcaacagtaggtaatccataagctgctgcctgttgaaaaaacataaaataataaaagagatcgagattgtgtttggacttcacattaatcaatatctgaaaccaaagttagagacaagaagcacctcaattaaagtaagcccaaatggctcaataaaggctggattgatgaaaactccctaccaaacaaagagaaactcaaatcagttggttgaaatgcttgtttttgcatatgtatttatgtatatgtacctttgtttttgctgctagacgatagatttcagggacatcagattgcttatgacgtttaggatatgcaacttgaccatatagatcatatttgtcaatcaactttagaattgaaagaagcacagagctatttgtgccaggcatttcgtcaatattgtcacggtttcccattattagtgtctatatatataatgaatgtatcagtaggaaacacaaaaagtgagtttgctaggaagccatgtaaaagatatattgaataaccatacaagattagctagctctctcagtggacgacactctccaaatgctttgactagagttgtgatattctttttaggatctggtcttgcaagtgcaagtatcataggcttgcgtggattggaaaagaaacgcataatctgccaatcaaaaaatacaactgtgatattcacatttgtaattattcataaaacaaaacaaatgggaattgggaagacaagagaaagagaatggacactttagtaaatcacctctgaccaaattggtggatcaggggaagcagcattatcttcatttctctccaattctccatctacatccccttcttgaggaactatatgatgaaattccattccaggaggaattacctataaaccaaagacaaatagaaaaaaactaacagaatttggaggaagtacaacaaaaataaaaaaccagtaaaacaaggcaatgttaatctgaatcaataatactcacaatcatccgaggcatgaatcttccatgacaatgaacaccccttttgatccttgctcttaattttcgttctattaccggatcaaagccgtcatacaatcgccattgctcttcaatctcttgtctagtgctggtgatgacaatttcggaggcatcaagtgatagctcctcagcttcaatccttctcattattttgtaagttgaatttatttcttctcttgattgacgtccttgctttaataattgttcaagcttatctcttccgagtgagtgaccggtaaagatcattggcacattcaatgctccagacagaagagcagcagcatcacctgcatcagcataatgtccatgtattgctataggccaaattgattgcccaccaccaacttgctcacccaaaactctggacatatgagtaatgtggacgagagcacggtcaacaaattcaggtatgtgaggccatagaagttcttttgctacatatttgtcttttgggccaaatggtactcgaattatgtatgctccactactctctccaacctcatcaattgtattctcatgagatgttgttgttggatttagcatttctgttggttcaccatatgtccagtccacacctggagctgctatttgtcttgtaagtaaatcaactctgtaaacccctggcattgagcctaaagccctggctagttctactacatacttaacctgataacaaagcaaattttaaactccatgtaagtatttgctaaaagtttcaacttatttaatctgtttggataactatattatataagtattagatgagacattacagcctaaagttacctggccacctgtatcagaatcacgaccaagctccatgttctcaccacgtatcaacccatgaagactgcacaaaaattgcttgttaataagaactaacaacacacacaccatcatgcacacagttagagatcaacatattatggtttgtgtaattcacatatatctatatatatataccttattagcactatgtatagtttcttttctttgagctgcttagccaagttttccattacatcaacagaactatttctaggcattgttcctcctctgttgctgtcaccatgggctgaaatatcactaatagtctctcctttctctccttctgataagtcttctgacatatcagccgttgcttcacggcggcctctttccctttcaacacgtcgattcgccattcgctgagcttcctctccctccagctagtaattaaaacataaaacatacaatagatttaaaaaagaaaaaaagaaaaacagagtttaatttccatatagtaaacatttaattatttaaagaaagagtaatgatagcataattgttggattaagaaatgtaagatcatccttcaaatccatgcataaatatttacaagcagagcatcaaccacaaattccaaaatatatgactgatgatcagatgaaattatgaacagaactgtccaaaactataataataataacaacaacaacaacaataataataataataatataacctgcttctttttacgagctaaattccaaatcctccaacacatgttctccaacctggtgttcctctcttgggggctcctcgtcgccgcagcctagagagagagagagagagagagagagagagagagagaacaggaaacaccattgccatgatttggtgataaaaaagaaaaaacagagaattattgaaacagaaagagggggtgggtgggtgcatactcgaacccaggaacggtatagatcggtttcatcgaaacctgtgatgacttcctcaacgaaataacgagtgggactgaaacgacctctttctctgagaagcagagatgatatggaattgggtttggatttggatttggcgtcgtccaggcctggtcctacgtctaaaatggcctccaagtagctattcacccaatcgttccccgccatttcttcttaattattagtagttagttaatttggtttgatcgatcaacaacctcagtctcagtgttgagttcaaggtgaggtctttatagtttcaaacaaaggagagagagacatgcacacagttagtagtacaatgctattatgctattataatattctgtctactgtttatatcaacttttctctttcaacacacgatttctttacacctatatatattctttagtgaaaaataattataataatccaaatctctatatctattttatataaagtatgtaaggtagtttttaagttaactttaaaataatattctttactaattttataatgttattatatatatttaaaa

SEQ ID NO: 16265 - DNA, 3455 bp, Cannabis sativa
ttttcctattgtgctgtaacagaattttggccatccagtttgttgttattaagaaatctgttaattaagcagattaaaaataatcaagttagttgtctgatatatatgctgaaagatttgttgtgtactgatcataaaattagactcacatttcactaagatgtggaagttgactcaatgacttaggaactggtccttcaaactgattattctccaaatgtcttcaacaaaaaaaccaaatcaaaagtgtgaaagagctaacaataatgaacaaaagaaataattagataaataaatgatcaagtttcacaagagacatacaaactccttaaatcctttagtgaccacatttctggaatggtacctgagagtttgttacccccaagccatctgtaataaataatcatatcattattacaataaacatagctcatttagtagtaattaatgatgagattaattagataagcataaacattaatggtgtcattactacttactacttacatatgattgagtgcagttaaatttgctatggttggagacagagtaccagacagttccttgttagttaaattcctttacattacagaaaacacatgtacaacaattcttaagaggatgaaatctttgtaacatataataataaaatttctagtttaatatgactatataaaaaaaaaaagtttttggcggctaaattctctttttaattatcatttcacttgcacttaattttttaagtttaaattttggcagtaaaatcctctaaactactgaactattagcaaatttaaagtgtcattcagttgattgattccataaaatacttatgtgtacactcttgtacatgtgacacgtttatatttaatattattatttcaaaatttattttaaaattagatgaaattataaaaataaaaaataaatatcataaattttgaaatatttttttgtaatttttaaataataatattagtgttgagaatcatggggttccatctcaaaactaattagtggtgagtgaagtagtccatgttgaatactctaccatttaatccatgtaggacaatattcacaataattaggtatactaatataaacgtgtcacatgtacaaaagtgtacacataagcaatccatgttgccagttaactgtaacaaaaaaaatgataccttaaatttgctaacgattcagtaattttggagagttttattattaaaatttgagctaagagagttaagtgcaagttttagccgcaaaaaactcgaataaaaatacttacaaagcaacaactcgagcaaatttcccttgagaacatgtaacaccagtccatgaattctccttaggcaagcaaggatcgccactccaatctgaaggcggattgttaaactgtctacccaaatccaacattgccaccactaacaatcaccaaaaacacattattaacaaatgagatttttcattatgaaaaaaaagtgattttgttttataacaaaactaccatctttagaaagtgtctttccaccaagggggagaatttgcaggacttcagcagcattaatcacaggtccaacaggcatatcattgctgggaatcaagacaatttcagtctgcccagataatggccattgagttgaataaactgtcacacctttggttgtgacattaagattagcatagaatttgttgccatttattaacacatcaaagactctccagctatatgggcttggagtcctgttgtcctggaaataaagggcaatgtagtagtcaccagtagatactgagatttgtggccattggatttgtagcctctttcctctgctcgttgtaatcgcgttcttgaatgccttttcgggtgggacattccagaattctaaagggttcactttgtgatggctaatcaccacaggatttaggtccttgaagggttgccatatccggttgaatttgtcatctggaaagctaggtgtatataatatatatattatatatatccaacatggatcagagtcttttgaatctccttaaacaactcaattgaaaaccacaatgatcaatgagattatgaaagacagattaaccagtatttcctaatctatgttcttctatatatctagaccttgtttattttcttaatttattcggcattagtggtgtctaagacatctagacatgtcaatttgcgattaactagcgatacttcctaaaagttattatattaaattatataagatccgatacttatagttagagcaatatcaatattaatacataagagaatactagacactactagtactttttagcatttcttctaatttaataaataatacttgttaggagcatggttacgagtttcacttacccaatagaatgatcttcaccaaagcaacacctagccactgtgctaagcgcattgttggcaaaatccgtggcattatacaacgaatcatccaagttctccacctctaaagccgacataaatgggctcgacttcgtttccccatttctagcaacgcacacactcaacctattcgccttagccaaaaccacaatctcataaaacgagctaagcccattggcgtagtcctcgctcgtatcaaccacaccccatttcgttccttccacgatctgatcgaacaccggcggcttatcacctccatcgaatcctccatagtaatacgtcgtcttcacaaggtactttccgcctttaatcacaggaatcgagtaacagaatttccgggcagaggtatctgggaagtaacggagagtggagagaattgggacgaggtcattctgtttgagcttcgttatgttcccggccgaggtgaaaccctcgtcggtaacgtatctcaacccgttgacggtgactccggcactggaagactcaccggcgccgcaatctaacagataccctgttccatgaaaatggcattaaaaatcatgcaatgatcataataataatgattcagaattgatcaaatgattacgtacctgttgggttagtttgagattgagcgaagagggaaggaaaggtgagaaggcaacaaatgggtaggatgattttgaggaggagagacattattatttgaaggaggattcatcaaattgttttgggcataggaacagagaaaatgaatattagattcagtttatgcatgaatgtataattggaaatgacagtttaattatcaacatgcttgatgacctggtcatatttatgatttattttttacttctttatatgctttttttccttttaaaaagcctattatattctctttcaaaaataaataaatgttgattaagttttttattcttcaacttttatatattaaattatgtcccatgaactattgagatggttgaatttaaagatttttgtctaattttagtaaaaaaagtctaacatgaatgaaagtttaatggacatgatttagtatatgtca

SEQ ID NO: 16266 - DNA, 5808 bp, Cannabis sativa
gtggcgctagtgtttagcgctcttctaggtgttatattgatatcggtacaattaagtattgagtccaatataaattaattaaatagcttttaagaaatatcgctaatattgtacgacttagaaataaaaagttttgtaaagattctaatggaaaaaaaaaaaataggtttctccttcttaaatctatagctagtgaaggttatttttattctctggtcaggcctgtcagccttccttgggcttaagtgctgcttagtcagggttatgttttgttgttgccatttaatttttgttatcgtgattagttttgtctttgtgacataattttgagtgttttagttttgtctgtgtgacatggttttgttgttggttcttttttgttcttcaatgatttgccattaaatctttgttagtggttgggaataacaaattttttttgactaaaaggtttgttagtagtacagttacgtagcttacacaatagttgagtactcaagctacgaggttgaacctactgcaatagtttttactgttgtgtcttttggacggtggatgaaacagaatataggtattaagattaactgtgatgatgtaatcttttttatttgattttattttatttttttatcaaaccatcttggaattagacgactgattatttagtttatttttctaattttaatcctggtgatgtcttcgacgaaggaaatgttctgattagattacaagctattattttaactaattgatattaataaaattttatgatttatttaaaaaaataaatatcgttaacgaattgtaaagtgttacttttacgttgtgctagacaccggtaatatccaacaatgatgatttagaatttttaggctgttttctttactgtcaatttgatgatttagagctgaaattttacagatgttactatatatgatatcataaacaattgttctttctagtagtgtcaaagagaaaaaatattttgtttttgtaaactcaatgaacttttgattatgtgcctaaaatgtcttcttgaaatgtatataacataatttttatatatataaatatgtatattatgagatgacaattgaaacaaatttaagaaattgaaatctagtgtggcttggccattggccaatatacatcgctctcactccccaatgcattttttaaaaccctttgtggtgaggtatgagttgtattttctcattccacctaatgtagttcaattttatagagcattcatcgaccactttttaaaagtgatagtgatgtattgcgattaactagtgacattttataaaaattattatattaaattatattaaatttgacacttaattatactaataacgatattagagagtactaagtaccacaagtgccttttaatattcttcaattttaaattttataatagcattgctattaggcactaataatactcaacactcccataaatatatcaattttcgtgactctatggtatagcacacttctatgttacctcaaattggcaagatttaggtgttttatcttaatttttttttttgacgacagtgttcattaaaattataattaaattaacaccctcttgtaattttttgaaaaatttataatactttacaataacaaaattagaatttaaacaacttgttgcacacgttttttttttcttatacactcgtgaaaacaactattttgaactttttattttcttgtgtaaactattcaaaatttctcaaaattttacacaaagttcattataactatactaaacactatcataacttaaaaatcaaaattaaaggtagagaggctctcaataaatatttagttcggccccgcaacatacacagaatgtactcatcaaaatagcctcaaaccactccacccgcacagcgaacacctcactattaaaatatctcaattgtttatatatatatggttccattcgagttcacttttcaaatatgttaatgcacactcaatacctatttgtcccactctcaaaaaggcctataagaaaggtggatgagtttgtaacttattctgtttgtacaaccttagaagggtccattgcttttgtcatcatctttacttagcaaacacatcaaaacaaagtcactctcaaactcaatggtagtcactaacatcacagctcaaccccatgtgaaaacaaagactaatcaaaagcatattttcagatcctcacaatccaatccaatccaaacacacaccaaatgttgttgttgatgatgattctctcatatatcaatcatactccaactaatccataaccaaaacaaaaaagacaccaaaatttcaaaacctacaaaaaaaggtgtcatatctatatgactgatatataatatcctacttgtaatctttggcaaaagagacaagataaataccattttataacttcaaagtgaggtcaatattttcatcatcaccattagtactcttttgtttttcaactgctacttcatggtgattttcctttgttggtggtggtgggaacaagttgtgtaaaggcacaagttgttcggttgatgagccactaagaaacccatgttggaaaattggctcttctacacttcccttttaagaaaattaaagagtgttagaacaaagaacaagaacaagaatgagaaaatagacaagtttagtgaattgttttaatctctcacttgaattgggattgttccaaaattgtgtggattgatgtagtttgggaatggttgataaaatgagccaagactcaactttgaagctgaagatgttgttggataaccgagcgcgagaaaatcttctttcgaaactgtgttgttttctctgatgtttagctttggaactgaagttgggcatgaagaagaagaagggtattcatctctgaaaaatattacaaacacaaaatgaaaaaaaccatgatgaacaaacataacatttgttgttgttatatagcaacatatatcaatataaaggagcctatataacaatataatctaacctaaaatgtgagctgatatgttctggattgaagaaagttacttcatttccatatgatgatgatccatctcctatagttggagtaaaaaaagttggtttctttaagttgaaagagggaactgatggattctctgcaaaggggtattgcctctttttcgaaatcatctgaagaacatattaaccagatcaactactactaagaacataatgagtatccaaatccatgttgaaataatgaaaaaaccagtttgttttcgccttttcggtatagaatcaagttgaaagagaatgaacaagcaaacctcttctttctcctgctgaacatgttgtgtatagttgctattgtagctttggtttgaagggggctctatatgataatacaactgagaaggcacaaaagttgatgatggggcaatcacctacaaattcaacaaattaaaaccaaagaaaactcaccaataaaaactactactaacacaatgagtgttttaaatctttaacagggcaaaaccttgtctttctcttgccaaacatgtaatgatgaagaagaatagttggtataatgtggatccatttgaaagttcacttctggtgccacccaagttgatcttggcatattcacctaaaaacatgttcaacaaaatcaaaattcctatacataaatcaatatcaaagaaaacccatcacttaaagactacctaagtacatgagtaagaacctagattcaaatccaatgtacaaaagcaaaactaatttatattcacttaaaacatgttcaacaaatcaaaattccaatatcaaaggaaactcatcacttaacactagccaagtacaagagtaagaatctagaataaaatcaaatgtacaaaagcaaaactaattcattattcacttaaaacatgctcaacaaatcgaatttccaatatcaaagaaaacccattacttaacactagctaagtacatgagtaagaacctagattcaatccaatgtacaaaagcaaaactaattcacattcacttaaaacatgttcaacacatcaaaattccaatatcaaagaaaacccatcacttaacactagctaagtacatgaatgtgtgtgtgaaaacccaagattcaaatccaatgtacaaaagcaaaaataacttatatattatataccattgaatagtaagggggctgatattggggtggtaatggaactggtggttgtggtggtggtggtggtggtggtggtggtggtggtctttgagccaaatcagaaagagcccaaatggggttgttataagtatgagtattctcttccttatgaacactaaacaactcagaagaacaatctctttgttgagccaattgatcagaagaagaaacaggttgaccaccattcttgatattcttattcttattctgttcttctgatatgattttctcaagctgtgccacaccaagtcctctttgtggggctttgtttttcttctttgatccttttccaacgctaccactaccactactactacacatttgatcttggtaatgatcctcttgagccattataaacaaatctaattccaactcattggaaaaaaagaaaaaaaaaaaggctcaaattcaatggtgttagtaatgtaaaaaccgaatctttaatccaaaaaaattcaacagatttgttttgaaactaatctgaaaatgcaaaacaaagataaacccagattaaaaatcggaaaatttaagaaaacccagttgtttgtttgtcctaaagatcaagagtaacacccccaaatgagaaaaaaaaaaaaaaaaaggaaaatcttaaagatacagtctttatcttgtttgtcgcccaaaacctcgctccactccttatttggatcctaagccgactctcatgaaagtgtgtgtgtgtacagtgagagacaacacagcacagaggttttctctctctaaatcaaatgaaagagagagagagccaataatgggttagagaagtgagtagggaggtttgtttgtttgatattggtttgtgtaaaattaatattattaataataataataatgtcttcttcattgtttatttcattcttgtgggccccacacaacacatgcataattgcatacaattcttcaccactactttataaagtagagttgtacatatttggaaagttatgtgtatttgaaattgagtgtaattaaatggaattataaagtttagggtatttgtttaattatataattaattataggttaaatggtgtataagtatttaaaattttaatttataaacaatttaaatttaatatttatttttaacgatatagtacttaatatttgtaaaattataattttttctaaattcgtcaatacagatttcgttttgaatttattaaaagaatatttaaaagtaatttatactgcatgtttatgtctagactcaataatttagaatatgggctttatatgtgtcatgtttaagataataacaaagtttgtattgacaaaattagagaaaaattacaattttataaactatgggtacttatgccgctaaaaataaatattgagtttataacacttacaaacttaaaactttaggtacttatgctactatttactcttaattatatagtaattatgtaattagaaataattaaatgattttaagtaaattggaggtcctgggatgattgcaatatataaacgcttaaataaaaaaaaaaataaaaaaaaaaaaaaaaaaaaaaaaaaaaaaaaaaaaaagttaaattgttcaatttttatgacttcttatgagaatg

SEQ ID NO: 16267 - DNA, 4761 bp, Cannabis sativa
  modified_base (4716)..(4716): a, c, t, g, unknown or other
ttaatttgcagaagcaaagaatgtgttctatgctaataacaaggtttggggtttccctacattcattcctttaaccaaactaaattacccttgcaatggttttcttgtgagcgacgtttgcacggttgaagcagaggtttttgttttattgattattgaaaatttctcttaccacttcacatagaactttactttagcattattattaaccttaattgcaggtaaggttttatattgaagaactagatgacaaaaagaaatctaaagaagctaataaggttttatacaaaatgctaattaattattagttatgtattttaattagtctacattattataaggcatctaattagtattcatttcttttaaattcgtttcagaagccaacacacgtaaaaactacgtctactttatctgaatatgacaccttgtttgttggtattcaaaatcttttggaaggagatacttttgattcagacaaattcataagcagctttagcttaagttcttcttgcagcgttagagaaattgccaaagcaaaacatacctggaaagaataccttgagcttgatcttgatgatatcatccagttagagaaatatttcaagctcaagaattcattttcaatcttgctaagtaccaattccttaggttataaggagcagaaggtggatgaggtaacagagtttatggctaattttgatagaaattgtgagcagtatgaaattgcaaaagaagagatgaaagaggtcaaagagaaggaaaaatcaatagatgatcttaaaacttgtatgaggcaaatatgttcggatttcttgcgatttagaaaacaagctgaggttcatgataatgaaatagtcaagctggagaggcaattagccgaaagaaaggcgaataaggaaagacataaaaagaggcttgaagatatggctattcgagtgagttctttgaaacaagctttgctcactagtgaagaggattatgtgaagctgtctgtgcccaagaaagaacatgccaagaaagtcattgctgacatgagaaactcgtggaagagttttaaggtataataatttttatcacttaattaattctcattatttaattctaaaaatgctaaaaggtactagaagtgtaaaattaagtatgtgttgatataatttaatgtaataatttcagtatcgtcaaccattcgcaagaggtgctagacaccaatagcaatggctctttgtagaattattatgacaaaatctaattccaatgttaattgaagcaatctgtataaatgtgaggatgaggggtgtgcagcttcagaggtcatacacccaaaactcactgctactaattcttcttcttcctctggtaaatcaaaacgtcagcgtacgcaacctcgggcttattccaataatcaactttaaacagttttttgagaaaaatattccgaaaatgtacaaggagaatgggaagtgcagcggtaagaataaccggtgtttttggatcgacggagaagaattcataatggcagtggccatggctgtggttgcatagtcgtcgaatgatgatgagaatggagagtctactatagcatagctgcataggtagtttttagaatttttttcttttgaccacgagacagttaagtttttttttttgcttgatcgagacgtcgagacagatattttaatttattttcctattttgaaacccaattttagaatgagtaattcaagttgtttaatttccattaagtgggagaattctattcatatttgtttccattaaagggtgatcgtagagtctgtcttttagctgattatgaataaaaattctatattttcttttgaagaaaatggtagtattctcattagtacctattagggctcaatagtacgatatattatgtcgtattataatgtattgtattatatttaattgaaatatatattatattttttatataatactatgttaaattttaatttatattaaaatattatatatttaagtgtccataaaaatcattatcacatatagttttacataaaaatattacatgaaatacaatttaatacaatattatataatacaatgtaataagtcataataattgagctcgagaaagtgttcataaaaccgtccaaaactcataaatcacatgtgtctcatcatatcatataaaaatacagtttggaatacttcacagtgcgattgtagtttgtgttgcgatttaagaattggaatttattatgcaagtcaaaacttgaaggacgtatgggatttagatcctttatccatttcaaccaagttcttttggccaaccaaacttggcgaattttcgaaatgcctaactccttacttaagcaagttgctcaagcacaaatatttttctcaatctacatttttggatgccaatcttggtcattcgccatctctaatttggtaaggaatttgctagggacgtgaattactcatcaaaggacttagatataaaattgggaatagtttttaagtttctgctgcaacagactcgtggatacttgcatgttcaaacttttacccaataaattttgttggtccagtcacgctgcttgtctcatatttcatcacagagacaagagaatggaatctatctttgttaaagactcatttcggtgaaatagatgtggatagaatcttgtccatccctttgagtttttttcgtactcaagataggttaatttggcattacacaactgctggaacatattcagtgaactcaggtttccatctagcttcggaattagatgataaagagatggactcctcttctcactcacatagagaatggtggaagtttttttgaaacctcaaattgccctcaaagattaaaatcttggcttggagagtgattcataatgctctacccgtggcaactgctctgttccaaaaaaaagttctgagttcaacggcatgctcgttgtgtacacaaacttgagagtcgattggcctcgccttattctgttgtaggcatgcgaaagaagtatggaaacaatttcatttccctattgattatggaaaggcacttaacaattggtagatggtgattatcttttctatattgcaaatctgcttagcaaggaggagtttgaaatgatgatatgcatcatgtgggtgatatggactgaccgaaataaattcatacatggaaaaaagagtaaggatggttatgcttttacaaattatatgaacaattacaataaagctaacaataatcaatcccttactactgctctatcttcacctacggctgcaacctcattacacactgctgcaactcccataaacactgctgcaacaaacactcgaccaatagaaggagtttcatggaagccaccgttaccacacaagctgaaacttaatgtcgatgcagccgtcaatacagcaggaaaagtactaggcattggagcaattgttaggaaccatgatggccaggtcattgcagctttatctaagccagttcaagaatgctttagatcagatgaaatggaggcaaaaactctctttcatgcgctaaattggattatacagctctcgctgaaaattgactatgtggagactgatgctcttcgcttttcatcagcaattaataatgcatccttagatttatcttctttttctgatttaattttagatgtccgttgtcttcttttatttttcccaggtatagttgtttctcatgttaggagaaatgctaatcaagctgctcatggtttagcaaaatatgctcttgggttggatgtagacacttgttggagaggagaatttctcctatctgttattgtaaacgatggttaattataataacaatgaaactttctcataaaaaaaaactacaacgctaatttttgtaaatttataaaataactcacatatttataaaataaattttaatttaagttgtaaaatatattgatttaagtcttgaataagtaattactattgagttgtatgtatataatgtaagagttcaacattattttcatttcatcttttctaaaaaaaaaaaaaaacattttttttaattctatttaaaaaaaaaaacattatcttttaattttttatgatctaaaaaaaattatgtgtatatataatataataatcgactttggtttttttttttaaaaaaacaactttagtaaggtttaaaactagtattctgttttagttttttttttttttttttttattttaaattggtgtattgttgaaattttaataatatgtgtattttattatttatttatttgatgataatataaaccgtcatactgtatcttattgcactatttttatagtgtgatttttgcggttttaaaatcttacaatgcactcgcaatttgaaaaattgcaaaaacagatgtacaatttggtttgaaaaaaatagtcaaaatcatcggcgaaaacctcaaaaaattggtatgtttatttctctgtttaaattgcaaaacaagaatggttttattaaattatatatttgtaaacatattcttttctcaaagttatatttgtaaagggaaatttgagttttgatgctaaattttatctttgtttcaattttacacttggcctttttaaaggttctcttttctgctctcttggtaatcatttgaagagggaaatttaaaattctatacttacaatactctaaaattttatccctaaatgcatagttattaaaantggtcatatatgaccacattcctaatttctcaaaaatacccctca

SEQ ID NO: 16268 - DNA, 10940 bp, Cannabis sativa
aattcttaataaatttatattttaggggcgaaattaatgttatcgaaaatttaaagttaaaattattctaaatgaaatgagtaaagaaatccacatatacatgttatagtttcattttttaaaatgttttcttctctattaagtccttatatcgcccaagacggctgaaaagtagtataaaagtaaatattattattaataataataattaaagaaagaaggaaaaaaacaccgttcttggcagctttcccacgaaaacatttaacctttcgaacatgtatagtggtcaacacctgtaatgcttacataccagaccaaaccttacacggctgaatcattttccagctgcttttggtggatctggtcagaatccaagacccttttttgaagcttccctacaaggagctctcgccgctctttcctctctccttgttaactttcaagctgtaattcattggggccatcgctttgagttatttgattggagttttggaactcgtatttgagttgcttttactgttctcattatctgatcgtctttttcatgtattggcactttgaagcaagaaaagtttcatccttctagttcattcactctttcctatcccaaagattgagactttattacaagcaatctagtgggtcggtctgaattgggttatatcgaatcccggaattggtatatattagggcttcagttgaaaaacttgaattggtcagtgacgaaaacttgaagttcaaatggttttgggtgatgaaggggtttctgagtattgtttgtgagaggttgttggctttgatgaaatgatcaacatattatgcgactggaataaagattcaataacatatgggtctcttaaggactagttgtttcatagtattggctatcttgttatgtgcttgggcatcgagaagttcagatgagaagaagagcactgaggcaaagcttctaaggctgctaattgatccagcatctggcgagctaaatggcgatttggtgagagaaaccatacaacattctttttttccattttctccgttttaatgtagtacctagcatatgtgaaagttggtatggctttcgtgacttgcaaatctttatattgattggtattgctttttcatttgttaactttggtgggaagtttaatggcatagtttcacttcacatttatgaaggagaacaaaccatttttaaaacagtgttaggcgaaaccaccaatggatttgatttctgacgctggataaggagcactaataacttaagattaactcacttaactcttttgttcagttttgaatattatggattgcctttgttcattgcctctcatgctctttctctgcatacattcttatgtgtcacttgtttgtttcaagactttcaagtgggttgtgccggtatttgtggattcatgcttgcatctatgtcgtgttactaaaatgtgcacaaatgcatgaaactcatcgtattttgatggattgcaggctgaggaattatggttaaattgcaagttagatttggttcatttgaaggaaactgttaaagtgctaagtttaagcttggcagatgaagctcctagccattttcatgggattaatgcagaaagctggtcacttgccaaagaaaacattcagaaaacaattagcttcttgaatccacagattttatattgtctgcaaacgcacaatcctcttttacgtgtctctggagaagaagttggctcaaagatttggtatcccaaatatctggactccatattttccagagattatgttcctagaagggttctggcttttgaatcactccagagcgttgcaggtgcacctgctcctgctcctgctcctgcagttgaatcacctttaccaagtccagggccagcaccgtctccttctcaacttcctagttctgatccccctacttctccaaaaatgccattttttccgcctattaataacgatccaaatttgagaagcccacctgctaaaaactcaactgctggtccaaattctggattagatgcacaggacgttaagaggagtaaaagcaatcgatcagttgtgattgctgttgctgtaactgcatcagttacatttgtcattgtagcattgctatttttatgctgtggtggatactgtggaactggctccaaattaagacgaaatgatgagagacccctactcagcctaagcttaagcgaattctctattggtatgctgtatgcattcatgttcttgtaccttgttattgctatctataaatctatagcctgtgactagttcagtaaatttttcaggatctccagccaagtcttttgcatatgaaagttcaataaaagaagaggcgcatgtgcatcaatcttctggtaataactcaagtcagaacaggaaggactcttctttggttggcaatattcatacggcttctaattttgtccatacaccattgaacaatactgtgtcaggcgcttctgagttcaaaacatttaatgtacctcccaatactaatgcacatcctcctctaaagcctccacccggaagggtagtgaccacccccatgggaatgccttctatgaagcctccttctggcagggcagatcccctccctcctgaaccacgttcatcttataagcctccctcgagcaagcccagttctcatcaccctccaccacatgtaccaccaccctcttcaaatccctttggtagcccaggtccttctgcctctagaccatctccatcaccctcctcaaatccctttggtagcccaggtccttctgcccctggcccatctccaccacactcctctaatccctttggtagcacaggtcctcttgcacctagaccatctccacctcctcctcctttgcctcctggaaccaatgctggtgctcgcccaccacctcctccattgcctcctggcaccaatgctgctcctcgcccaccaccacctcctcctccaaagagcagtgctcctcctcctcgaccacctcaattacccggaggttcaaagtttgcccgacctccacctcctgctccaaaacactcattaaatgcttcatctagtgaggaaactgacataggtgatgaagctgatgctcctaaaaccaagctgaagccatttttttgggataaagtattagcgaaccccgaccattcaatggtttggcatcaaattaaatcaggatccttccagtaagctgcttaactttttattctttgttcctgctaattactggatgtattattttaaatactgaccaaattattgttttacaggtttgatgagaatatgatagagtcactttttgggtatgctgctactgacaaaagtaaaactgaacctaagaaagagtccttatcccaagatccttcaccccagtttattcagattattgatcaaaagaaatcacaaaatctagcaattcttctgcgggcattgaatgtaacaattgaagaagtttgtgatgcacttcgtgaaggttacttctctcccctcttttctttgataatctcatgtgcttgaaaacagcatgtaaatggatcgagaaataaatctgtctctggaaaatctaacatgcaaaaactgtttttttaagataaacataggcacaatagaagattgattcacttgaagtaattttattcataagtgtatcatcaagaagtggaaaagggatagggagagagaaaaaaagataataagctaataatgagctaggcatgagaattctaattgttgtgttatagaactctcaaaatcacagccaaggacacacacacaacaccagaaatctctctttttttctcaaatcctagcctcaattagagactaagattaacacattacaaagaacaaagaatacagtagcaaatctcccaagagtctaaaactcattattacaacccaacgtcacttatttatacccgtagactaactactgttctagtagaaaaatcttaacagaaacataacaaagtcactaaaatagaactcctaacagaataataaacactattaacaataaaacgactaagctaagtaaagcagcttagcttagttagttatccctcttctcacataagtgaacttcattggagatctatcattgtgatttgtgctttatttttttatgttttaaactataagcattttctcaatctttgtttttttaaattggctccccatcaccgaaccttacaatgttagatgactcctatgatgcatgtatttatttcagcccttagaaattcattaattctgtggtggggaagtgtaaatctaaatagataaaataaattaattcaagcaaataaaatgcatgtagaaactttagaggtggtctgtctggctgtcttttttacttgtgtgtttgaatttgaagcatgagtgacatatctgaacttttattgatgcgcaggaaatgagcttccctcggaatttgttcagaatttgttgaaaatggcaccgacaactgaagaagaattaaaacttagaatgttcgatggagaactttcccaacttggtcctgctgaacgattccttaaagcgttggttgatattccatttgcctttaaacgattggaggcattactttttatgagtacacttcaagaggagcttgccatcactaaagagtcctttgaaaccttagaggtacaggactatgtctataatttgactcagatgaattaattgattttgtgtgtcatcactgttgaattattatattactgaactttctcgtagtgtgagaatatgcaacacaagaaatgtgaagatctgattttgcctacctacactaagatatttactacaatcttctaggtgaactaggttttacatttgccttttctattcatgaaaagattttctagccatctgttttgcattgatgactgtgaccaatattattacaaaaatcaaactgtgagaactcaggagaaaaaaatttctacgttccaacatgatcttaattgtatgattttgcatggatagcgattgtcaattttcttagcttgactttttcaatcccaactggtggtaatttttgtacttcagtggtacttacattgtatcgcctctatggcaggttgcttgcaaggaactcagaaacagccggctattccttaagcttctggaagctgttctcaaaactggcaatcgcatgaatgatggaacatttcgtggacgtgcacaggcattcaagcttgacaccctcttgaaattgtcagatgtaaaaggtacagatggcaagacaactctcttgctctttgttgttcaggagattatccggtcagagggtataagagctgtccgtgtagcaaaagaaaacaaaagcatctctagcttaaaatcagatgaccttcttgaagatgctttacaggattcagatgagcattttcgcagtctaggtcttcaggtagtctcgggtttgggaaatgaacttgagcatgtcaagaatgcagcagctttggatgctgacagcttaacgggaactattgctaaacttggtcaagcattgctaaaaacccagcaattcctcaactcaaacatgaaaagtttaaaagaagatacgggttttcatcaaatgctaaagagctttatgcaaaatgccgaagttgatatcacatggcttcaggaggaagaaaaaagaatcatggctctagtgaagagcactggtgactatttccatggaaatgctgggaaggatgagggtttgcggctattcactgtagttagagactttttgatcatggtcgataaagcatgtaaagaggtaagagagatgccaaagaggcctgcaaaagtacagaaaaaagaaacatccaccactgatcctcaacaacctgccacttcatcttcctccgagcctcgcaaatctcccctagatcttcgtcagcggcttttccctgctataacagatcggcgagtggagaatgatagttcggatgaagacagttcatagattttcaattatggaaggtatcaagcttcttcaatgaaaaacttttgctttaaatcttgcttaggcctctgaggaaatttacatgttgatctgttataatgataattatgatctagtcaaatcttttcttcagcatttttaacaaagtcggcttttgttctttgttcaggtggtttgtatggtgcttggaggtcaaacaatgtgagccccaaatcgattctttccttgagcaccggttaaatacaagctactctatataatagaatgcagagaagaggaaatgaccatgtttttgcggcatggattttggatttcagcttgtagagagggaatccaacttgtgattagttgttagatatagtccaaacattaaattttgtgttttatcattctttgttagaacttagaaatggaaatgttcattcatttattcactctttagggggttaagggttgtatagctcgtttctgaagaaatctttttcatcaatacagaaaattcaaaatattagaagtttttgtcaaagtttttcctgcccaaaatgtttttccttacctagtcccataaaatagcaaagggaaattacattttcagaccttgctcaatcaatataattctcgacaaagaaaaaaaaaaggtgatgattctaatttcaagttgtacgtgccaccatttttattctctaatagcctaagtaaaatttaatttattaatgcataaattaaaactaaaattaataaaagatcttatgttttgtgaaataataaattagattttgtatttttttaaaaatagtgctacataatacactgaattaaattttctgtcaaatatttttgtagtgtaaaaatattaacaatgtacaataatcattgatctagaggtgggtggtttcccctttctatctccatgggtctaaagaaaaaggtaatttcgaagcaggtggtggtggtagtggtcaccgatgctaatgagtatcagatgttgaatgatctccctttgatccatgaaactgtggtgaaattgaattagaatgaagtttttcttgatccttgtgctgagctcgaggcaaatttaccgtcagcgatggtggattgcccaattgttggtgtttcgagtggacctactaaggcttctagttgggcggaggaggtcgaaaaagaggactatcaatcgtctactaaaaatatgtggagcaagtttaaagctaaccaggtgagaactccctccactcgtcttaaatactttgaacctatgaaagtgggggatcaaattgttgccgaaattgatattgatgaggtttaggctgaatcattaatgtggcatacctctatagtttgtattgttctgggtgctaatccccattttagagtttttgaaggctttgtgaaaaaaatttggagaaatttgggttgatcgaatagtgagaatgcattatggatttatcttagtgagttttcgagctgaagccactagggatcttgttttggaggctggactgattcattttgacaaaaaatcattgatccttcggtcatggacttcgaatatggattctgtgaagatggttcgatatgttctagtctggattaggttgaatggtttgggacttcaatattagaggtcgtaatagccttagtgctttagttagcaccataggtaaaccaattatgagtgataaagttactcaagagagatatatagtaaagtttgctagggtgcttgtcgatattgagatctcaaacaatccactgaaaataatatcacacattaatgagaggaatcaactagttgaacaatcaatggagtataaatggcttccctcaaaatgtgtagcttgtgatttattaggtcatatagtggccaattattcaaaagataagggtcttgttgtttgttttgtagtactaaatcaggtatgcagcggaatattagtttctgattatcattgtaccatatgtatacgttaaatttgaaacaaaaagacaaaaagaaaatttatctcttatagcctataaatgtatccttgtatcttttcatatgttgtatccttggatgatgatgaagaacttacaccgtagtcttctagatctttcaccacacacaaggactagtgtaggctagtaggatatagtatatatccagttcttaaactctttttttggagtgaagaaagaaaagagattaacctaattaattttttttaggcttaccaaaaaataatacgtctcaattttttatttatacgatatatttaaattaaaaccaataaatatttatttaattaaatatttaaattcaaatctattattatcatatttaattatttgaataaatatttataattgattttgttatagatatttattttctataaacgattaagggaatctcttaactacttgagagaacatcttaaccacttggagagaatttctcaactactttgagggaatatctcaaccaactaaatatctataactactttttaaatttaatttcaaataaatgtatatcttttgcattaattaattaaccaaaaaacaaatccagttgggacatccctacattacgggcgcctgtcacttaattgatcatagatcatttgatttcaattttgagatggttaaactctagcttaaatttattgcacgagttctttaacttattcgttacaagcttattgtagaaccagctcaatacttataccttggaaactcaatagtgcaattgagtgagattgttaatcgtagatatggacatctataacttctataactatttagaagtgaaatgatatttttcttagagcttggcataacgcgatgagttttctttaaattaattttttattagttagtaaatattaagttgttgtgttctcattatcttataatgacatttatctaattaaaaaaaaaaaaaatagaaaagaagaaaataatccaagtctttctctttcccttttccttgttcggccactacctagaaccaaagagagttagctttctgcatcaattttcttagcaattcaaaggaactttggttggtaatttttagggttgagaagattatagctcaaggggcttgtaaatcgtccagtagcagttttcacttaagttgactgacacacttgaattcgaaatcaaggtaaaattagtataataattacatatatgattatatgtttagcatacatgtttatgaatgcatgttagatagcgtatcagtaatgacagtattagtgtacataaagttgcactgaataccgatgaatatatgtttgacatgtagattgacactatcacatcggtatgtctagagcaccgagtatcgactaatattatggtcaatagtactatcgtacgaacattctaaactcagtacacgtgggatgcgagatagaattataattgggtgtatgggcgcctagttataatctagtttattttatgttatgattatatttttcttacggactctgttgactcacagatattgtttatatgtgtaggtaagggcaaggcaaatgatgaacagtagcaagtccgagctagtgaagattgtacatattgggtagttagaccttaagtgctcaatcttcgagataacaagttttattttgatagtcaataggcgataatttttgtagttaaatgttttgtaatacaattataaattttaaaaacggggtccctgattatgtaaacttttttatttgtttaagtttaaagattaattaagaaatttttaaattattcacgttttttttataaattctttaattagcaaagaaatgcacaatattaaaaaattacagtaacacgcctaatctaataggatgctacaagaatcttctctcctggaggaggttgcttccataaaaaaaatgcaaaatgcaaaagttcaacaagagtcattgtaaaactaaataaataaatagagctcaaaatctttttttttaaaaaaacataataagatataattaaaagtgtactttagtcattaataaatttacacggttttgaaattgaaaagtatagaatgaattgtttgataattttttttgattaattgggtatttaatatttatgtgttttaatatatgcattattcattaatgggtactaaataaatttaagtatgaagattaattttaaaaatattaaaccattaaatttttatctgataacgaataataaaagataaatttaaatttctatgcttaatttaattacttaattaaaaaaaatataaaaaatatctctttttacactatatcaaaaatatgtttatatgaaaaatatttaagttaaaatcaatatttttgccgaaaaacttttttttttttttcagctaatgaactaatcccagcccatataatgtaaaaataagaaatttttctaattaaatagataaattaatcataaaaatttaattttttttttaatattactcattcataaataatatctattaaaagtgtacctatatatttataaatatataattgaaaacaaaacaaattccactcaataaagcaacttaagaatttcatggctagaaattcaagaatctctaatgcagatactaatgcggctttaggaaaaagttgcgaatgtcatttgccatacactaatctttgcttttatttgtgattgtgaaaagaacgaaattaatattgccactcaagagataccccacttgaaattattcgtttcacattatatacaaatcaaaactgaaggcattcaccgaagccaattacaaaatgtatttaccatcggacaacatttgtgatgatagtgttatattttattagttaaaggatttgtccttacaatatatatgtaatctatatctatctatataacatatatataaagatgcgtgatggttttttggttttgattaaattattttatctttttgagcttagtattattttgttttttgtgagttttttttttttt

SEQ ID NO: 16269 - DNA, 9036 bp, Cannabis sativa
tatttttttgaacacgaaagagttttaatttcaattttttttgttttgtttggttatttttattttacagtggcattaacagtagatagcttaaacaatgggggcatttgtcattttaattaaattttaaatggtcaactttaatttaactgaaaagacaaagagcttgtcagtagttggaaaattggtatggctccaacgtttgctttacagctttgaattatgtattctttatatataactttaaataaagaaataacaatataaataataaaaaaaagcatttttctttacagaaaaatcatatttagaaatattttcacatttactatcactgcccaatttattatttaattcacttttattaaatttccaagacggacgcgaaccattttcttaaccaaattttatactttgaattttgcaattaaatattaattgttaatttaattcccctatatttaattatatatttttaatgatttattttattttattttatttttccttttatttttctactttatttatttctcttctttacctgcaaaaccctaaattcacatcactaggaagtatttcagaaatcacatcctaaatttgttatataattatttttttcttttaattcttttacgttttctgtaatttttttttgggtgaaaaattcagagtttaccactgaagctgagttctatgtctaaaatggtggatgcacaagtcagaaaagtgcagaaattgtagctttgaaagcttgatcttacattgaggatgaggtgttggctctctggggtttctgtatatttttttctataatttattggaaccttttgagcttcattttgcccatattgtaagcttctttttcattttgcaattagcttaattttttttttgtccggatttatataaatatatttcttccccaggaactcaaatccttgatgggtcaatttctaaagttttaggggtttaagtgtttctgtaattagttttcttgggtttttggtgggtttttcttgtcttggattttgtatacattagaatggaggaaaaagaaagttcggcttctggggtcgcagtgagtggtgaaggagtcccagatagctatagggtcgccccgagaaacgaaaactcgacccaatttagtggtccgacagtgacagttgcaccagcgccggcctcggcctcagcttcgccggcactgcatagtacggaagggaagaagaagagaggtaggcctaggaagtatggtcctgacggtagtgtggttgctactgcattatctcccatgcccatttcgtcctctattccactcacaggagagttctcagcttggaaaaagggtaaaacaaaacctgttgactcaataaaaaagtcacacaagtacgagactcatgaaagttcaggtacccaaatatatgtgtttctaacattgtgaaagttcaaaacttatatttttgttttcttttggaactgttacatttttcaaaacgttttttttattagccaagtttttcggtttgcttctaatagttgttggggtctagtttgatagtttcgtggtgtacgtttaggattctgcttatttttgtagttttacattaagattttttttttcttttgataaccgggttaagaatgtttgttggttttggtgtggtcgtggacccgtacgattagattccttatcagatctggaatatttaatgtcaatcatctgtgagaaaaaaaaaaacaaccaaaaaaataaaaaagagaaaagattactgggttaactgtaatatgtcggaatctttatgtctctgttcagactagactagaaatgttattctcctaaggtcctaggttgggtaacaagaccgaagctttaaaatttatgaacagagtgagtgattgatttttggtgtgaggtttatatataggtggagtcagccaagtgggtgggtgacaccgactgggattaatatggtttttaattaattgactgttttgttaaaacatgtcttaaaatttgctgactgtgtgtcttgatttttggaactctagttaaaatgggcacgagttaaaggaggactaaaaaaatgacgtggggttatcttgtaaaaattgatacttgattaggcacgtttgtcgttccaaggcattttaatccccttaatagggtttcttcatgacttttctgaccgatgtagtgactagattctgtctgaatggctccataaaaatttgtgtaaccttactatatttcattttaacagtttgacgggaatgttctaagaaatttatggtatgactttgcttctatcttagttaaattaaactggattagagcagaatgactgtcttatattatgataatgtagagctgggtttctaactgtatcagttaccccaaatttttcattttctatcaacttcttgcgtttataatttaaaagtacaacatgccgtaaatttataatgttttgacttgtttatttgatctacagttttgtaagaaatttattaagccacttatatagaattttactgtgtatgcgcttaatgagtttccttttcatttttacatttataggagacaaaatagcatactcagttggtgcaaatttcacacctcatgtgcttactgtaaatgctggagaggtatgccctttacatttaatttatttgaaacaattagttcacattacatgtgattaatacttaatactgttaattaaatatctctcgtgtaactactaattatgttgttctatttctgttagttataatttggatgtttttttggcatcaagcttgtctgaatatctattttatcaccatgttctgtatatgtattatgttgtaactaccaaagcttctgactttttgggcatgggaatcagttgtcattgttcttgtgtgtgtgaaagcaatccctttgtatattgcgttttgtaggatattcttatagggcctttatatatgataagcacaagtttgcatattgtcaagttatgtgtttatatcctaatagtatactgatttatgctatgccttcttgttgtggtaggatgttacaatgaaggttatgtcattctcccaacaaggagctcgagctatttgcatactatcagctaatggtaccatttcaaatgttacacttcggcagccatcttcgtcgggcggtactttaacatatgaggtttggcttttcatcttcagattgtgttatggtcgaattctatatctctctttaaaatttataagaaagcaaaagtatgaaatgtttccagtcatgcatttctggttgttttatacagggtcggttcgagatactttccttgtgcggatcatatatgcctactgaaaatgcaggaacgaagagcagatctggtgggatgagcgtgtctttggccggtccagatggtagagtagtgggaggaggacttgctggtctgttggttgctgctggtcctgtccaggtaccattcatcatttcgtttgaagataaaagtcatcacaacacagcatatttgtaacctctcaatgtttgacaaatattttaatacaaagttgtagcccaatattataaattacatgaccttcgtactagctaacattggatatgcgcacacttaattgcctttctaactgttttgagtgtttcaggtcgtggtcggtagttttttaaccggtcaccagcaggaacagaagcccaagaagcagagacttgagccaatatcagcagcagttataccaagtccagttatcaactccatttctggtgaagaaacaagagtgtcatatggagtaaagccggtggtgacatctgctgccttcagtgtagacaattctccatctctcaatcccattcaaggctatagaaacttgggagctgagattaaatcatcgctagccgaaaacgaatcgaaaagcctaagccaatcgaactgtgaggtttcttgctgatccctttttaatccagtgtgcttgtattgtagtatctttgattatgtctagcagactcgaagacacaattaggctcacacaaaatattgtctgacacccaatattagacttgttggctactgaaggaggacaaaaacaaactacggcttaacttcgtcatgttggtttaacccaaatttgtactcttattattgttataattattattattaggttttaggtaggactttttaatcataaggcttattttctggctgttgtcgccttgtatttctaatgttgatgtgctgtaacatttagatgtatgtgtaccaaacaaagacacttaattgtctgattaagagctttgtatctttacgaacgattgatttgagtgagtgttattctggttatgagtttttttttctttttttgatgaaggattatgaatgaattgaagagttaacatttttctttttgctgaatgatttgaagattaacgttacaacaatcagattcatccatttctctgttcatgattcctcctaatttgtaaaaatagaaaaaaaaaagtcatccaattaaaaacattatattagaaaaatattgccatattgtaatagaattattttgaatacataacatacaatttaatatgtggaataaaatttttgattctacttaaataatttatatataatgtaattactttgatgtagagctatattttcttaatatataccttgaaaatgtagttatatatatttttttataataaatttagagattattgtttgaatagagtattgttaattggagaggattcaagtcaaaactgatatcatttgattacaagcaatagcaaaagcaatcccattaacttaacaagtggggagtttagatggtccagagtccagatattctggagacattaattaacccattccttctgagtactctgacatttctgttagagaaaaatcaaaaagctaaaaaaggaaaaacatttttcctagattacatgttgaaaggctcatttaagtctcgtatgacccaccctacccttggactatacacatgatcatgttctcaacatctctgtcttccattctttgttcacttttttaatgaactcttccactcttttcctcagttcatcctcatcctcatccttactttttcctttttcctttttgtcgttttccccatcattggttctgtcgttttcatcctcttctttctgagcatatatcatcccttcactgattcccacactagtcttgctctccttgtaccttctaatttcatttccatttctaccttgtttcttgaccactgatttggagcacctctctctttctcctctagttttatttgagcccataaggatgatcactatgatcaagttgcaaaaacagaagatgaatagagagtttgaaacaacataccgaatcaagtccagtgtggaaccgtattcaaacatggtttctttggacactgattaacaaaagttgatagaaagagaagaaatgaagaagaaaagacttagaagagttgaggcgtttgttatgatatataagcggcctggtgtgaaagctaatactttcttttttcttctaaagaaaagaaaattatacatgtgatgttatatgttagcatatgaaaggttattctcgactgtacagtgtgatttgtttaattaatacattaaactaatggaaagtcaattacaccatcaacagagagaacctcacatggaaccttctcagcttttcttgcattctcatcatctccacgtaagtatactgacatcaccaaagccttaaaacttttgccgtcttgtccttttgtcctgtacctcttaacaatataaaaatatggtgggagttgttagtagtagtgagtatgaaactttcaccttacgaaaaagatattagtctttaatcacataaaataaacttttatagaagcctagagttttctacctacaatgaaaagaaataaaaaagaactaagaaagtgctatttgtggatagtacgtactcaaatattgccactaaaatctggagatatcagatattattttaaagctaaactatttccactagtatttcagatcttttggagtggaagatatttcaagatattttaagtttcacctgcaacttttgtcaattaaggcctctccaaattattatagcaagagttcatttaatcttaaaattgcaagtaggggggaattttggttttggaaagtgaggataattttgtaattttgttacttttaagctcatgtgtactaaggaataaaaacaaaaggagaaaaaatattgacgacggtgcattatgcgtagttgtttgacaagtaggaatgaagaaaatgacactaccatacatggagggaagcagttagttagaatagaaataaggaacagtctcgtttggtcagtggtcaatatcgtggccactcttatgtgtgccaatagagaatattgttttgcatattttctatctattttattttactgttgcaacacacacaatgcaacaagaaacaaaagcattatattcctttggttttcaagtctttattccttcgaaagttggaaaggaaaagagaaaagagaaaagagaaaaagttgaaaatggcatggtagtactatgctgttctattccaaacatgctctttatttctgccttttcgtctacttttcccctctttatccatgtgactgagaatctaatagtaaaagagactagttaacagcatattgtgtccttcattaatttaactaaacaactaaattaaatttcttacatctttgaacatagctagttaccctaaaaaaaccatagagttagccaaacatgacttgagaggtactatcctttctaaaccaaattctaagaacaacacaatttatgagatataaaaaaaaaatgaagatttcccaattcagaacagccacaattcagtcccatatgtgcaaaaaagaaagaaaagaaaatcttcatcttcattgggaagttcttatcagttcttctttccattctctgtttaccttctgaataaagtcttccactcttttcctcaactcatcatcatgatgatcttgatcatgatcatcatgattaccatcatcgagatgatcatgaaacttttcttcagcaccgagttctttctgcagatttgagacatgttggcaaaccacctctaatacatccctctcctccatgccgagaccattgtgttttacagcctcatcgtcatgtgtgactgttttggggatggagaccactgaaagaggaggtgcatggtcactttgcttttggtcatgagcagagttaactggttttgaccccaacaggatgatcactatgatcaaattgcaaaaacagaaggcaaatagagagcttgaagcagtttgactgatcaaatccaatgttacatccaacatgatgtatttgaaaattgagaaatatcacagagaaaagggaattggagattgtggttatgaataataatgcatatagatataggtacagagtgttggcatatttggtaacgttaaagggtatttaaaggcctcatgtattataatatttaaagtgtagggaggaagcttttggtgggtttaaaatgatgatgtttataaaatattaaggaaaaccagacaaaataaccggggaaaaaagaggaaaaaaaaaaaaaaaattaaccaagtgtgttgtgaaagtttttggcagaagaagtgggaagtttcttaataattgtatggttggcggggtactttttgtttatatattgtaaagttcgttgtaccatacgagaactcacatgggccctcccttgttttgtgtcttccaatggactcaaactcacctaccaaagcaaaaatttactaactcctttcacttttacttcatcgtgatctttttctgcctcaattttcatacatgtcagtgacgacaattttattttgttttgttttttcaaaatattgatgatgtgtgtttgtagatttacaattgttttaagtagagactagagatattagataagatcaattaaatatcaaatgaaaaaataaaaataaataaaagattgtgttcgaaataaagtagatttgtttagtgacaagaagattatcattgaccttacaaatcacacactcttggcactatctttttcatcaaactgtaagaatagtttagtaataattttttaattaatattttatttttagaattagaaaagtgaaatacttttaaaattatgttctataaaaatatttttatttttcaattttttttaattgagaatcaaaatttaaatttttttttttaaaaaagttactttcaaaatttttttaaacagatttttttatcagtattttagactctgaccccaacctagaccttggaacccggactcgaactcaaaatcagactccgaccaagacccaaaccccgactaggacctaaacctcaaactcgaaccctggacggagatcccgacccggactcggaccctgatcccaactaagactgcagacccagactcgaaccctgggcccgacccagacttggatcccgaactcagaccacaaaccccatacccgtcccggacctggaccccagacccgatttggacctcggacctgacccggaccccaaacacgacttaaacccaaacccagacctcaaaccttagactcgaacttggacctgacccggacccccaaacacgacttaaacccaaacccagacctcaaaccttagactcgaacttggacctagaccccgacaccatactcggaccccagacctaacttggacccgcaccttggatctgactcagaccctggaccccagcggatcaaacccagacctcggccccagaccctgaacccggaccatggacccaattgttggaattattttaccaggatgtagatttactaccatgtatgtttttaacatccttatatgaatttctaaaacattgtaatttaaacacataaaaattatgagaaaccttacagtggatgcaacggaattaaatgactcttttcacttacatctctaacccttgtatccttt

SEQ ID NO: 16270 - DNA, 6342 bp, Cannabis sativa
ctgaaattggttggttttgttgtatggtgatatcaaaggcattgtacctttaccttgtacacagtattgtaattggctttgagggtaaacagctggagtgagaaggcaaccgcatgattcaggaacatatttgagttttctgcaaaatgaggacaattgtagaaataagtacagtccctacccgaacatggttttttctgattcaaaaaataagagaagcaatgttcaagaaaaaaaataatagaagacaaaatatgatataaatatacatagatatatatatatatataagagtttaattagtcctatctcctccttacaaattcactcaaccagttgagttactctctaagtcttctaaaatttaattataattatttttatatcataaatcactcatctacttcgatgggcagccattgaacaataatggacatcaatttgaagatttacctttcagattaaaaagattgtattgggactgttcagtccgagccgactgagaaataattttaggtgaatttcatatcaagccagaatccatgtcagaataataaaaatatctaaatgtgtaaattccaaattaatcaacaaacagtaattgcataataccaatcatatttacaatgcctctggaatgaaaataatgacaagctggtaggtatagcaattgtgttaaagtcttgcaaaattgaaggcagttgggcttcatgtacaaaatattgataatgatagcaacttctttcccatgattgccaatcaatgtttggtttgtcaatagtatatagcacataaactaccaaggtgccataggaaagaaaagaagattggcccaaaactcaccagttagcttcaatccgtcttaactaccaagttcagttgtgatttttaaaaatctttgaaaagcaaagggtacctgagtatcagatgttgaaaacagtagagcaaaccaccttatgagctgctaatgggggaaagaacactagattccttcacattcccatttcccacctctgtattctgaaactgagttgattggattgcctacatgaccccctttcttatgattaactgtcaagagcccaggtctttgtaaacgaaaaaccaacatacattattgcttgcttttaccactgaagctagacaataactcaacaattcttgacacttttgccaaaccattttgtgagcctccgatcaaactgttttccctgatgcccttgtcaatctcagtaccacctgatggatctcgaatcaactcattctgtttaactcgagactcatgcttggcagcaaatgcaagtgtagataagagtgccttctgagctgaatgtgcagtgtctttatggaacctggatgatgaagggtcaggcgactgagcaagagaaactgaagaagatggcaaagttttcgaggttgtgcatgaatgcttctgttcatccaatggatattgtctcccgttaacgctactatcagagccatcatcgcagctgaatggcaactttaacttatccaaagaatcattaactgaggattttctgaaagagaagaagtttattccctttggagtcactgcaggttgaattccttccaacatcaaatttgattttggagctgagttagtttgattaagcataacagaattgtcagaagacagtttcacactgctatccccacttgatggcgtgctcactaatgttctactgctgaaatcatcctgttgacttcttccaaatgaaagaaaatttactccctttggtgctactatgggtgcacttttgtttaaaatctcattggaattctgcactatgcctgatccatgttgttcaagatgattcccaaccccggcaccagcaattctatttggagataaaatttgttgtttgagcttaacagaatctaccaaaggcaaactcccaacagagagaaagttaattcctttaggtaccgatttttcttgtttcaaaaatgtctcatttttgttctttccagtattcttgtgagaactaatgcccgtagagaaggatgaaacactgaaaggctgctgacaggcactcttttctttcagttgctccttaaattttgaattattcattaaggttgcaactttcttctcaggttccatagcatttgatgaagttgtggcatcctccttaggtacaatctgggtataaatttataggcagtaggttaagcaattggatataaaaagagctaaatcaatcattttacacaggcaaaagaatgtaccttgtgtgagaacatgcaattgtcacctctgctgcaatagcctgcagacgcaaagttgctacaaggatactttgagagttgatgatcaaacggacagtcatcccctttcatgcaagaattacgtgcaaaatgacagcaaggctgtaacagagagaggaatgttaaaagaactgtgatatttgcattgacctacgaagtatgggagaaatttcttaaggtgtcaaactgtaatatcaatagttctacaaattatgtgaagctaaatagaaaaatatttgccaatggaaacaatttgttatcaaagtgtacttatcatattataagatacattgttacttaaatagtgtgagaaagcacaataacaagaagttttaattaatgacaataccttggattttgtcaaaggtactgtgtcatgcgaaaatttgcacttgtcaccctgtgaaacacaaagaaactaaggttacaatacagagaattctaaaagcaaaagcaaaaggaatcgattaactgattacttctttcatgttatttaataagttctttcataattatgattaggctcacgcatgcaactgacaacaagcaattttctagcaagtttcccaacatgcacatcaatattcctctgtcctagggtaagcacaaagtgaaactatgaatcaatggaaacatcatagttcgaataatgttcaatgttcaatataagagtggaagatcataatcccaaggggtggtctagtggtacagaggagtgttagaaagtgctggatggcatttgaaggtttgaatccccacagactcaaataactcttgaggccattgggaggtcttccggtcgaactgccagggccaaaaaataaagagttgaagaccatacctcataacatcttcccaccataaagtgacggcaataagaaacagtcttcggttttaatattggaggcagtttcagccttttaacaccaagctttctgttattttctgctcgtttcttttgcttctgcaactgtagagttgtatgattgatcaactatacaactaacaaaaaagtatacaaaaaaacaaagagcttataccaactagaatataaaaaaataacaaactattttcagataagtgcagaggataaccacatgaagtccagtaaatttttcttggaagattacagattttaccaaatcaaataaggtatgccaacaaaactttgatgcacatgcacatatataaagcaaccacataaaatagaacaggtataaacaatacttttttcttagctctcctttcctttgtaggaagcctccgctttttcttaccactgtcttcagtggcaggctgcaaatgatcaacagtaaaacacacggttatcaacggtccaaatataggtataaaataatttttgaccagcgcaacaaaaaaatgattcttagtatctagttagaacaattaaaaagtgctgaacaagtacttaatgtgtctaaggttgcaaatcaacgggaagtgcaagctatatacataaaatgtatatacactgtaaatatataaatacatatatggatatgtatataggaaacagaaataaaactttatttctttacagtttaagcaggttatcaaaaaattagaccctaaacattactgcaccgaaacaatatactcaacactgtgatgaaaaaaaaagtgaatattaaagaccagaaacctcacacggtttgaaacaaagattcctcaaacactaaatgttagcactcacaaatgacacaaagtctattgaaagaacactctaaaatgacaaaaagactacaactattatgatggcatcttcctgctatcttattgataaaaaatctatcaacacttagaaagaagacaaagtctattaatagaacaccctgaaataaataaatatcaatacaactctattcatagtaacttcctgatatattatgtgtattggagcagttgcacaaggaacaaaacagtctatacataataatttaaaagacagtaaaacacatttgatgtttattcagaaaagaaagaaaaacacctttgatgtaaataccttgtcatgatctgttgcatcctcttcaattattccatgcaatacaagcttattacttccaacgatattgtttttttcaataattgtagtctctagtaaagcatcatttgcatcgaccttactagccctctgcaatatttcgttcacagaaacatcaggtttactaacagctttagttttatcactttccttgaatcccattccattattattgtcaaggagaaagaaagtggactcagaatctctttcagtggctactttacaggataactcttctttatcaggtatagactcctcgtttactttgtcaccctccaataacactgcatcctgcagcaacatatccattgaaatatcatccacggagaacccaccagaaatttctccctcttccatatctacatctcccataataccacaagaaactgactcgtccaatttaatatccttaagtgacatttcttgcacctcctttaatgcatcaggttcccctgttgtcttgtcatcgtttccattattaacgcctgaagtgtttgccaatgtagttttgttaaaggaggaggcttcagaaaaattctcaccgtggaactctgtcctctcagtcttccctgcttcaataatggaaacagatgagttattcaaatccatggcagcagcataattaagttccctatcattttgttgtcttactgtaccagcatccaagactgttgtattcaacaaagatggtatatcctcactattctctcttcgaacaacactttcgccaataacaacattattcaaagataaagccttttgactcacatttacagacatttcgctatcaatttgcttactgtccacatgttctttttggttattaaataccaccacttcatcaatgccactttggttttgaaccaaagaaactactgggggctttgaattgttatcaaggacagtgtcttcacttccttttacaatacactctaactcatctattaacactagttccgggccaaactccggctcttggaaatcactagcatccttttgatttggcaaatcctcattttcatctattctcatcagcttatcaatctcatcaattgacaattgttggctatgcctactatccagagagcatttatcatcaacatttaaattcacttctgtgtttttatcagatttcaaaccctgaggctgtgtgttatcactaccaaccaattcaacaaactgagaagcctgactctcggttctttgccccaattcattactgcccttctctgtatacagaagaataaaatcaatcatagaaaaataaacaactaaagctagaaaaagcacaaacaaaaacacacaattcgatcctgatcatgaatgaaaaatataacaaaacttccatgaaagaagcaatcaattattcgattacaagtgaagctaaaaattgtagaaattcagctgttagaatgaaaattcggtattcagtgaccaaacgaatccataactgagttggggtttgagtgttttataccgtttctaagatccttgtgaagattatgagtggaaggagaaggttgtgagtcgttgtagcagtgagaaaaaattcgaaccaaagtaagatatgtttggctttggaggtgtcttcgacggtgaggagggaaatgcagtagggcttcggatgttttaagtgtttcaatttgtggttcctccactgccatcgctgtcctgtacttttatcaaatgtcccaaaaccctaataagaagaggaaggagggttttgtgaagtgtttcgctcacaccaacaagatggtccctggtcaggctcaggcgtttttcatgggggtcggcgtttcgattgcccgttgttgcttttctttttcttttctaatggcacacagtgaccattaatggtaaggtaatgaattttgttgagaaagggtaatgaattttaattatttttattttattttagggagttatatttgcacctcataaaattataaatacactttattattaaaaaatataagtttaaataattt

SEQ ID NO: 16271 - DNA, 3184 bp, Cannabis sativa
  modified_base (2562)..(2563): a, c, t, g, unknown or other
atgacctgagtctttattaaggaaaggcctactgagaaatatctttatggtgactacatgaaacatacaacaatgaattcaagaacagatgacgaacacggaatacatagaaggccaaacaaaaagacgtcctgttgccatcccaagtcatcaagagccactagttatatgaatttatgataaattaatatcagcctatcaccttccttataacctgttaaaactctcgaaggcctaacaaacaagtaaaaatcatatgcccatcatgcaaggggatgttaggggacaatttatagtgtctctggtaaaatatcttagcttccgggagtcatcaagtaattccggaattttacaaatccaaactccactccacaccagaagaaccatgcccgttcaaaaggggtcttagcatataacagaatatcaaccagcattgcatcaacataggcatgtcataaaattactaaggcacagtatttaccagccgacagtgtgccccatggatatgaggcgtaaatcaatgttatgtaaaaaagacgaaaaatatttggaaaatgaaagaatcaaagaagatgatgaattccagatttcccatatttatccctgcagaacaacaatttggttcaaaggtctaaaggaaaataactcatccagaagatatctctacataataaatcaacatacaaacgttcaaaacttcattgctcacatctgccaaaacgtaaaccaaaagaaaagaacaatttaatcctcaaatcccaattgataagcagaaaaataaacaagaaatgagaaacgcaaccacaaaaatacatataacgatgcattacctctaatgtgggtcaagaaatcaataagaactgataacaaaagagacaaaaagtaaccaaagaaagaaaaacaggaagaagaaagaacgcttatacaagaaaacccatgtccaagatcttccattttcaacactaaatcatgcaaagaaccaaacagaaatgtggtttttgagagcgtcagagatgaaacccacctcttcaatccgagaaagattgagttgaagccgattgttgatccatgtaagtatctcattcctcccaacgaagtaagcactgtccatcatcccaatattcgtcgccatttccccctaaaattcccaaaacccaattccgatttcccttcaaaattcaaaattatggaaacggagagatgagaaatgcccaaaatgtcggtacattaacaatggtttttcgtttattgagcttctattaaggaaaataacactcagataagtgaacggtggaggtatttaatgcaaaaataaataaataatattttttttatgttgaaaagggttaggttggttggatttggcaggcttggcactctttactttaataagtattattttccattgtaaatgattctctaggcactccctctctttcaacttcactcaatagccaattgtttggggatttttttttaatgattattaaattgaaatatatatatatataaataaaaatagtatacttttatttaaataggattttttttttttgaaaagttctaatttcattattatatagcaagaaaaatacaaattacaacttaaaagtttggtaaaggatcatttcatactaactttttatccaaccctaaaacaatcctagaaattgtatgagctaagacattagcatctctagaaatgtgacacaatacaacattgaggaagaaggataaagaggaaatgagatcaacaacacatcagatggatttgttttatgacataaactcatctaatatctaccactattttagaatccaattctatatggaaaattggtagctccacaacatagcaccaataaattgagatttcctaagcaatagtttcagccattgttaggtctaagactcttgttattaatttgctaagaccagctacaacacctccttttgcatcagtaacaatagctccaaaacctattttacctttttattgcatcttgagaggcatctacattcaacttcaagcttccattaggaggtggtttccaaacaaccaccttactagcaatttgatttgtagctttttgtgcattttttatgcctttgagcttccttatccttttggaaatatgatgatacccagctaatgatattcccaaacatatgattaggtaacccaaagagatgattatttctgtgattctagattgcccaaaggagaccaaaaagcaattcataatcatatctatttttctattcaaagcaagatgaaaatccgtttttaatattagcaagtgacattaacaaataatttaattaatgtggaactgttataaaattatttgaacggaattgaaatctgctctatcaaaaactgaacctaatagatcagaaatatactgtagaaagtaaaattgcaaaaattaaaattacacacaatattttgtacgtggtatcagcaatccttgcagattgctactagtccactgggccacacccaaagataagatcattagtcagatttcaacaagtacaaagtaattgacttaaacaaannatagactccctctaatgattttgctgcaagcttgatgtactcctttttgttgaacgaatcttcttaagacactaagatttgaactcccttcaaattacttgatgaatgcttgcttcctcccgaagcaagacttgtagaaatattctcctgaagatagcggtgcttgcttcctcttgaagcaagtcttgtagaaatattctcccgatgatagcagtacttccttcctctcgaagcaagacttggatgaatcttctcccgaaggttgttctttatattcttcactatggaatttacttcacataaaagtaattctcaaagacacacaaactcaccaaggaatagcagaacaactatcctttacaaaagaaacactctcttctaaaaatataagaaattaaaaagtgaaaaagttcaaccttttgctactggtttatgtcatatttatagtgataaataaggttccttaggtcaccctcacgtggtctcgccttttcacttttgtacctctcgtacttggcatccaatcaacgtcggaggtctgcagtagaccagttatcctcaaaagttccatcaattgtccttctgtcctagttgacagaattattggaaattattttacca

SEQ ID NO: 16272 - DNA, 7628 bp, Cannabis sativa
  modified_base (3600)..(3619): a, c, t, g, unknown or other
  modified_base (6088)..(6094): a, c, t, g, unknown or other
aatccaatccaatctgcaaaagtacagatttgatcggttattttggattagttactttttaatatttatgaaaaaaatattttttttacataagtactagcaacaaaataaagtaaagtatagttatgttatgtctccaacaacatatatatcaaaataaataaaataacaaattacaaaataaataaaaaagtaaagtacgaatttaagccaaaatatgaaatcgagctgacctgtttaaaaaatacggaccgacacgaacaaagcacgatatgaaaatattgtatctattctttaaaaatattgacacgccacggcacgatctgtattttttgttgcacgatacaccacaatccgttttttaaaaaaatactgataaatatgagctgaaccacgaacttacaacatgcatgctacttattctattaatatagatgcaggagtgtccaaaggccaagaatcgatatggcagaggtgtggttgtgagaaatgatgctggtgcaatcacttaattatgctactgcgctacttcgcatatactggtgccagggccttcggataggcattgcaccattttaaaattgagacagattgtcttaggctattagattggtgcacataggggaagatggatatatgcagacagagagatgggttagtggaagaaattaagcaattactacaacatgatactgtcattgatttagagtttatcttccgagatgccaatcaggtcgcacatagtttagtcaattatgcatattgaccaaaattactagtgttacctagattagattactctccttatgctcttatcaagtcgtgtggtatgacttgttatttccttgatttgcaattttttacaatattctttattaatgtaaaataaataagacttgatatattaaattatactaataataatattatgtaaaattcgacagatacattttaatatttctcagatgtttatgtacatatataattataattaatatatgttttttccgtaatagaaaagttaatgaaaaattaataaacaactctcagatatcaaaattatgaaattgaataatttattttgataaaacatatttctatatattgaattaataatcatgcatgaaagaagtgtttatttgcatgatgtaataatatataattgctgggttatgatgatattaaaaagataatcacatagatattatttgagtctaaaacacactgacacacatgaatttgtgattaattagtcgatcgatcaattctgatgatgagcacataccatgccacatgttgcaaaccttaacatatatcccatcccttaagatatatgagcctatagtttaagtttaactatatatatttatattataatgagagtactattaataatttaataggtgagacattgttttttggaggggcattttcccctatttatcggtacgaaatgggtttttataataatggtaatatttttacagcaaagaaatgtatggggattgattcgagtgattatgagagacgcagtgggtatcatccatccacgtgaggccccgtggacactttctccatccaatacacacatacataatatataaatatatatatatatgagtattttttattgcacactaataatatctatcttttagaaatggagcttagtattagttattgatattttttaaaatttattacattaaattatatgaaatttgaaatttaattacattaatagcgatataaccttaaagaggatgctagtaccttttaacatttctcatatatatataaaaaaaaatattaaaaaatatgtgtttgcctaacatatatgttaatattattattagtataattaaatattaatctcatattttataataatattccttatatatatagtggagtggctatactagtgctataatgatttaggtctcaaatcttcccattatgactgcgcccatttggggaggcactttcaataatattatgtctcaaaagcttaattcatcatcatcaccatgtccctccctccttctattcttttatccatctaattaatttgcttccacctttattaatattgttaattaattattattatacaccccacctttaattaactcttactattgacatatctctccatgaaaaaaaaaacatgaatgcaataaaatgttaaaaacatatttataattttcttatatatatattatacaaacataacacttaataatatataggtggaaaagaaaaatttaaaggacttcaattgagaaataaagggctcattaattataggtacttctgttaagtgaaaagtaggggcaattagaacaacacataattagtctctgtgagtactactgagtacgtacaagtgagaaaattcattggcccatagcttcttaattaagagttaatataattgtgcatttatgggaataattaaattatatattatatatatatatatcagtacaaccaccaacatgaaaaccaatttaatttcattaacactttcattgaaaaaggtggagtcacatattataaaagtcatatatttcagaaacaccaagtaccaaaaagaagttccgtacgttatttcagtctaccaaaaaaaaaaaaaaacaaataaagaatttatacgtgcaaattaattctaagaaaattagaagctgaattaatacatgcatggaaaaacgacgtgtaaggcgcacgtaatatattaaaattacactaattactatataatgacttgaagttttgaatattattaattctcataatattatattaatttagttagtttattgtaaaagggcagtaccgatcgcgattcatcaaattattaagtaatgtttcataatattattaataaaatagctataaagggatacttaaaaattcaactagcccaccttttgggttagatggggttatatacatatatcgtgacttcttggatggaatgtctgtttgtgtatattgctttgcccttttttttatttaataatataaatatgataattaataataacaattcatggcttccactaactatattttaattcttcatttatttgttatgattattttaaaggtggtacatgctttttcttggaaagtccttctaatttcgggaacaaaaattgggagtgctagatagagaactttttttagtttgagttcttcattttttacatttaatttttttttatatgtttacaaaaatttgaagtttttcgaccaaatcgcctttgctatatatatatatatacattttttagggttccaattttgagaattgattgtgaatttggggaaaagggttttggggggtttttttatttataaagaaacgtttcttgaataagaagtattaaaagaaccattgatatgtaagtcatggtgtcttgtcttttgacatgtaaagttcgtattggttttgagtgttctattttgttcttcttttggttctttggtagagtggtaccatggcacctgacatggttgaagttttaaccattaaagaggcattaagttggatccaagatcatgaatggcataatgttgaactcgagtacgatnnnnnnnnnnnnnnnnnnnntattcgaagtaacatcaccatggtttcgccttttaggggagtgatgatggactgtcgaaagcttctatctattttaaacaatatttctttgttttttattaaacgatctactaatatgactgcgcacaactttgctagagcgtcatattcttttccagaccaagttttcagtgggaagaatgttcttactgaattacaatcttgtcttttggctgatttagcaaattaataaattccaatttgcattcaaagaaaaaatacatataacaacccgcatagaagttactggagcaacccgaatcgtaaattttttttttaaaaaaaaattaaaatatgatatgtacggtaatttctttttttttttttaccaaacataagcatttaatttttgagctattaattaaggggtaaaaatattttggatctcgtattttgtaaaagttattgattggaccatctattttgttaaatgataaaataattttttaataatttttttttaatataacttaggggaaaacaattcctagcgcaaacagatgtagaaaatataatcacttttgtcattatatctctagattaagttattattaagttttattttgataaaaaaaatcagttcaatgtcttatttgtacttttttaaaaagtacacggtctattttattatttaataaaattgaagatctaatcaataatttttactaaacataaaatttaaaatagcatttatctttaattaattaaagtagtgaagatatatacacaattaattaattaattaattaattacaccccgaatttgggccttggctcgtgcacatttttattgtttaacatgtggatatagtatagaaactggagctcttgtaaatatttaggccttgctactctccattttgcatgatatgggaggagacttttctttctaattattatttaaaaatatattatccaagtcttaactcaatcctagggtttagtaatttctatagagaatatattaactgtgttggcatttagaaaattttgtagtttaattttttattaggctaattagtaatttttccccctgaattttagcatgtagtaaatcgtgcccctgaatttttttagccgttgaaaattctcccgaactattgagatggttgaccagtacaaggacgaattttatattatataaatctccggcccttgtaagaaaaatgtttaaaacttgaattctcaatcaaagcccactctaaagtgggtcaagttaggtatcacacgagattaatagcccgaatgtatttaagttcggcccatcataaacccagcttttgaggattatgccgacatattttgggacttggttctttattttaggatgatttaattcatttataactaaataaataagattaatttactattatgatcttttatgtaaaaacaacatatataaaatatgtcatatttttttgtgactaggtctaaaacaatatatataaatatttatatatattttttaattaagggtctaaattaaaattcttaaaaagtgaaactttcaatttcgagaaatttacactacttacggattttgttttattatatggaatttcataaaagcataaacaacataatataaatataaagcaacataaaaatggcataaaatcattatattgtaatgtttttaagaaacaaccgtttgtattttggtataaattacttcaaattagtaaaaatgtagatcctcatttttgtaatttctttgacttttttagatatttataaaaaaatttccttaatcaaattaatgtgtcctcacatgagaatttgagtgagtttttcggtgactaatcacatcgcctcaacagtggtacttcaatgagtcatttgaggtttgggattgagtctcgaatttgaatttgggcatcgaggtctaggtttggatccaaggtttggggtcggggcatgggctcggctttggattcgggtctaggtcgaggtcagaggtctacaccagagtttggggtccgagtcatagtctggtttcaatgtcggggccagagttcaagttcgagttcaagtttgggtccgagtttgagccaaggtctagtgtttggactaagggtccagagtgtggggtcgggtgtggagtttgggtccggggccaagtgtatggttaagataatataatttcacacatcttattaatgtaagttaataccaaaaacataatatattgtattaaatagcaatacaatacaatacaattcaacacaaaattttataatacaatacaatctaacacaatattgtacaatataatataatacaatatagtgtaccaaacactacaaaaagtttaacttttagtcacaacaaaatttgtgactaaaagtaaaaaagtggtactaattataaattattgttattcttatgttgtgattaaaagatttgtaactaaaagtattagtcacnnnnnnnacaatttgttgtgactaaaattaaattagtgacaacttgtttctaaatactatgttataatcacaaatactaatattttgttgcaactaaaagttacatttaatcacaaaaaacttatattgtgactaaaatgttgtcactaaaagtaatattttttttgtagtgaaatgaaccttaagcatcaaattgacagttgtgtgagagtcaagttatgtaagattgatcgagaaataatgtttttttttcttttttcttgctgaaatgatagttggtaggaaaaaggtctctaaaaaaatagatcacaaagaagatattattaatctatatatatatatagtactactggtcaaataataaatttaactcattatgtactgaatggtagttgaaatatatggacctagcaaaagtagggaccaaatattgaaaacgttttattacatgatcatatgatgacttgaggtttcggtttcgaaaatggtgttgatctccagagtaataagcatatatctatggttgaatgtcccctctataatttgttaaaaactccttgttttgatatatgtttgctatgattggtattggatgtgtgagctagaagacattatatgatattcatctagtttaattactaaataggtaactttgactaatgatcagttgtgagagtttgatgtttcaggttgagattgtatttcttggagtttggagaattgtattcacatatgagattagttgaaacaatttcattttgagttacaaattaagcgacaattaattagttggttaggcttagttttagttcttaacttcttgcttttgcaactaattcttttgtaaatgttaacttagaaattttttctagtaatgtggacatcaatatttgacacgtggcaagaaggataatgtcatagagctgtgagtagacccgagccattgtaggagactctagtcctgcgtccaggttgacttcgtgagttccaaaataaaagtttggacttcaataacttgaatgcaacttactatctttcagtattctgtaccatgaaggcatgaaacaacttaatccaagttctgaaagctgacactacaaaaaactattacttttagtgacaattttttagtcacaacgtaatttttttgtgacttaatgtgatttttagtcacaacaaaatattacttatgactaaaacatagtatttagttacaagttgtcactaatttagttttagtcacagcaagtattatgactaaaaacacatttagtcacaacaaattataatttttgtgactaatacttttagccacgggccttttattcacaacataggaatcatgatgtataattagtcataattttttcacttttaatcacaaattttgttgtgactaaaaataagatcttttgtagtgtgaaattacacgaacttgcaatccgaaagttaatctaaacacctagaatttcagccagtgcccaagttgatatttccaactagagttttagtttctgtaatagtcttagtgacaatatgtc

SEQ ID NO: 16273 - DNA, 12603 bp, Cannabis sativa
agatcctggtaaaataattcccaatagtcgaacctctataaaatctcgtgtcttatttacttttctattcttattgtgtaacacatggcaagcattagtaataaatatgacttttctgtcggttggctaaatctgaggtcaacagtttggtgctttctttgagagcaagttctcaatttatcttatcaaacaccatggttaacacaaggagaactccgactacaacttctgccttattgggtcttcctcaagaccctatgattgcagatcctaatgtccgtattctagtcacaactagaatctccacgaattagacgaatgtggccaaccctatcatctcaacaggcaccacaaacctgaccaccacgattggtcaggtggacactaccaaccctgttcgtcttaatggcaaacctttacattctagggaggatcctccactggtgtctcctactaaaagaatggccaacatggagcaaccttcgagtcccatgactagatttggtccccagtattatgcaggagagacagggccaagaattggtgagcaaaccattggagaaccttatatagacttgggagaagatctcgagttagccaaagttagagaggtcgtctgtcaagtcagcgaaacaaaagaaccaagcgctgttggttgctatgcatttgcacaacagagatgcaaatttcttagatggatggatggccaagagtacatcctcccatctcatcaggcagaagtagatcaccataacaaagaagctagtgatctggtaaggcagttcaatgaaagaactgccagaggaggtcaggatctcatcagagatcctctccaagggagactaattgacagatcaaggagagactatagataaattgtccaaccaagtttctctagaactaggaaaaaccttccccaacccgaaggaggacaagccttaccacgaagatttggtggcgagaatagcaagactctagaaaccattggtctggggtgtcaactagggatctctggcacaatagtacccctacttggcaaacctttggccaaccagcaccttagtggtgcacctctggctggccaacagggtgaactcccttcccagagcttccaggaggaagtaacccaaaggccaatctttaacttgctaggctcaagaatgggtggaaacacctaagataacaacaaattgagaagtaagaccaatcacttcaaatactgagattcatctaactccagtaattagtgtggtctacaccatgtcaacgcacaggctccaccatcctgtcaagtaagaatgggcggccaggccctgcctagcatagggctggtcaaccatgaacaactcccaagctcagggatgggtggccttgaacataccctttcccagggtatggttgaccaggctctagccaatctagggttgcagctcaataaaccaagcccctatagcaatagatccttctgtgcaagcacagttgagacatgctcaagggcttggctagcccaaaaccataaaaccttgatctagataggtcaagggattcacctttctcagcatacatcaatgccttgcatgtgcctaaattcaagatgccaacttggatgatgtacacagagaaagaagatctcatagtacacctaaaatactttgagatccaaacatatctccaacaaatatctggagatgtccgatgccaaatcattccagcaactctggctgaaatagcccaaaaatggtacttcaagctggccctaagaagattcaattcttgggaggaattctccggagagttttatattcaattctttgcgtcaatataaataccttcacaactgaaggatcttgttgaaataaagcaaagacaagatgaacatttgaaagactacattcaaaggttcatggctgatgccatcaaggtcaaaggcctaatagaagaaggctgatatacgaccatactcagaggcattttaccactgagtgacttttggaaagatatcagaaggatctcaacaagcaatatgaaggagttccttgagcgagttgatggcttcataaagttggaagaagctgtctacaagcccaacaagaggccaatttaatgccgaacagacacagggcatcatagttccccgagtactgtctaacgtgctggccagtgcagacaatctctgccaattctccaacaatgagaatattggaggcaagtgcaacaacgatggcgctgaccaaaacaatggaaaaaaagggaaattcaacgattaccttatgccatgaagcctatgggagaaggaggagaagtgggtatgcttcactctcttacaaaaactcccaaagcaatgcatgcctaccggccatggtgacatgtgtcaccaaaacctgaaaatgcctggctaaccactcaagagaatcattgaggctcggccaatataaggccacctgtcaaccaaaaatggccataaaaggccaacctctcgctagcctcatggttaaatataaaagctatctccccaaatctctcaagattcaggagaaaagcaagagctagagaagaagcaagaataagagcaagacaactcaacctagaaggtgcggtggccacctacccgatacaagcatggcacttagaacacctaggggcaatggctgcacaggcaacaaaggtcaatttcaaagcttccaatagcaaagctgaatatgaagctctgattgctgggctcatgctagcacacgaagcgcgggttgaatacctaaacatatatccataactctcaactagtcgtaggttatgtcctaggtgaatatacagcttaatgcagaaagaagatggcctatttgagctaatatcaacccttgttaagtcagattaaaggttgtactaaaaggaaagtccccaaagacaacgcaaggaccgacacacttgctcgactagccagccacgccttgacaaccaaggctaacttggtacccgctcagttcttcaaagaactaagcatccttatttcaaaagaaatggacatgctagataaccaacatggatacacctatagcaacatagctcttaacaaaaaccttgccagaaagcagaggtaagggggatagctgttgggtatccaattctgaataagataatgcacatatttggtatcccaataccacctcaatggcaatcatctgggggcaaagccaaccaaatgtagaagggatcaaaatgcatcatcgacctggcctccaaaaggttggccaacctggctaacctctacctctataggatggtcggccatggcatcatctaaatggccaggcaaggttccaacgtggctggccacctggtctgtaccctggatggcccaatctgccaacagtttgctctcatacttttggtctactgtgaccaagaagtaaaccacatcttactagcacaatcccttgtcaaaagggaaaaaagaggagaccaagccaacttaaagcggcatgtctgccatcaaaaagttgccaggcactttgaacaaatgagtcaaaaagagaaaattcttcgtaagaggcttagtaatataaagaatattccttaacaacaaagatcctatagcaagcatgttcagataaaactaaaaaggtctgcaccaagatacaagataacaataaaggtgcatacaagcctggcgagtacaagaagaacttggagttggctcttctaccaaaatacaggaatggagaacagctcggtaagtgctctcactagccaacttgtatggtggttcctctaacatttcactgtgtaggaattcacaaaaagctagtacccatcactcttcagcgatggcctcccatcactctttagtgatggcctttgcacggtaagccctacagaggtaacaaaatataaaagaaccagtacccattacttttcaacatggcctcccgtcgctctttagtaatggctctacttgaaatctcaggtaggggtagccaaaatgtgatttcaaaagcgaacattaagttgtaagtttttgttacgtgtaagatcaattgtgtctaaacaacttgctaacaaagataacttcgtaaagttattctttttcagttccacatgcgtacacccggtatcactcccaagaaaattcccaagcaaggtctataaaacttggtaaattgcaagtgaccaagagactgtaagtctatgcactcacttggggggcacccacactgtacaatgcatcgaactagcacaaagaagttatgcagagaaattttaatgcttagtataagctactaaacctgcctctaggtcaagtgcatacatactttagcttagcataaagaaaagtaaatttggatacttacatgaaaagacactaagaagacagctaggacagtcatatgtccatagtaaaaggctttaaggctaaacaatagtagtgttaaaaaatagagtgcctataggccaaaagcaataacctgaaagcctcaaggccaaatatgagtaaaaaatcaattcaaatgcataaggttatggccccgtaaaaaccgtacagctagagaagagccaggcagagttcctataggaaccacgtaccaggctaaatctctaaggcaaggtagagttcctagtaggttccaagccaaaaggcagagttccttgctggttccaagccatagataagactttgggcaaccatacccaagggtacttgtcagataatgtcattgtacaagggtaggtatcaacaaagtacaatcttaagtgtaacaacttggacaaatgttgagtcttaagttgagcattctactatagtagactcacgattaagtttcatacagactttctaagagaaccaagtatgcgactaaggctgtatatgcatataaggccatgaaacaagatttttgccgaggtcaaaagaggacagaatactagccactcgctatgaaccaaggcctgggtcagccaaggttcccaagctttgagagggtcgtccaggatcctatgactaagccaagaaccagctagggtcaccaaacctaggcatgaactagctagcctcctagggtgaaacaaagttggccaactaccatgatttaatcttatggcgggccaggtctcaaacaagacccctaaggccgaccaaggttagttttgaatcaaaatatgtgttttttcaatactcgagagtgttcttcatgactcaaagagtcaagaatcacaacgaatgccgaaatagactcttttccattaggaaattacacattatgcattcaaaaactatcatgaaaatcaaaataccaaaaagattacaatctaatgtgcgaaccaaagagtttttaagagctttaaaaatttgaaacttattaatggtaggttcaaagaagagatgtcaaagaaaagaagaagatgcaaacaaggagagagaatatcaaagatctaaaaccatgccatgaaaaagccaatacttggttagacaaggctgctcgactaaagctactacagttaagatgagagctggaaagtccctatccgactagatatttgaacagggacttgggggcaaatgttattccaaatttttccacctgatgtggcatgtccatgtaagctaagactgaggacacgtggagtacaaccttgtcaatagcaagacaaagtctccttacaaggcatgacagaaccgtcaagcaacatgtgagtggagttaagcaagatgtcaagaagttgcacaactatgtctagacttctaaaatgagtacataggccggccatgatgagcttgtatggccggccaaggtttgagcacaggctagccagccaattgtgactttcagactaaggaggggtccgttaagccaaggaaacttgacctctggaaggaaaagatgtacaaaggctggccaacacctgcaaagggcggccaccacctataaaggctggccacaacctatgaaggatggccaacacttgccaaagctggcaagaagaagacctgccaaaccctggatcagcatggcctcccagaccctggaaggaacatggccggccagaccctaacttgcagacattatgtggtcgaccaacttgcacctagcaggtgcatcgccaaccaactttttcttcgcaagactttggggcgcaatcttcattcgtggacaacatgtcaagcagcgaattaggccttgacaacccataaaattgagagaaaatatcaacaacttccctatttttgagagataattagtcatttaaactttattaattaattatgtaaatatatcttcatttaccttttttgagggatattaaggatgtaagctctactatataaagagcattagcctaatcctaattctctaagtctgaactctctaagtcttaagtctccaagtctcactaaagccttcaagctctaagtctaaaatcctaactttatcttctcttctacacgccctagggctctctcttagagatttgcctactggattcatatattgtaatcttaagagagctactgtagattccacaatacttgtgatctgagtagtattatctctggtatcaatataaccaaaaggcgagtaggtcgttacccgctaactatgggggtcgaacctctataaaatctcgtctcttatttacttttttattcttattgtgcaacatgtggcaagcatcagtaataaatacaagtctactatcggttggtcaaatctaaagtcaacaatctgactaataaatataattttactttaatctattgtcttcttggaattttctattatcataattgcttaaaattctaagttttgtgataaaatttaattatgagtcatgttaaaatcattgttaattatgataaagaagatgacaaaattaaatgaattgtgcagttgtgaatttattattttgattaatttatctttattttgcttaatgtttttattatattaaatatataggaggttttctttagactgtttaatggataagattaattaagaacggttgttttaattaattattttggtgatttagacgtgttcgtgttatctgcgattattaatttggtagagtgtatgaattgatgatgttaataattacttggatgattatttagtggtggagaatgacttcttaactatttttattgacgtataattattttttaaaattttttttaattattttttgtgattaatttttattattcattaaaaaatgtccattttctttacttttgcactaattggaataatgaattgaattactagacctcatgggatcgatttgtattatactgctatatagaagtagctgattagtgtgatattaaaaattgttaaattgttaagccttaccacacacattaccattctatggattttttagtatatttcttaatttcttgtaatttttcttgggaatgaggacatgttgctgatgttgatctggaatggagagattttgcttctgtgagaggatggttagaggatgtaatttagaaagtagactctcaagttcttagtcgggtggcgatgctttcatgggctatttcgtgtgctcgtaatgagtttgtatgacaccagtgaaggtaagtgttgaggaggtggtagtttttattaagtgagcctttgtaatcagttgttagttggaaagagtagtttagtcttttacattttcagttatagttattagtgagttgtcaattagttcctttaactaattcaatatataaagttgtaatttgtacactgtctttaataataaataatgcacattctttcttctctctgattctctctattttctctttgtaaaatggtatcagagccatgatgatcatgctcatatcttctacttcttcttcttgattcttcttcttcttcttccttgttgatccatgtccatggctcgtggaagagttaatactcgaagccagacctcacaaggaagatcctcccataactccaatcctttctctgttttggagccaaataattgtgtccacaatgatccaaattgtcatccacactatctttccaacagtgatcatccaagtgcaaatctcgttccaaaagttcttactggtagtgataactatcattcagggaaacgtgcaatgagagttgcactactggctaggaataagatgcagtttgttaatataaaattgcaagaacctgatgaagatcatgaagattatgatgcttggcatcaatgcaacagtttaatagtttcctggttgctgcatttgattttttcagagatttatgacaacataatgtacatggagattgcagctgatgtttgggaagatctttaagaaaggttccagaagagaaatgcaccaaggattttttaagctaaaaagatctatgcagatgttgaatcaatgagccttggatgttactacttattatactcgaagaaaagcattatgggacctaattcaagaatatagaccactgcctcgctgccaatgtggtgctatgaaaatcatacaagattatcaagaagaagataaagttttagagttcttgataggattaaatgaatcttacaacaatgttagatctcaaattttgatgtaagaaccactttctgctattaacaaagcttatgcttctgttattcaagaagaaatgtagagagaagtgtgtgctacaaatctgaaggtgaataaagattctaatcctcccacatcaaatccttcaaatgatcaatttgctggtagtgcaaattataacagacccaaagttacttgtacacattgttgcatacctggccacactatgtccaaattttacaagatctatggatatccaccaagacatgagtttcatggaagatttcctgctcgaaatcaaggtcagcaaacatctggaaaggctgctgctaatttctcaagatctcagtaaaaccagggtaatcaatctgaccaaggatgagaggttgatcaagatctaattcccaatctcaccctgtaatgtcaaaagttaatgaccatgctatctcagaaaatcaagatcaaagtccctccacctcagagcaaccaattgtgtctcatttttctggtaacaccaattttgttcattatcaaaaatggattatcgacacaggagccacacatcatgtgtgtgctgatgtttcattgcttatcagtatcaaaactaacacatcttgttcctttgttaagttgccagatggtagaattgctattgtcatttgcattggttctattcaattatctcatgataatatcttacaagatgtgttgtgtgttctctcttttgaaacttaccttttatctgtcactgcactaaccaatgcctcatgtttcttttctttctatcttgattattgcattatgcaggacattatgaagacacagaaaattgtgatgggtaaatgagttggaaatttgtattatctgaatctaccacaaagcaccatgaacactgttgtttgttccattttaaattctaaaattgttgatgaaactgtgtggcattatacacttggacacccttcttgtatcaaacttcatcctttgaataaaagattgcaattcagccattatcctagtgaaaattttcattgttccattttccattattctaaacaaagaaggctaccttttgtttctaattacaatatgtctgctaaatgttttcaccttgttcatattgacacatggggtcctttcacactttacctattgaagggtataagtatttcattactatagttgatgacaagtctatgtttacttgggttcatcttattaaataaaaatttgatggtcgaattgttattcctcagtttattcagctcatcaaaacacaatttaatgtcactgttaaaggtgtaacatttgataatgctaaggaattacagtttgataagttgtttaagaacctaggtatccttcaccatcattcatgcgttcataggccttagcagaattttgtggttgaaaggaagcatcaacatcttctcaatgttgctcgagcattaatcttccaatctcacattccccttgcctattggagtgactgtgttatcactgccacatacctcataaataggacccccactcccaatctgaaatagaaatccccttttgaaattttgtattgacaaaatgcctaaatatgatcacttaaaagcctttggatgtttagcttatgcctctactcttaatgtgtctagatcaaaattttctccaaggtctgccccatgcctttttcttggtttctccagtaggtatgaaggcctagcaattacttgatctaaacacaaatagaatgttttccactagagatgttcaattccatgaacacatttgccctttgttgttattaatccagcacaccagtaccatgattttatccaccttcctactagtccacctgatgcttttccagcttctccttagcctgagtataaccccaagtaaccagaaattccatctattgtgactgatactggtatacctgtttctgttatacccgtttctagtatgcattctccatctgataacactacacctcctgctacacaaaccaacactccatctgattctgacacacagcccaacatcacttctcatagacctacaagaaccattcataagccttcttatttgaatgattaccactattttttagctaactataaatctcatgttttgtctcacgatcttgatcaaccggttctatatcctctctctaaggtgattgattactctaggttgtctcccaagtttcgagcattaattttgtcaatttctagccttactgaacctgaatcttttgctcaagctcatgagataccaaggtgggataatgccatggatcataagattgttgccgttgaagctaatgacacttggacaatggtttctttacctccttatcatcatgctataggctgcaagtgggtctataaaatcaagtttaatgtagatggtagtgtggaacggcttaaagctcgattggtggctaaaggatataatcaacaagaaggtattgattattctaaaacctttgctccagtcattaaacttgttacagtcaaattggttcttgccttagctgctattaatggttggatattacaccaacttgatgtgaacaatgcgtttttgcatggtgactggcatgaggatgtttttatgactctacctcctgggtatagtcctaaggggggcttccacctaatgatgtttgcaacttgaacaagtctttatatggtttaaagcaagcatctaggcaatggtttgaaaaattttctaatgctctaattgaggaaggatttcatcactcttccactgatcattctcacttcatgaaattctttggtactagtttcatcatcttacttgtctatgtagatgatgttattctagcatccaatgatttacaacaactagaaaacttaaagaagagattgaatgacagattcaagttaaaaaccttggtgacttgaagtatttccttgaattggaaatagctaggtctgctaagggaatttttgtgtgtcacaaaggcattatgctcttcaattgcttaaagacattggataccttggaacaaaacctgtcactacacctatggaggctaatctaaagctgagccaagataataaggaagattctttaccaaatccaacactatataggagaatcattggtaaacttcagtacttaactatcactagacatgatttgtcctatgcagtaaataaacttagccagtttcttgttactcctaaaactagtcacatgacagcagcataaagggtactgcagtatgtgacaggcacacctggacagtgagttttcttctcatccaaattagaaattaaacttgaggcatacactgatttggattgggctgcatgtccggatactaggaggtcaactactggcttttgcatctttcttggaagctcaatcatctcatggaaaagcaaaaagcagcacactgtttcgagatcttcaaccgaagctgaatatcgtgctatggcaaacacaacttgtgaaattatttggttaagttctgttttgaaggagttgaagattaattactaaggacaagcaattttacattgtgataacatagtaacacaacatattgcagccaatcttatctaccatgagagaacaaagcatattgagataaattgccacattgtgagagaaaaaatccaggcaggaatcataaagacagtccatgtttcaaccaaggatcagattgcagacttgttaacaaaaccattgtttccaacatagttccaagctctcaaagacaagatgggattgcacaatattcattccacatcttgagtgggagtattaagtgagcctttgtaatcagttgttagttggaaagagtagtttagtctgttacatttacggttatagttgttagtgagctgtcagctagttaagctcattttcctttaactgattcaatatataaagttgtaaactttacattgtcttttgttgacttcgcttttagccaacgacaatgagtttattttataagcgataaacgatatgtagtaatagatatatagtaaagcaataataagacacatgaattt

SEQ ID NO: 16274 - DNA, 4703 bp, Cannabis sativa
aattatttacaaattatcttaatctttagttttattttctaaaaattaaaataataattctttacatatatactttatctatgaatgaaaagtaattttaaaaaatcactactgaataatttttctatagatttctttattcatgaaataaaatactaaactaagttttagtttctaaatcagtgttttgctcaaaataaagaatataaggttatataaatacatatattttttttcaaaaaaaaaccaagagagagagttttgctcaaaataaaaaattaaggttataaaaaaaacaagtgagatttcaaacattgtaccaatgcattccacttgccaacatgttgactcgctgactacttggctttattgaactttttctctcctttttggattgcattaactaataataagaagagataacatagtacataacttatttttaaaagagaatcttctatctttttcctactaaacacagctgaaagggtatttaacataagattctcttctgtcttgaaccaaaacgggtataattgaactatgtctgcctatatttgtactaaatgaaaaatgagccactcgtggtgaccccaaaacaaaacaaagctatggcaaactttttgaagtgaatcctccaccttatcttaatattgtgaaaaaaaaaaaatatgtaaattgtaagaaagaaagaaagaaagaaagaagggaaaagcagtggcaaggaaggagaaccaccgataaggatatagaacaattggacatgcaaaaagagaattggataaaggtatagacccttgtgaggagattccaaaggttaaagaataatacttctttttcttcttcctcgtgatgttcaaaccaaagcttcaaacaaggccacacacaaggaataagatgccaataagctttattttcaggacaaaagcgcacaaagtaataatagtaccctcactctacaggtcgccttctcatacagctgacaatacaatatgcatatatatatatatatttagattatttaaaacatagtaatgttagttataataaaaatgatatgttatttgttttttaaaaaaaagggttgttttccttttgtatataagaaggagatggaagaacaattaataatagtaattattattataataattggtttgtggcaaaattgtaacatcatcatggtatgggcttttaaggaatggtcagcggatagaattggtgagaagcgtctagagaaaggagaaaagaaattcttaaaatcttctcccaacaccacccaatatttggtgctgccttggatggcgagtgctgatgccatttcttttcttggttcctttttttttttttcaaataaaaagaaaaacacttcattaaaataaacatgtcatattatttttttttaaaaaaaatcacaattattcagagtttaatatatcaataaataaatagaaaattcttaatctaatttaatttaccattcactctaagtgcatgtagaattaatttatgaataactttaatagctatactgcaaacatgaattaaggatgtcttgggaacattgaaaagtaaactagcaaaatcttctaatctaaactctaagcaatcagaatctcaaagaatcaaaagggaagtgtgtgagatcaatccaatgctataccaatgcttctccttgaataacatcagtagtacaacttcaatgtgaatagccagcaacctagtgttattatcaattctattgcaaccactggaatgcctttaaaacttcctaattaataaaaccaataataagtaatattcaccaagtaagagtattaactaaaaactaaaagaagaaaatttatttatatatatatatatatatatttatataagtatctcaaaatatagtaaaaaactcttatgtacaataaccaaacataaataaaacatataacataacactttacccaacaacagcataactttttttttttttttttttttttctgaattggtggtcatcacttttgtttttattgttgggatgttctttaattttttctaattatagtatcaataggcattattttatatgattttgagaaatttgaaatgatttatagtattaaaaataagtttaaaattatttggaggtgtataaaataaaataatcacacgtacaattaattatttgaattatatttttagtatcttaaattattcaaaatttcttgaaaagataccagataactactataactataatatatataaaaaaaagtttgaatttttaatacactaaaaatgaaaaatactcttaccataaaaataaaagtgataccttacttaagaatttctaataaattataacatgattgaaattaacaaagaaaatttatattataatttttattattatatacatttaaatactggtgagaaaattttaccttcggacctagtctttgtgagaaaatatgaccacaaaattcatattataaggtttatttttttgtcaaaataaatcatgcatattgtaagttgttttttttttttagcaaaaatcatattataagttagttaaacataaaaacaatatatttataattcataaaattatctaaaaatacatattacatgaagggaaattcatctaaaaaaatacgtggatgatggccaactagcttcatatatatatatgattacgtttatttactcttatgatctttttaatatctaaataattatagttttaattttttttttatatataatagtatgtattatagttatttaagatattgtaaaatgtcagacaaatttaaaataatttacaatttaaaaagtaaggttgaaacaatttattttatacgtgtataaaataaaagaacaaaaaataatttaaactttgttttcagtgctaattttttttaaatttctaaaaaaattataaaaatgtcttaaataactgaatttacactgttatataaaattttaagataaaattattggaatttccaagatacaaagaaaatgcattgtacacatcttttgagtgggccatagaattttcttatattttttggtcatattttacttgcccctcgtgcttgaggttacttattttatctaaaatctctaatgattggtgtgaatttattttttttataagccattatattttaataaactaaaactaaaaaaattttatggtgccccatatgtattgatgcaccttttgtgtttttgagatttatataattttaattatttcttttatatgagcataagtatattataattatctaagatattatataaaattttgaaaaataaaaaataatttaacgaattgtttaaatattttattacacacgtgccttttttattttatacacatataaaatagaaaattaacactctacttttcttattgtaaattattttcaaatttcacaaaatatttggtggatagtgatgagattgtgatcaagaacttaaaaggtgtcaattctttttgagggattgagaactgtacaagacaatgcaagcttttcattacttttatgactagctgtaaattttcttttgttactagaaacaactgttgtaattttacggcccataatatgactaaaaaataggcgtttgccaataatgttaccggtatggtagaggtttctactatcccaaatgttattttttgtaataaccatgaggtctaactcttttttaatttataattttattcaaaaaaaaaaaaaacccacaataaacaccattgaaaaaaaattgagattataatttaaatattaaaagggggattttatttacatcctaaaaatttataaagacactttattttaataatttttaggagaattacctcatactactttttgactttttttttttttttttttttcaaatttactatttaggttgctccagtattttttatgtgggttgttacgtggattttggttgtgatttaggttgctcgttggttgctatgtagatttttttgtaaaaatgcaataaaaactgctttaaagtataaaaataaaaaataaaattttattttatataaattttatatttttaattgtactaagttttaattttttcttcaaattcattttcttaaaaaatatatctatcaaacaaaaataaattataatgtaaatattgtgacaaaaaaaataaaataaaaaattatttggaattttctaagaaaaaattaaaaaaatatacatgatttaataaaataaaatcaaaataagtattaaaattaacataaaataatgtgaggaaaaaaattttaaaaaatattaagagtagttttcaaaaattattagagcaatgtgagataaataatcacatataggtagaattttttattatttttaaattttaatttagtaaatatattttaaatttaatttagaattcaaataaaagagttgtatattttgcaattttaatttattatttaagtattttaattttactattttgcaattttaattattttttaaataaaaatataatcaattattttattataaatttatgtatattatcatatatatatatatatatttaattatgtataataggttactgataaaaatatatatttttttttacaaaaaatgctattattttatattctaatttaaattattattatctattaattattatattattttaat

SEQ ID NO: 16275 - DNA, 4312 bp, Cannabis sativa
  modified_base (2106)..(2110): a, c, t, g, unknown or other
taaaatttgtaaaataatttcaattaatttatgatcattttgcatctaaaataatcatataattcataatcgtatacattattcttttgtaaaacactcaattttattcatggtccacaatctagctatttggtcaatttccaccaattattttggtctctagtctcttcatttcactatattcctagcttgaataagaacaggattagaatcatatcaaagtaattaaaacataaaattatagctttcacttcacttcactatattttcaattcatttcattgtaaaatgtaataattattttatcaaaatggtaaaaaaatcatttgattcaaatgatattctaacactttaaagtagaacaaatcaaataaaatttgatttttttctattcctttccatttcactattccaaataaaacacaccataaagtggtgtttggttggagttaataaaatggaaaagaaataattttatttatttctttatttcttacattttaaagtattgaaatatcattcgaataaaatgattattccatttcaaggcaagatttataattcctattctaccatcaaaactcatagcttcattcatctaagtatatatgctacacccattataaaaaaataccacttcacttttctttataccattttatatattctttccttttgaaacatcaaaattggtacctttcttcacattgcaggtaagaagattctaatgttcacctttatgtggctacttcccatttggactttttcacttctggttgcctctggcctcattaaactcccattcactaaccaatttcttgatcaactcattttgtgaatttgcttcaaattcaattgcagattttaatatatcaaatttcaatccagtgtgtacagcatgatataaagtttgtatatttttagtctttagaagttaaaactgttttcctctttaattttttatgtgaatctttgactttgtttattgcaaattgtaactatggatggaccactttcatcaatcaaaagacatatatttcaacacataatttaacagttaaaggaacttttgtcacctcataattaaatgcatagcctttttttgtcattagttttttaattaggactttatattagttgtgtttgtgatataataagttaaagcatttgaatgtgagaatttgattaatttgcttaattattttcattaatggcaaagaaatgaagcattatgagtttcaacagagcactcatttattcattttctagtgatttttgttttactctcttgttatatggtttaatttattttatatttactaatgatataagttattttgttgtcaattcaagaaaattataacttattaatgttaatattattaattaatgctaggtcacaaagaaaaaatctcacagataattaaatattttatgtaccattttctcacatttaaaaaacataacaagaaggcagaatatttgataggagactatttataaagtttgaatatttgttagtggaatttgaattatgctattgttattcaattttaaaacaagttcttcccaaaagttaataaaataataaaaaaattaaaaggcaagctaataatatataatagagagtagctatcttgaataaaaattattgttgttaaaatatgtaagactcgatattacaccatattatattgataacaatataacaacactaataatattagaggaaatgctttcttagcaattgaatcaactttaagtaatgcttagtctttgttcctattgagttggagttgttttaactgtgttgtgtgctgtagtggtatgaatatctactaacatctttttttatttgggtcaatcattcgaatctcaccacaactctttatggaaagatttagaacgaggtataaaacttttataactaatacttgaaaaatgtgaagaaagaatctgttggatttattttaagaaagttaaccaccaatgttgaatttgaataataataataactcatatattatatgggatatgattttgtcctgtgatgtacttttacggaatgtattccgtggtatattaaatgggtctcagggtacgttnnnnntttgtaaccctaattacccctagatcaatctcagccatcagatcaaataactccctcatctgacggttgccgtacatcacggattacaatccgtgaaagtataataacgggacaaaattgtatccctatattatatatagaaagagtgtaaactaaagtggaccaatacacatgatgaggcaatggcttatatatatgaggctgttgtcaactttgaatgaccatccatctattgtttctaggtgggcggcggtccaccaccaccaccaacatcaacaacacaacattgttttttcttggtcaattttttctatttttcatttctataattctaattattattagggtttgatcatgttgtagactttagattcttgtagatgtagaccccatcttgaagaatttatttatggattttgggaacaaggcaaggttggctaattggcaaatatgtatagcaaaatgggtttaaacactttaaacaaaatcatgcatttcgcacgtgcaacctagttgtccttgttcttcatccagctcactccatcttatttatttatttataataatgtatctataaatccataataattgaagcaaaattatttataatttttgtttggttaattatgatttttgtcttctaaactttaatatataccaaatcatgtctcttgaatttttttggccgttaaaaattttccttgaattattgagattgttatatttaaggactttcgtctaatttcattcaattttactatttcagtataagttttacataacacaagatctaaaataatatatacccttaacttattcatgaatcaaactatttttttcttcatctattttttttctctttaaaaaatcaactatatatttaactacatcaacattactaaacatatcatattcaaatattcaacctaaatgaataaatgtcaattatgtcattacatttccaattcaactattctatttaatgcaacttttacattcttcttaattatcacttttgatttttccttatagttacattaatttatttattagttttttagtcacaaaaagttaattatatttaataaaaaataaatataattataaattaatccaagtgtttgagatttgacttgtggtattgttgaagagctaaacaacatttttcctttatcaaatgatcaaatgacagtttataatagctgacaacaaataataacaataagcatatatagttgtacagcaagactataattaaataatatatatataaatataaaaaaaaaaggtttttgtctcttttttcttttttaattaattgtatgaaattatttaaatccaaataaaataaatgtctgatgttgtgcttaataagcaactccttttaaaattaaaataatgaaaattagggtgtcacatgaatttatattatattagtttagctaaatttttcttgatatgattgattattgatactccatccacgtcatatatgtacagttggcaaactttccacgtcatatatcactcctacctataatggtgtatgattaataattaactttccatgcaaatttacataattatctcatttttctgaaatcttaatatatataacacctttcaaaataaataaataaataaatatataaacacacctttaacatagatatctaatttctaaacaaacccatttcagaaagaaaaaaaaattaaatgtattgttaaagaaaaaataaataaatagtggattattctttacttgaaatggtgggtaaatatgggaccttattataaatataaaataatgaaaatatgatgatgacgatttcatcaaacttggcccaaaacccaacaagcttagaattattctctttccccaaaagtaaactaaatacatataaatttattaaaaattcaattgtcacatttaaatgggtgtacaagtattttttgtttgaaagagcatagttgttgccttgttgggtatcaatagattttagtactatttgaagatgataatttataattgattagtgatatttttttaaaaattattactttaaattatataaattcgatatttaattgtattaataacaatataataccaacaaagatattaactattaagtataggaatagtttttagttgttttttaatgctttcaatattcgaatagtttagtttctaaaagattt

SEQ ID NO: 16276 - DNA, 3094 bp, Cannabis sativa
atacacatattgttagttattattaacatgaaaagaaggaaatggagaacaaattatatagccatgactgcttaccttctcgatgtacatgttaactaatgatggaaggtccgatttaggtctccatcctccaaatagagatccttttaatgttctcccagatagaaatgttccatagtgagcggatacttctggttttacttttggcacaccaagtgtgacagctataccccatccctgaaagaagacaccacaaaaaggttgaagcaaagttcactttagaaaatatatatttatgaaatataaaggtgtgataaaaattacatcgcagcatgattgcaatgctgttgttatcattccagtgtcacctatacactcaaaggagtaatctgctcctccatctgtaacacgcttaataacctgaatcgataaaacattccaatagtttcaaagataaatttatctcaaacatgaagcacttcttggaagaagggagttgccaaagtaagttggtgatcatattttattatctaaactgatttatgttttaatttaaggccacatcaataaaaatgacaactccaccaactcaactaataagttaatgttcaaccaagttttattctttaaagtcagctaatatgattgtcaagggaaggatagttttcattatggtggtttagatgaataaaatacctgctgaataggttcgctacagtcattaggattgaaaaattctgtgattccaaaaccacttgctgtggacccaaaatagtacaaattattcatcaagaattttacatgcattaaccttataaatccaatcttagaagagaataagtcggtaccttttacaattttttcaggatttgtgtctacaccaattactctagatgctcccctaagcttagcaccttgtgcaacctgtaaagaaaaaaatgcatttcatgtttgtaatcatagtttaggagccaattgttgagaaacatagtgaaatgtaaacatattatcaagtctatgaacttacagaaaggcctactgttccaagaccaaatatcacaacagttgatcctttagatatatcagcaacattccaagcagcacccagacctagcaacgaacttcaattcctttctttagattactcaaccagttgaattttcatttctgataagcatctgatacaattcacaataatatactcatctatttccaaggacgagtctcctatctaactatcacactacattttcctagcttcatctttttccctttaccaaatacatatctaaaaacataattttctgcactaaaaatatttgagaactattcttttacatttcaactctatatcaacaatgaatataaaaattatgcctttggtgacatggattaagaaaagaaaaaaaaaaataaagagaatgtttgtgtgtgatttttacttcagacaatttgttaatcttaatttcatcatttgaaattatcatttcctgcactaattccattccacttgtcaaatttgactttttctttaatttgcacatagcctaaatatgaatatttatacgcagatattgcaagaaaaattataaataaagaaaaaaaaaacaaaaaatcaaaaggtatcgatatctttagaaaatgaattcttttaaatgatacctgcagctactccacagcttagaaggcatattttgtctagagggacatcggagttgactttgacagcacatccagaatgaacaacgatatattcactaaaactagaaactgcacaataatgataaacaggctttccttttatgaagaagcgtgtcttttgatcactatgcattaaacctctcctctccaagcccaatacttggcatatgttgcttttaccagatacacactgtctgcatgtgaagcattctcctgtgaatactgtaagcacatggtccccctcactaaattcagttactccctgccccacactctcgacaatcctgaacattttaatgaagaacattaactgaacaacatataatagaaatgttgatacgattacagatttaaaaaaataaaatatgctgttttgaagtcatttttctgtttatttgttcataccagtaagtgaaattcctaagagaataaaaacaaaataataattgtatgtcatacttaacaataaaacatgagacaataatccttaactctttatgatggttaagactcagacgtaatagagaatacctctaagatgcataattagattagagatttagagtaaaattgagtaataccccatacccaaagaaaaagataatatggaaaagcacattgattaaactgacactcaaaaagggaacacactgagaatttgtgacagtgaccaaaatccattttcgtcgtatgagctaacatgaaggggaaccacaaattatgtaattggaaaatggggaaaaggttaccccgatgcttcatggccaaatatccgaggaaatatagtctgcatcaatgaaaaattctccaagaaaggtcagacaaatttatccagagataaagttattgaaagttcattgatggacaaatattttatggctagcagtaaatataagatatgatatttaatttccaaaagtgaataaattgtacattctgagaaagagccaatactaaggaaacaattcaagaaaatatcaagaagtacattctttcaaagaatgatgaaaattcaattgcaaatatccacaatggttcaatgattacaagtagcaatgtacttactaagagctgtgtctttattatgtatgtataaatctttatataaatatatatgtgtgtgtgaaacaaattttttattaataagagattaataaaatatcaaagcaattatataagagatgaaactatcacattacaacaattaatgccaatcacaaagaagtgttgaggagtatgtgttacaatccttgttgaagatccgcatagtcatacaatgcttaattttgtatcaaagaaaaaaaacaccacgtcctcttcttcatcattgataattctaatgtttctttccagtcacactacttgtcaaaagcaaaacaacaacaggaacatt

SEQ ID NO: 16277 - DNA, 8629 bp, Cannabis sativa
  modified_base (286)..(286): a, c, t, g, unknown or other
  modified_base (1375)..(1380): a, c, t, g, unknown or other
  modified_base (8011)..(8014): a, c, t, g, unknown or other
acgcgtataaaataaaataattacgcgtgcaagatactatttgaacacaatttttagcgtgttaaattcttttatattggttaaaatttttaagagatcttaaataattaaaatttacatgactacgagaaaaaatgtaactaataaattatttcggacactaaaataaataaagatatatcaactaaaataaataaagatgtatcagtacatttcttttaaagggtgtattataaaatttcttatatttcttttaaaaataatatacataaaaataaatttaaanttatttgatactaattttattattcaattaagcaaaatagtatttctcttttaacagcaaacacaacgtaatctgctttatcaaaatcttattggtccacgtcttttgagaccacgaatgaatgatctccgtttcaccgaaccttgcgttaaacgaattccctttcgcaggtgattaaaaatcaacccttccagaatccaaaactgcatattccagattcccaaaatgacggcgggtcccatcggatacagacccattatcgacgactgtactacacgcgccatccgaagcgagtggcgtgaaaaacgatggcgtggcagatcgtagtagactcgagtggattaggacgaaggtgggagaatttggagccagaactaaatggctcttagagagtgtgaagagccacccttgttagagaaactttacccctcacaactcacgcgaccattctatgcgtgttcacgcgctcaagattcctcttctctttggagtacccaggtatattcgaatgaaaaaaaatatttaaaataaagtctttgatcttatctgaaaaaaaaaaaaattaattagattagattagaagcgtttggatggtgacgtcattgccagcccacagagagaagacgaaaagcgaatcaactcctcgaatattcaacctaagaaagcccactcatatattttaattaattctataattactgagaaaataaataatttaatttaaaaatactaaaaatccaatcaaagattcgtctagtacgcgacgacccgaccttgatgtctctctcactctctctctcgttttcaatttttttctttttcttattttctctctcactagaatatttctcattttgatttatttgtttttaaaagtagttgggttatgcaatatgcttggttggcaagattattccgttttctgattctacttagatcccatatgcgtctctaactctaaacgagtccattaaccatttctccttgttcggatctatctactatgccccttcttctttctcatcataaatattttaattttatataataattttaaataaacaacacgcatctctctctctctctctnnnnnnctctctctctctcttatatatataccagcttctcataaagataaacccggttccaaaacataaaacagagccaaacccagataagaaaaattgaatctttttttcttttttatctttttaccaatctgtaaaagaaaaaatgcagtgttcatcaggtatggggttcgaagaatatatcgaagcattagaggtagaaaggaagaaaattcaagtctttcagagagaacttcctttgtgtttggagctagtgaaccaaagtaaagaccattttcctttcttagcttaatatttttcttcatttttatttttattttttgttttactcatttttgttttggtttgattttcagccattgatagatgtaagcaacaattatcagggacgacgactaccgaatacgtacatggacaatcagagtgttcagaacaaacctcaagcgaaggacatcatgtatttgaagagtttatgcctttaaaaagaagctcatcttctgataatgaagaagaagaggaaaaagaagaacaatcacctaagcgtcagaccacagaaaaggataataaaaagaaatcagattggcttagatctgtacagttgtggaacacaactccagatccagtttcgccacaaaaagaggtaattaaccgtttttaaaaaagttctaaaagattaaacagtgggaaagtgttgtttatttttttatttatttattcattttgttttttctaaaaacaggagcagttgcctaaaaaagcttcggttacggaggtaaagagtaatggtggtgcttttcaaccttttcaaagagaaaaaaatgttgtcaaaccaaatgggtcgtcttcgtcagcatgtacgacgacgaatccggtagcttctgctccggcgacgagttcaaacgccggcggtggaagtaacaaaagagaagaagataaagatgggcagaatcagagaaagcagaggcgaaactggtccccagaattgcataagagattcttgaatgcccttcaacaacttggtggttctcatggtacgttaatcttaccatatatatatatatatatttttcattattattattattattattattatatataattgaaaatcactaaaatattgctacttgcacaattaattaagttgaatttaaaaagtaatcatcaaaataaagaggtgtgatattaatctaatttgtttattgatgcagctgctactccaaaacaaatcagggagttgatgaaggtcgatggacttaccaatgatgaagtcaaaagccatttacaggtttgtgctattagttttcacctttcacaacaattagattaattactgatttttacaaaaaattattattatttttattgttaagagtaaaaaactaatgataatcttgcaatttttggtacagaaatatcgtttgcacactagaagaccaaccccagcaatacacaacaatggcaatgcacaaacaccccaagtagtgtttgttggtggcatatggatgcagccgtctgaatatgcagccaccgtaggtggaaacggcgattccccgagcgcggtggccgccaatggaatctatgctccggtggctgccccggcccaccacgtggcagcagtccataggcaatcatccgaaaactctcataataactcagaagagaggaggatgagccataatagccatagtgaaggaggtgttcattccaataattccccatctacctcatcttccacccatacgacaacaacttctcctgcgttttgatcatgtgctatatatataatataccaatgagaaagaatgatgtaaaattttgtaacaactttctttttgtgataaatatagagaccacaagttatcaggaaatcgccctactcctacagtacatcattcccttttttttattattattattttttttttctttttctttatatatataatatatattttcattttttgttctttgatgttgtttgtagctcactggacagtcagtaacttgtagagttattttgatacttggtgtagtggaaagttttgaaattggaattaataacaaaatgccatagcacaaagttttttcagcattaatttgatcattgattgattgaaatttaaatgctattgttttgactttatatccttctccgtattaattttttttaatgactcgtgaattttactttaaaaatttgcacttttatgatgtgtacagaaattttaaagatattgtgctaatatattttctcaaaaagaatcagtgggaaatttaagtataatcatattattatgtaggttaagcaacaaaaagaaaattcatattattatgtagagtattgctacaagacagtattatatattatggtgtcttatacggtggtgtcttatacggtagagaacgtgacaaattcccttgtatatttttttacactatcattataaataaataaacagtaaaagattatatgggcatcccccttactaatagccttgataagtatctcggctcgagtattttgggcgatttaagaaacacctctcaacgcccataaagacaggatttagtcctacttagccaaatggaaaggaaagctcttttttaaaggtgataaagaggttcttctcaaagcatttatctcatcttacgctatgttggtcttcaagctccttgctagcttttgtaaatttgcgaaaaaagaaatagctaagttttggtggggctctaataaaggggaaggcaaaatacattggaagaaatggtctttcctctataagtttaagatcacaggaaggttggggtttcgatctattagctctttcaatcaagtgatgcttggcgtatccattccaatccttcttcacttttggccaggctcttcaaagtcaagtattatcctagaactacttttctggaagcagggaaaggccatactcactcttttgtttggtaaagcttgcattggggcaaagatcttcaaaagcaggggcacaaatagagaataggaaacagtgacactattcggatataccatgacaattggatacccaactgttctttcatacccacttcccatccatcaaaccaggaccgagtttcaagccgtatcgttccttttggaaattggaacacagttaagcttaacagtgattttaccaagaatgtcgtaaaagacatcctatccctcccacctccacaaattcaccaacctgactccctcttctggcaacataccatttctggaaactactccgttaaaatcgattatcatcttgcccaaaacatcaggaactctgcaaaaccaactacttctgaccccaatatcgtcactagctggtggaaggccgaccttgtggaatctcaatctccctcctaaaattaaatattttacgcatagactatgttacaacactctaccaactaccagtaatcttctttatagggaaagtagaacctctcctctttgccccaggtgtcaaacgtatcccgagaatacccaacatgctctctttgaatgcaaaggtgtaaagaaggtctggtcaggtacgtcctttaagcctcttataatgccatgaaaggaaaaaatacttttgatacacttctttttttcaagtctcaattgcaggaaaatgagattgaactaatccttttgtgttttattgaagatttggaatagtagattttttttttatttttaggaacatgcaggagcaacctctcaggattttccaggaagcagaggaatttcttcagttctaccaacaaacttagccaagcactagcttaagcccaccaagccaagaattatctagttagaattattgggagccattaactctcgaggaaacctaacttggaaagttatgtgttttcacacaaaatctatggtatccacttttgataccaaaataaacactttgccctatccatcgaataatgtgaaggttggcatcgtgaaatctttaggctttggttcttctatgatccatgtagcaaatggagatcttgctacatttctcatagcctccttatatgggttgtctagctctgcgatcttgccttcattgattttggccatggcttcttctattacttgttctttccattgtagcaagtcatatttggattgctcaaaatcaaaacatttagatcgaatcacaaatggtgataacttatgtgcattttgtcatgtgtagcatcacactctacctcgttttgtttatcgctatttatctgttgataatgattttgagatgattgctctatgccaacaattcaaaaattgatatggaagcagatccccctttttttgttaatagttaatcttatctctttaagcagttattatcattcggtaatgtcttgcataaatttttacaaacactgagtgacgtattgacgatgccaacaattttcatcttgatcatgcttacctcttacttcagtaatgcgcagttcttgttgaaagttttcctccacgaggcatcataattcctcattgtgtttgtcatgcgtagtcattttttggtttatctctctcagttctgctgctaaagtagcgataatcgatgatttgatttgacgtgtctccttcatttgtaaccatagttacgcattctttaatactttcttggatctcatcctagactgtaacctagtcctcatatttttcattctcgtgattcccacaggcatcgctggttgttggcactgaaaattagttcaacaacaaatttatgtttgcacttcgaattctttacactaggattatctcaatcgaaaagtacaactctgctttattacataattctttcaagattagaaattattctctctctttgatcagtggttttgaactcgagtgtgtttttaaaaatgcaattcgacagagagttttgacgggactagtgtggtcaagaatctgccccctttttgaatgctggggtctcctatttataggagggaatagttgtcacgcaatccttttcctcttcttaaattattccacgtggattcgatcttcttatttcctcacaggctttctcttctgcttttttcattaagttcttgttatacccgaaattcggctgtacttcaaaaagtgacacgcgtcaatctcgtggaatctgattcaacaaatttaatggtaattatgttattaaatgcaaaatagaataacttattaaatatagaataaatagagtatgtccataactcgctggctgtatagtattaagcgagatagggatatacaaactatcaaatcatgtattgacgagaaaccaccttgcctcggaaggcgtaatcccaagggagccatggacaatggatagcgaggcatctacctcactgtatgtaaagaagtattgacgaggcgaatttgttattagaacacttagcgtataatatacattataataactaagtgtaataacttgaaggtcgtgattgtccattctgtaaggccttatggtcaaatgttcttaagtttgctcagtacattggtgttcatgccattgctggaagcttatgaataaaccaagtcacttgtatactaggcgagacgccccaacaagatacatttggcaacgtgttccaatccatgtcaacgttgaccgctataaagatagttaaagtcacagttgtgtaattatcttatattatctacacgtatttaaattgagcgtgattaaagtccataatttcggagaatattgtcacgggatttagatttaaatgtaattaactgcctacttatattactataaataggggcagattatacaataaaaggggatggaaaaaccttagaaagaaaaaggagtttactgattgtaaaaccctaatattgtattcaaaaatatctgaataagatagactcgtggactatgcaaagttaactgcaaaaccacgtaaaaacctggtgtcattttttatttctattagaattctcaaatttcttataatttctgtgctaagtttattacgaaaataggctcataatcattaacgaaaatcttcgttaatagtttggtgctttcattgagagccaacgtgataaaagctcagaaaaatccctcctaaccaaagaaggaatttcttctccatggctgataatggggaaaacgacaacaaatcatcctgaagagactaattgtcatcttggaaaatagccaataggctcacgcaggccacccacttcaagaactacgtgttcaacacgattaacacgttcaagaagaagccaacatgataatgatcagaacccaaaaactaagaatgaagaaaccaacacttatgtgggtggttctactcctatgagtgagggtgcctatgatcccaccaggtacgtaccgttggttgagttggaaaattgtcaacttcggtaacatctggctgaggcaaaccaacgaaaccctgagttggaaagggaggcagccgcacccagggcgacacaagaaaataacacacagaaccaacttgatcctggagtgagaaggctacgagatagacctcggggctcaagaaccaagaggcaggagacggctaagaaaaaccaccagaatgctcaggaggagcaacctggggaaactggagatgttcctgaagatgaacaaccaaatgaccaggnnnntcgtcaagaagtgcctcggagaccccagggattcataacctaagggaatgaaaacaatgatttaccagagtcttcttgtagaaacgagaacagaagacaacccatgactagggaataggaaatccctcatggcaacgagagaaatcttgggacacctaggacaagtgggttgccaccgagacactatcaacgtctttctcgcactgacaacagggggcatgtatctaacctttcctaaaggagaaggcctgtacgtgacaatgcaagttcaagcccgggatgttcacaatctcgagattacactcgatctacgtgaagaagggatagacctcgacgtagtaatgatcgagaaagtatgagtcatacaagaagtagtcaatttgagagttactcaggtacaaggtgaacgagaaactatgattgaagatggccggccaaatcttcgtgagcaattgaatcgaacgaagcccaatttatgcaaacaactcaattccaatcaaaagcaagaggatccaatccaattgcgaatcaataagttagaaacaaattcaagaaatatcaagatgggaaactgcctgattatgactcagatgaggagcacaaacctttccatcc

SEQ ID NO: 16278 - DNA, 6703 bp, Cannabis sativa
  modified_base (3371)..(3379): a, c, t, g, unknown or other
aggatggatttgaaataaggtagacttaatttcttcacaagaaaaaggctcaagtaatgcacgattctcttcagtactaatccggcaaggaataatcctctaagagcttctttagtctcagtaccaccattagatttcgagaataaatgttgaaaatagcttatggcaatatcagtcaagtctttttcagatgttcgccaatgtcctcgatcatcatacaaccccaaaatggtgttcgttttcctcctagctgaagctttaaagtggaagaattttgtattttgatctccatgtttcaaccatagtgctcggcttctttgtctccaatacatctcccttttttcttccacacaattgagatccttttccaacttttgacgagctatccaatccatcatattaggcgacttggagagccaatcaatcttctcttttaactccttggatctagcaaagttagctttcttttgtttaatgttccactcatagagtctccttccacacttagaaagtaaatgattaagattatcaagaggcctacccattactttatccccccagacttcatttataatcttaaagcattcatcattatccgcccaagcatgctcgtaatggaatctcgatccccaatttcttcgaaacagactcctcttaccactttgttgagcttccaacaacatcggcctaggatctgaattccaccattttagaagagtgaccttgttaaatttaaacatgtccaaccaaaccgagttacataacaccctgtcaagcttttcatagatcaaattagaagcacgcccattacaccaagtaaaggaattcccagccgaagaaatttcccgtaattgacaatccgagatagcttttctaaaatttttcataaggtaatctggtttttgtcatcccttttttttccttctgactaataatttcgttaaagtcgctgccacatatccaagcattggtgaacatattcttagtctattcagtaacttccaactttccacccttcctcctggatccgggcttccatagaagccagtaaatcgccaaacgaaccctaagtcattctccaccaacgcatcgatatgagagaccgtaaaagacttgatctgcaccttgaaatcatcagaccaaagaagcgccaagcctccgctctttcccctagcatccaccgtaaaacatccagcaaagctcaattgcacccgaaccaactccattccacaactagtcaactaagtttccgacagaaaaatcatctcgggatgataatctttgacatgggatttcagggaattcaatgtccaacggttcccaagacttggacattccaaaacatggcaatcatggctctcagcaacctagatcatctaggttcgccgcttccattgtagagtcaaggttcaaatccaaattagtagaaattctccttgatgaattaccccgaacttctttagccaactccattaatttgatctcggcctgaccctccttccctttgttcttgagtctttttggagtcaccctccttctttttaaaggaccttccaccttattgtgagtacccaatctatcttcataagttatgggaacatccatcaaattaatattattcataaaagaatctgaactttccttccccaagattagagaattcaagcaactatctgtatccattgctgcagagccttgaggatttgtaatgtcttctcttacaattaaaattatcagcctcacttttacccttcatcttctccctaatcccatccacttccttaccgttgagagaagttctttccgagtcattaagagccaaccccgaacttaactccaacaacgtccaaggattcgaagaggaagctgaaggaactccaagtccctggccaggatccacgacagcagggggtaaatcttctgctaaagaaatgggattattggccttctgcacagagggagaaagagaaacattccgcaagattgtctttgcttctcgtttttcttcaacttttaaccagggaccatagctcggcttccagtttccaagaccatcatcatacatcttgggcgattctgcacaaacccgagtatcatgccccaaaaaatcacaattaaaatacataaaaggaagactatcatacctgaaagggatccaaatctttctgccttccgaaggaaagagaagccctgaaaaaatcggcttggttatatcgcaccatactttgaaggtgaagaaatccttggtcacgattcgagggatatcaacattcgtaacctctataacttcaccaaccatattcgccaatctatattgccttgagtaatcaagcgagaaggcaagtgaagaacgcgcccactaatcggaaaacacagcaattccttttcccaatcacacggcagattctccattctatcaagaatcagagttccataattaagtaaccaaggactcttgttcaaaattctgttcaaatcttgagcagatttgaaagagaagaccaagaaactggatttgttattgctgaatttaatttccactctccaattcttatcagcaataccccagacgcgtcccaaaatcgtcttcagcagaggacgactcatcggtctgttagaacaaaatctggccttcgcacagtgttccccgacaacagaaccctcgactacgttgatttcccatccatcttcatccaagacggtaagatttgaagttttggcaagaagatcatccatggtgttttcaggcttttgcagcatatcgaacggaagactcttctccaagagagagcataaaaatctttggtaaggtgtattgttcaaattaatttttaccttttaatgtctattgaaaatacataaaaaataactccacacaataatttaaattagtttttttttgaattaatgactttcttaaaaaaatacatttagactatgacaataaattaaattatatgattatttattgtatcatttttaatttaattagaaagtatctagaataaaactaagtatatataagtaacttgcacgtaatttttttctaatatcatgtaaatgtgtgaacatgtcattactcttagagagtttttatttgttttatttctatttcgaaaattgatttgtatatttattttttaaacgttaatttaattatttaattagttaagtaacaaataagtcattcttgcaagtcaataagatcacatacgacaacctaataataatgttgtccaatctacgcaaatgatcgatatataaaaacacaatagtattattatttatatattgaaggtaaacaatacgatttaattacacaatacattccaaattttaattaagctatactcattattattattattatnnnnnnnnntattattattattattatttcacacattaaacacttccaacaatggcattactatatttattctgaacatcccaaaacttgttccaaagcatcacacctccatactttttcgacttcttaatctttggaagaacccttgatttcagctcactcgccggaatgtaccctccaactttcccggctgcctttctcgccgccggcaaccccataaagatcttcttggccttagttaagtttttattccattcttcccaagacttaagaagcttcttaacagagtcagttttagaatcatactggcaaggaccattgttgtaaaactgaacccaaacatagtcaaaactcacagccttaagagcctcaccaacaaacctatcaggatatatgcactgaggagcagcacttaacaaaacaggccttttacttgtactacgacctttcaaaaacctagctagatcgtcgtagtaattagggtttccgagctcgatgtcaaaatctattccatccaaaaccgcgtcgcccaagggacgagagcttgacttgccacccaagaagttgtgccataagtagtcagctacttttttggcgtcggctttggaagttagagtgtactttccaatgccgccaccaatggaaagaaacactttgattcctttcttttgacaagcttttatacccttgctagcgaccctgcaaccacctcccacggggttgcagtggctagcaaggttaagctgcgggttttggccgttgccaaacttgttgagaaaggatatcatgacatatttgtaccttcctgacttgcaagtagccataagggtttcttcattacttgcttggccccagtagatggctatgccacctgcattggaggtttggactaagaaagctaaggttgaaatgataccaaggacaagaaatatgatcaattgttgagaattatctctagccattgtttttttttcttttctaataaactttttttttttttgtgtgtgtgatgttattaagcttaagctgatctctatttatagggttaaaaaccctcaataatctttagaaccatatacaataatgaatttgaagtcaacgttttgggttttttgattaaaagaattcgttcattataatctaaagtaaaagaagatcgattgaggtggcaggcaacctgatcaaacttcaagacaacgcatatatctattcatatataattatatgatatatggctccaataatatgctaaaaatgtggtcgaaatatatgggttttggaatttggataataattgtttcatcgaagaagacttgaaagtaaacaagagttataaaatgctactggtgcggctacatctatggaagaaaggatagatagatatataataaggagaaatttgtgtgattggtcatgtatatatgttgcttaggttataaataagtcgtgactcacggtagttggccttcttcacaagtcacaccagtcatggtagtctaatactaatataatactcatctttattgtcccatattaattatgtttataattaagagattaagtatattcaatgttagaataaaactatatagtttttgtctagtttcacacagattaagtttttgaatatattaaacatagtttttgtctagtttcacacagatttaatatagttttgtgtaattttgaaaaaaaaaagaatagattatatgtgattttatttcttttctatgtgttaataatttgtttgattttttgtggatatatataatttttgtgtatgtagaaagtgtgaatttaagatgtattttgaaatttttggagtgtttggttttaaaatttttggatagattaaaatgtagttgctatgatactgaaatttcggtagaattttgagacaattaagaaatatcatgttaatttgataatttataataagtttgtcaatccaaaaattttccttagtgatgtggacattaatgtttgacacgtggcatggaggatgacgtcacaaagttgagtagactcgagtcatagcagtcaacttgtgagaggaccctagccctacgcccaggttgactctaggatctctagaatggaagttcggactttaataaatttaatccaacccactatctttcagtattttgtaccatgaatacatggagcgacctaatgcaagccccagagctgaaattacatgaacctgcaacccgaaagacaacctgggcacctagggtttcactcggcgcccaagttgacatcctcaactagggtttcagtttttgggaccgtattagtgtaaattggtcaaaacttcaacggggacatcaactagacatacctcaaacatatttgaggcatcagaatcaaaattggagcatgttgattttttggcacccaaggccccgagcccccgagcatctagcgcctaggttaacaatccattaatctgagcacctttcgagtgttcaatcaaagatccaactttcgcactgaatttgtcttcattcaaaattgggaaataggtcattctggagatcaattcttgggtaaaatagctcgacccatcacctaggttaacattttgtcacctgggctacttaaaataaagtttttcaggaattctttctagcatcttctccgtcttcagaaaatattgagattcaaatatttccgtggaccaaatggaattttcgaaggggaaaaactaggtcccagcgcctaggttgacacccatggaatgtcaacctgggctattttcgatctagttcagcataatgtgttctgggcattttttacatcattaaaaataataaagaatcaagtaaactcagggagaaaataaaaaacccgagtccctagaaacaagacccagtgcccaagttgacctagggctgggcccagcacccaggttgacaatcaacctgggacgttgcattcaattactaaaatgctaatgcgaccattgaattcgacatggttaaaaatgggggaagagacctcctcctcaagtgcagaagcctggaagtatcaaaaatgaaatcccagaagctcgggagaaaaagggcccaacgcctaggttaacaaatggcattgtgcgctgggttctatttatacaaatattatgccgtttgaccgtctgtctagtttttcacaattacaatgatatatgaagtcagaagaattaaattcacaactttttatttctcatttccaggacactcaaaaaatgaagagttttgagtctctcatttcgcaaaataacaacatctctgagaactagtgataaacttcaccagaacatacaaatggactaagtggtgtcaaact

SEQ ID NO: 16279 - DNA, 11375 bp, Cannabis sativa
atctggaaaagaacaagatgctctagcaagattataaacaaccatgttagcatatcgtttaataaaaaataagaaaacattgtttaaacctaaatgaagaaagcataggataataaatttcgaataacttgctaccaagcaatctgactctaactccacttttcgcaatggttaagttttaatccagcttaatgcttcttttataccaattgatttagccaatttctgagcgcctataccaacaaaactacccgacttagccatcactaatactcattgagagtctcaagcgactataccataaccaaacgttgttcgatcacgaaaaataacgatatgacaccgaacacagtactaaacaccagtaccttctagcatttctctaaaaataaaataaataatattacaaaaatacataatttatctatttttatttattttcaccaactttatttatcaacatctttttcaccaacctaaaatacatttgaaaaaaaaatcaactttttttattagacaaatatactaaataattatatatataatttgaaaaaatacttattattattgttatgtattttgtaaggctgtacataaatttttgtaaacctcacaacccgaacaacccgctcaaaccaaaccgagataacccgacgaaaaatataaaccgaaaaaccccacaaaaatataactcgtccaatctttatattgggcgggttgaaaataatataaagccaatcaacccgaactaacccaaccaacccgactaagagaattttttttatatatattatataatttatatacatatttataaaaattaaaaagttaaaactactatatttttttgatgatgcatgatttgattagtgctcggtttggaaatgttaatccgactaaatcgaagaatttattgggcggatttgaattttttttttttcttaattggacaagttgcacttaagtttttgtatcccgataccgaccgatgtacacccatagtattttgttcaagtatatatgtaaaggttagtctagttttttctgaagttattagaatttctctctctcatactcttcttcttctttctctctctctttgggtctctgcgtgggtctctccgtgtgttgtttgatcccatcaaaaccctaatatttcaataatcaaaccacaaattcattctcttcttcatccacaatccaattccaccatccgatcattctcaatttcacaaaaccctacttcactcccccccgaatttttgtcaattttgttttaatcttcactcgctatctctctctctctgcgtttcgaccaattctcattggtttgagggttgatcggttctcaatcgctgcattattctttcgtgcaatgctatcggtttcaacatgaaattgaaacgtaggagggcactcgaagtggtttttttttttttgattttattttgttatttaattaaattaattgatttgatgatatctgtgaaaatatgtgtgtatgcatgtttgagtggttatggtttcgttaacccttttttgatcagttttttttttttttttttaaagcttcgaggtttatgagttttgtaataataatctaataagggtttttgtttatgttatttattttgattgtttgatatgtgtatgcaattaaagtctttagattctttttatttcaattttgaaaatgaagagaaaatctttagaggaaagtgcaattaattgagtatagatgttgtactgatagaatagatatgtgtatatatattatgttttaattttctaagtacaggcgatttgctgaattaaacaagagttattttatgctgtttctctgttttgcgtggaatttgagttatatattatataggaggttgattttttgtgtaagattatggtttgtagagaataataaacatggcttattttgagggaaaattaatgagcaagaaatatggagattaatgaacaaggaatttaagtatgaagtttttttagattgtacggacagatgacaattcatgaattgtattttttaagatttccatttccatacttttggaagtttagaagaatagagattttctttggactttgctaacgtaggcaaaacaagggcccatagtagttagaatcaagccaattgcggtaaacatgatataacttgaggcaaattttcttttagccaattaatccatgtgtgactgtacaacttgagtacaatttggtccaatgtggcacttgcaaggacgggcaatatgaatgttgattacatagttttgtaggcttttaacttatatattcaattttttggtggtgtggtagttcattttagagtcttaatggcttttttttccctttttcttttcagaaggtacaattaatcttaatgctgttttttgttttgtgtttttttttaccacaagattaatttgtcacagaaaaaaaatagacaatgtgaaataattgttttattcatattatttcatgctactttacttaaattctcagcaagacataatagagcttttcaccattatgattctctctagaagtagtagttatcttatgttttttagttgttgcgagctaaatttctagtgaaggtgaattgtagaggatattatgattttttttttggttgaataatggaggatattattaggatatttacggtatgtataattcgttaagttctctttgttaaaactgtatttagagtatttcccaccagaacgaagtactcacctaaaatgttttttttcttcactgacttgtgtaaaattaattgtgtattatatatatatttatgtaacataggaagagctttctattctgatttatcttttcttgtgttgtttctatataaagtggttttttttcttgatgttgtttcagcctccaaaaatcagatctttcattaatagtgtcactgctgtgccacttgagaatatagaagaaaccctaaagggttttgtttgggagttcgataaggtgcattttttaacctttaactatcacattttcatggttacttttatgctgtttggctcattcgttatctacttgatgcagggagatttccatcattgggttgatcttttcaatcactttgattccttttttgagaagcatattaagtcaaggaaagatttacagattcaggatgattttattgattcagatcctccattccctaaagaagctgtccttcaaattcttcgtgtaataagaatagttttggagaactgcacaaataagcacttctatagtacttatgaggtatattttcattgttatcacttgtattttgggaagtccctgtttctctcctgtgcttatgtttatgttttctctgttattgcagcagcatctttcatctcttcttgcttgcactgatgctgatgttgttgaggcttgcttgcaaactttggctgcgtttctgaagaaaaccattggaaagtactcgatcagagatgccaccctcaattcaaagttgtttgcccttgcacaaggttggggagggaaagatgagggtcttggattaattgcttgtgctgtacaaaaggattgtgattcggttactcaggagttaggttgcactcttcattttgagttttatgcactgaatgatgcttcaagtgaaaattcttcatcacaacatcctggtctacagataatccatatgcctaatgtcaatgatcggccggagactgatcttgaacttctcaacaagttggtagcagaatacaaggtgcctgctagtttgagattttctttattgacaaggttgcgttatgcgagggcctttggctctttggcttctcgccagcagtatgcatgcattcgtttgtatgctttcatagttcttgttcaagcagcaggtgatgctgaggacctggtttccttctttaatacggagcctgagtttgttaatgaattggtttctttattgagctacgaagatgcagtacctgaaaaaattcgaattttatgtcttctctctttggttgccctttgtcaagatcgaaccagacagcctactgtgttatctgctgtgacatctgggggtcaccgtggtatactatcaagcctaatgcagaaggcaattgattctgtcactagtgatacttcgaagtggtctattgtttttgctgaagctctattgtctcttgttactgttctggtttcatcatcatctggttgttcagccatgcgtgaagcaggatttattcctactcttttgcctttgcttaaagatacaaacccgcaacacttgcatttggtcagtactgctgtgcatattttggaagcttttatggattacagtaaccctgctgctgcattgttccgagatttgggaggtttagatgatactatttctcgcttgaatgtggaagtttcttacgtggagaatggcccaaagcagcaagttgaagattctggtagtagtgggaggagtgtgcagttaatccctggtgcttccactgagctagatgatatgcaacctctttattctgaagcattagtttcttatcacagacgattactaatgaaagctttactgcgtgctatatctcttggaacttatgcccctggaaatactacacgtgtttatggttctgaggagagcttgttgcctcaatgcttatgcataatatttaagagggctaaagattttggtggtggggttttttcgcttgcagctactgttatgagtgatttaattcacaaagatcctacttgttttcctgtactggatgcagcaggtcttccttcagcttttttagatgctataatggatggtgttctctgttctacagaagccataacctgcataccccagtgtttagatgccctttgcctaaataataatggtctccaggctgtgaaagatcggaatgctttaaggtgctttgtgaaaatatttacttctaggacctttctgcgggccctcaccagtgataccccaggttctttgtccagtggattggatgaactaatgcgccacgctgcttcattgcgtgggcctggggtggagatgttgattgagatcttaactgccatttcaaaaattggaaatgggcttgatgtttccagcgtgtcaagtgatccatccagctcggctcctgttcctatggaaactgatggagatgaaagaactgttgctgcttcagatgataaggaatcacccaagatggatagttcagagcagactactgaagcatcttctgattcttcacaagtgaacgtggaatcattccttcctgattgtgtaaataatgctgcacgccttcttgaaacaatacttcagaatgctgacacatgtcgtatattcattgagaagaaagggatagaagctgtattgcagttatttactttgcctttgatgcctctgtcagtgtcagttgggcagagcatttctgttgcatttaagaacttttcaccacagcattcggcttctctagctcgagccgtatgttcttttttgagagagtatctgaagtcgacaaatgaactcttagtttctgttgggggggctcgactttcctcagttgaatccacaaagcaaacacaaatcttaagatgtctttctagtcttgaaagtatcttgtctctgtctaactttttgttgaaggggactactactgtggtctctgaattgggcactgctgatgctgatgtattgaaagagctagggagcacatatagggaggtcgtttggcaagtttctatgtgtaatgatatcaaggctgatgaaaagagcactgttgatcaagagcctgaaaatgcagaggcagctccgtctaatgctgctgctgctgctggtagggagagtgatgatgatgctaatattcctgtggtgagatatatgaacttagtttctatgaggaatggctctcagtctttgtggggtggtgaacgtgaatttctttcagtttttcggtctggtgaaaatctgcatcgtcgtactcggcatgggttgactcgtattcggggtggaagggctgcccgtcatctagaggcattaaacatcgattctgaagcttcttctaatgtttcagaaaccccttcacaggatttgaaaaagaaaagtcctgatgttttattgcttgaaattcttaacaagctggcttccactgtgcgttctttcttcactgctcttgtcaagggtttcacatctccaaatcgtcgtagaactgactcaggttctatgagttcagcatcaaagactcttggaactgcacttgcaaaagttttccttgaggctcttaatttttctggtcattctactccagctgggcctgatacttcactctccgtgaagtgccgatatcttggaaaggttgtggatgacatggctgccctcacatttgacagtagacgacgcacttgttatactacaatggtcaataatttttatgtccatgggacctttaaggagctgcttacaacatttgaagctactagccagcttttatggaatttacccttgtctatgccaacatcagcaacgaccagcaaagaaaagactggtgaaggaagtcaattatcccacagtacatggctgcttgacactttacaaaactattgcagattgcttgagtattttgtaaattcttctttactgttatctccaactgctgcatctcaagcactgcttcttgttcagccagtcgctgttggactgtcaattggactttttcctgtaccaagggaccctgaagtttttgttcgaatgctgcaatctcaggttctggatgctatacttcctgtatggaacaaccccatgttccctagttgtactcctgggtttattgcttctattgtttcacttgttacacatgtatattctggtgttggagacgtgaagcggaatcgcaatggggctggtggaaatgcaaatgtacgcctcatgcccccaccacttgatgaaactacaattgccactattgttgaaatgggcttttcaagggcaagggccgaggaagcactcaggcgggtggaaacaaatagtgttgaaatggccatggaatggcttttcagtcaccctgaggatcctgtactagaggatgatgatctggctcgagcactcgctctttcactggggagttcatctgaaacatccaaagttgatagtgttgacaagtctgttgatgtgatagcggaagagggtagtgtgaaagcacctccagttgacgacattcttactgcatcagttaggctgtttcaaagtagtgacacaatggcattcccattgacagatttgcttgtgactctctgcaatcgtaacaaaggtgaagaccgcccaaaagtcgcagcttatttggttcagcaactaaagctttgcccgctggatttttccaaagatacaaatgcattgagtatgttatcacatataatcgcgttgcttctttttgaggatgcaaatatgagagaaattgctgcacaaaatggcattgtatctgctgcaatagaaatcctgttgagcttcaaggataaaattaagtctggtaatgatcttgttatcccaaagtgtgtcagtgctttactacttatattggataacatgctgcaatcccggcccaaaatctcgtctgacagtactgaaggagctcctacaagcactgaattatctggagaccaagtttccctgtcatctgctactggtacagagaaaagatcggtttcagatgccaatgaaaaagaatcaagcccgtcatttgagaatattttggggaaatctacaggttatttgtctgatgaagagagtcataaggtgttgctagttgcctgtgacttgataaatcagcatgtcccagctgtgattatgcaggctgttttgcagttgtgtgcccgcttgacaaaaactcatactctagctttgcaattccttgaaaatggaggtcttgctgctctttttagtcttccaagaagctgttttttccctggatatgacactgttgcttctgctattgttcgacatctcctcgaggatccacaaacattgcaaacagctatggaatgggagatacggcaaagcttgactggtaacaggcattctggacgtgtctctgcaagaacttttttgacgtcaatggcaccagttatttctagagatcccgaagtttttttgaaagctgcagctgcagtttgtcagatggagacatcaggtggtagggctattgttgtgttaacaaaggaaaaagataaggaaaaagagaaaccaaaagcaacagctgctgaagctgggttgtcctctaatgatggtgttcggatctcagaaaataagacaaatgatggatcagtcaagtgctccaaaggacataaaaagattccagctaatcttactcaagtaattgatcagctgcttgagattgtcttgaaattccctttatccgcaagtcaggatgaaggctccagtaactcatcttttatggagattgatggaccttcttcgaaggttaagggtaaatcaaaggttgacgagacaaagaaaactgattctgaatctgaaagatctgctggtctggctaaggtgacctttgttctcaagttattgagtgatattcttctaatgtatgtacacgctgtcggggttattcttaaacgagatttggagatgtctcagctccggtcatctagtcaacctgatagtcctggatttggtgggatactccatcatgttttacatcgcctgcttcctatcaccattgataaatctgcaggacctgatgagtggagagaaaagttgtctgaaaaagcttcttggtttttggtagttctttccggccgttccggtgaaggtcgtagacgggtgattagtgaacttgtgaaagctttatcctctttctcaatgtcggagggtagctctgcaactactgttttattaccagataaaaaggtctatgggtttattgatctggtttattctattttgtcaaaaaattcatcctcgagtaacttacctggttctggttgttctctggacatagcaaagagcatgattgatgggggaatggttccatgtttaactagtattcttcaggtgattgatttggaccatcctgatgctcccaaagctgtcaatctcatactcaaggctttagaaagcttaacgagagctgcaaatgctagtgagcagattttgaaatctgatgggttgagtaagaagaagtccactgggttgcatgagaggtttgatgatcagttagctgcaccatcagctgagaatgtggaacgtaatcatgatgcaagcagtgaacaagccagagatgtaaatgaaaatgagcagcacaatcaagaaacttctcaaggtgaaggtgaccatcgtgcaaatgcagatcagtctggggaacaagaaatgaggatagaagttgatgaacctattgccactgatgctcaagtggatctagggatggattttatgcgtgaagagatggaagaaggtaatgttttacagaatacagatgaaatagagatggcttttcatgttgagaatacgggtgatgatgaaatgggtgatgaagatgatgacatgggtgatgatggtgaggatgatgaggatgacgatgaagcggaagacgaagatgaagatatagtggaagatggtggtggtatgctgtcgctggctgatactgatggagaagatcatgaagatgctggtttgggagatgattacacagaagaaatgattgatgaagaagatgacgatgattttcatgagaaccgtgtcatagaggtaaggtggagagaagcccttgatgggcttgatcatttacaggtacttgggcaacctggaggtccaggtggtcttattgatgtaacagccgaaccttttgaaggagtgaatgtagatgatctatttggtctcagaaggccaattggtttcgaacgtcgtcgtcaaacgggtagatcttcctttgagagatctggtacagagaatggtttccaacatcctctcttgtcacgaccatctcaatctggggatctagtttcaatgtggtcagcaggtgcaaacccatctcgtgatttagaagctctttcctcagggagctttgatgtagctcatttctacatgttcgatactcctgttcttccgtttgatcatgttccaagcagtctacttggtgaacgtttggggggtggtgtagcaccacctcctttgactgattattctgtaggaatggactcattgcagttgcctggacgaagagggccaggagatagtcggtggactgatgacgggcagccaccggcaagtgctaatgcagctgctattgcacaggctgtggaggagcagttcatatcccacatgcgcagtatttccccagctgataattctgatgaaaggcaaatggcccaggtttcggcaggtttggagagacaatcagatgccccttcatcaaatgatagtcaaatagcagtagagcgtgaaaacagcagcagcctacaaagtgaaggtcagcttcaagatggtggtgatcaaaccacacacgaactagtaaattcagtggctgaaaatgctcccaatgaacatataactttagaatctgttgatgaacttgcaggggaatgtcagcaaccacctgagcctatgatgattcaacaaccttccctgaatggtaccccgaatagtcatgaaagtatggagcttggtgagttgaatactgctgttagtgaacaagctgcaacagttccagggttcgtggaattgactacaaatgttagtgctgagcaactaccaggagggggctctgaagtgtctcgtgatgtttcggtgcagactgtgggttgtgagacatcttctagatcagatggtcaggctaatgcttcggtggattctggtttggatttacctgatccctctgataacaacacttctgtaatgccacaaaatgatgatgttgacatgaataatactgatgctgaaagaaatgaaaatggtgaagctgaggctcctcccgagcaaggtacagctgagccgtcaacagtgcagaactcagaagctaaccaggccgaccaagctaatgctagtaatgatgctgctggtgcaaatgcaattgatcccaccttccttgaggcactacccgaagatttgcgagcagaagttctagcttcccagcaagctcaatccgttcagcctccagcatatgcacctccttctgctgatgatatagaccctgagttcttggctgctcttcctccagatatccaagctgaagttttggcccaacaacgagcacagaggattgcacaacaggccgaaggacaacctgttgacatggacaatgcttctatcattgccacttttcctgctgatctacgtgaagaggtttgcatctgcatttttcttgtcttctttttta

SEQ ID NO: 16280 - DNA, 9628 bp, Cannabis sativa
  modified_base (3900)..(3904): a, c, t, g, unknown or other
tcggcatgcactttgccaagtcacccgagatgcatggcttaaaggtcactcgacatgcacttcccaaaagatcactcggcatgcactttgccaagtcactcagcaggcatgacttgaaggtcactcggcatgcacttcccaaaatgccactcaacatgcactttgccaagtcactcggcatgcatggcttgagggtcactcgacatgcacttcccaaaatgccactcaacatgcactttgccaagtcactcggcatgcatggcttgagggtcattcggcatgctagctttgaagctcgctcagcatgtaacttctgccattgcacaaagacataaatatactatgtgaaaatttcctaagtatgggaaatgaaggtaacaagagtacagccacaagaacaatgtgtgcatgcaaaatgtgtacaatcacgcatttccaagctctgaaagcaaggaggtatgagtagtggaagcatcactcctgcatacccgacaactaggactctacagccactactcttgtgacccgagatcacctggcaccaaacaagggtacgaggtgcaagatcacctcctgcgattcgcagcctgaaagtgacagtttgtctctttaggacgaccatgtaccttaggccactaggtcttataaatatctctctctcagaactgagaagagattggaaaatcagtctttaattttcgagccaagaagttagttgatgaatgttcactgtcaataatttggcaccatctgtaggaacgatacgcttaagtcaagtcgtttctttacgcgcaatcatcacaaaaatgcctagacgttcccaccatcttcaagatgaggaggtacgtctagacgaaacttagcttatcacctcaaggcgaggtcctccaacacttgttgctagagaagagggtctaggcactccactctatagtgatgctaagtacattagtgctccggtcaagttaatttctatgggaaaggaacactattattttatatttattttctaaaatatactagtgtttcatgaagacttgaatcttaacttccaaattattaatgttctacttattatgtgatcactataagcttgactagtcatttttctctcagagaagaatccttttcatctaatttcttgaaaaggcatgaacgttacatggcgcatattaaatgtgaagacctaactctctcattaaaaaaaatctatcccgaggagcccgacccgttattgatctatctcgaggtctagcatttattgactttttcaatatattcagcaccaaaagtgtggacataaatatatatataaattttgtgagaccgaaaattcaatatatacctaaagaatccttttctccctagtgcaatttatttagacaagtaggaactcatcatgatatgatggtgaaattagattatgttgtcttagacattcttttcttttttcttgtgacttgtgtgataattgataattccaatactctattatttttcagggtgactggccgtaatttccaagcaacatgaggtgaaatcatttttggacggcttatcgaataataattaataataatgataataataacgacaatgtagagggtgtcagtgtcactagctggttaggttgctcccgtagtaacactgttatgatcacaattcaggatataataatgtagtagaaaagtattaagtactcctccaacgagctagtcaatatctataaataaataaattacaatcccaaaatttccaatggccgacaatctctttctccccagcacatgctaccacaatacagagatgaccctttttcaatggatctccaatttctctattgttaatcaacgtaccaatatgttttatttataaagtgtatccaagtagtaaaaatgagtattattttgttattgattcctatggattcaaggtacgatttttagccttctgcattcctactcaaaatctaacgattgcaagcatagaataacatctttaatctggcaaaagctgataaaaaaagaataataatatatcatgggtttatcttttttgtattttttaaatgcaaggataggaggactactttctaaactgtttttagtcagaaggaaggaaagccacatccacctttgctcccaattgtccaaacccatcttccatcaaaggagaacccaatgactgaaaatttttattggggttggaaaatacagagaagataggtataaactaataagacataaagaacatattttcacatatatattattcaaactaggtgaaaaaaaaaaaagttgcgtcgggtgcataggaataagaaaaaaggagacgaaaaaagtggagctaactagcgtggaatgtttgggtgatctgcattatgttgatcctgctgggcccttatcttcttggctagtctccccgccggcgaagaagacaccgacgatgatgccaaggcccaggagtcgttcgagctgtcagagctaaacaacgcatccatgacgccgcttgggctacctggaattaagccaaacttgcgcttgttcgattggttgcctcggcagattggaggtgccaactccaatatgaacttacaacaaccctctgctttgtcctgttcaatgaggaaaagattacagtatgtaaaacgatcaaaatcgttacatggcattgggaaaatttattaaaacagttaacgaaattaccttgtcgattctgagaatccccaatagttgtttttcgtactcgacttgaagacagggctctatactactaactacatgcagcattgtagcagtagccattatagatggaaggaaagacttgaatctagaatctacaaagtaatgagtgcccccaaggttaaattcaacgaataatgtatcactaatcctatttatttatttttgtgttctgggaaatgttatttcattcattcatgtatgaacattttttagatttggataatatgactcacctgttatgacagagagaacaatgctttcacatcttttaaggaattcccagcagagatgatcttttaagccaagtctccgaatgatgaaatcaagaaatgaaattggggttacaggattcatcttccattgaagagttgacagcaccaaaagctccattcttttaatcgttttagcttcaaagaagaacttgctttcctccacctaatcggataaagaatacccagatgatgataaggaaaaaaaaagatttgatttaaaaaagaaatagtaatcgagatatagcatcagaatcaaggaatataaacctacttgcaggtcttgtaaaagggggacgtgggtctcttccactttggcagccagagaaagacaagtcacagcagatagctgggtcatccatggcttctctgtctgaaaatggaagctaaggagaaacctgtcgagataatctacagcaagaacggcagtcagagcagagaaagagtagtgagctacgactttaagaatccactccacggcttctcgacgaggcttcaacagagatagattttttagaagggtattactgttacacagttgattttgcttttctttagagagtaaagtgattaactcgtcatcttcccatacaaggtcttggtcaagcaatattggtgggtttggtttaatgtactcattattgctgcaataactttcttccactacttccttttctaattcttgggaaaagtctactaccattacttcttcttctaagtgctcctccgagcaatacagagcgtccaagacagagattgattcttgaagctggtcttgagccatcttcttcggagaagaagagatttgggtttaagctcattctagacccgagaaggtgaagaagaagaaggaagagagcttaggcatctctctctctctctctctnnnnntctctctctctctctctctcggtataaaaaagaaagaataaaaaggttagagggatgggggtgagctgaagccaaagattgaaagaaagtgtttttattgtgggtttttcccattttcacagtgggcaagtgctttattttattgggggcttcttggccattaggccaccaaaacgtgaatcatgggccatgcagcacaataagtcgacacgtgacgtttgtacctatacactgcagtgggggaaaatcctaccttatggaattggtcccacgctggacaaaactctcagacaatgctatggaccgtttgatcttcgtatatattcttatcatcacccaaccattgttaccatatagaaaaggaattacctttttctaatcagcagttgtaaatacaaaattggactattggaggattgattcacaaaaatattaatgtgattattttcttcttgttctttcttttaagattaacaaattattaaaaatgtgatgatatatatgttagctgtagtacaaagtatgtaatgcaaccataccctgtaagtgtaagagtaaagagttaaatctaatatacagtcttaatttacatatgcttcattttacaaaatattctacacatttatctatattaaattctacatttacaattatatattcattaatgtattcacgtttcacaacatagttaattactttattgatgatgttaaaataatacaagaataatattgatagttaagataaaggttaatactaaaaagcactagtggggtctaacacccttttaggtacgtcaatatcgctattggtccgactaagtattgggtcctataatactattagtgtctaatagcaatgctatttagataaaatatatattgaacatataatcgttttgagtgataaagataatgaaaaatcaaaatttggtgataaacattaaaggaccataaaaaaaaaaaaaaaaaaaaaaaaattaggaatcatggtgggagtaaaaaaaaatgaaattgaatccaaataaaggtaataataataataaataataataataataataaagaatattaaaaatatacagtgtgttagtgtatttcacttatttttgcttcttctttttttcactttttgattgaaatgaaggtcattcgggtgggtaaattggtgctggcgggagcgtctctcactcctcacatattccaataaatgaaaataacgtttgatgcagtgatgatgacagaaatgtttttaagagaatttggcttgtctatgtaagcaaagagtattcaccttatataagacaacaatttcaattacaaaaagggccaaattttgtgagatgagacatcataattttaatatcccgactcgaaccatgttatagtctcacgttactaaattgtaaatatgtatatatattactttaaaatgcaactactcatcccatactcatttcattatcaattaattttaaaataaaactctatgtaccttattaaattctaacataataccaaaatcaaacaaaacttttaacgatccaaatttaataactggtctaaaaagacgaatcaaaaaaaattatttgtaatctgttgtgaatcaaaaagtgatatttgttatcgagtcgttcaacaaatataacaccatatataagatgcataagttactcttttcatggtcaattagttttgagataaaaccccgtacaccttactaaattctaacaaaccaaaataataataataataataataataatctcgtttttaactaacgacgctgagtctttaaagcgataagataacagataataattaatataattaagcaataagagcaccaaaatttatagaagtttaagcccgcgataatggtaatagcctacccccttttacttatattgcttcaaagaattatcgagatcacaaggagctgagcaagtgagttttccaataattcttaggaaaaatttacaattattttgacagcatagtagctctcaagaacatatgatttttcctcccaaataatgaaatgaatccactatttgtaagaaaaaataatacacgaattaggtttcccaatacaattaggaataaaaagggaaactaagttaatttcttgtactccctattaatgcgtgtcaaccccgtgataatacagatttaattgagatatatatgcagtcatatttatggaaaatatccttgaagagttctcttttttacgtgttatatatcctgctctgaggattcgacatcattaaatggtgaaggcctgctcggacagtcacgaaatctctctgggcgaagtattgtggggagaccacccatctggaccttgaaatgttctccacgtgtcacttccattaaacgccacatcaccctgtgcaaaaattaggataacatttgcccccaagtctgtgtgggaactatttgctcatacgtggacttactcggctactgagttagtgggatgagtgacacgtgtttggctttcatactccgtcttgatttgatgtgatctgattgcagcatacgaagatatagctgacctttcggtatcttgggcatttaatgccctaccttaaaaaatagaccttgataggcgcaatagtggttattgggtatcgcgtgcctaatgcttgtgctcttcaataaataataattttctctttttgggaaaaaacctaaaatttaaattcaaaattactgaattacacaattgcctataacaagggatttatacttcctttacactttttcacccattttgcttattagaatatcagagcaaaacaaacttcttctttttttttcaaaatctcgaagagttcttgtcgaaattctattctgtcgaagccattttcagagacaaactttgggcatttctcatgaaatcataaatagtgagtcagttttctcacctgaacattttttctttcagtttatgcattttatttttttcttcaaactgttctttgaaactagaaattagggtttttaattttgaattcagtacacatgtgcggttcgcaattcttgatttcaaaattgatcttaaattacttttgctaaaaaaaactacttaaaaatgcttgttcggtatttttgtacattttctgggttctttccatgttcttgaacctttgactttgtgaatttattattaggatgacatttcctttttcgaacatttgaatccatttggtaagagcatcagaaatgtttttcccttataaaaatcatgtccatttgtcaggttcttacctctctccttcttttgtagatgaattttggggaggtaagcattagatagataatgatctgctccaattgctctacaaagaccagcctagactctgtgcagctttagcatctctgagtgataattcatcgactttgagcttcgacgagtgggaagtctcaagtaactcttcagagtctccagagcccgtcgttcaacacattgttaccccagccagattggcagagaggggtacgcaagatgttaacgcagatttttgttaactgataataagccttttcgtaataaatttaaacacagaaattataaggaataaataaagtatgaattatatataagtacaccagatatttttacgtgattttatagttaaatttaaatactccacgagtatatcttattcaagatattttctgagtattcaatacaatatacaattgatcgtatttatgtttttcctctaaaattctccgtccccctttttctgtgggatctgcccctatttataagaatataggttggcagttatttacatttaaattcgaataataattgtttaatgaaacgtgttggatagcaattaataactggataactgcttctgcttgttattcttatccttttaatggttaatgctgatttggataatagtatctcacttggtttgtcgatgcttaatgttgatttggacaataacatctcgcatatctccaagttgttgtccttgtcttttataatgtgaaaagaaaatgctaagtattaacagatgattcgtctcgccaagtttcttttgaatagcgaggtgaatgtcacacttatttataatctgaggttgctttgcataactatatttattcttgcgaataaatgagatcttcttggacatgtgtagttcgaggcaggtatgtgtctcgtcgatatatgttttaataattttctatgcttatctcgtttatgactacatagtcagcgagttatgaatattctctattaattctttatttaacgagttatactcttccttcgcattaaatgatataaattcattatacatggtggttcatattccactacttgacatgtgtcatcctctaaagtgtagccaaattttgggtataacacaagatttatctaggaatttaacaaaggttggaagcaatacttgccagccttgtggatgtatagggtccaagaagatgttctagacatgtgtctggagggccgtctagagccttcgaggaaaacctccatgctagcggagatcgcaattaacattgcaaagcatactataaaactgaatcatctgtccaaacgtaggaaggtggcaaggactaaatagaactacaagaagatctcggtcgtggacccacactttgcttgactaatggcaatggccaatgcggagcatgctgaaaattttgaagaggatgctaaaatttccattggtggtgaggaggtacaatagaggaccaaggtaaggtccgtgtagctggctctgaaggggaagaagaataggttgccaccatggctataccaatcgaagggtttaacgagatcagagacctcgtctcggagcttcaggatgtcccctaattggtcaggactacgttaccgaagagctcgaagaggctgttcctgccaagctcctaaaaaaggttaaagctcggtaggtttcacctttgtccacactcacaccaaagagattgatggactttgaggccaatctctgctgtcgtctaatctgttgattaaattgcctgatcagttcggtcgcttgcctggatcgattatcaatctctgcttgtcgagctctcaagatcttagtttgccgatccatccactcctagaattgacatttttattgttcaaacgccaggttcatagctgctcgggtatcctcctgattatggtgaagattgttggtatgattttgcacttgccccaaggcatccctcaagttttgtaatttagtatcatcgccaatctccattcaaggctctccaatgagtggctctctagtactcgacctagtttctccagtgtagtgggtgctggtggttccagtttcttacgtgctcaaagtgaccccagcctgaggggttgttacttgtaaagactcggtttgaccgagtcaaatattttttttatatatatataaaataataaataaataatatatatatatgtataaaaaaaattattatatgtaataaaaactgaactcttcgtccccccctctctctatctatatttctctctttctctctctttgaaatacaaaaataaaacccataaacctccataaccacctcactccggcgacctatctccggccaccccctgacctcacgcgccggaatactcagacctcctagtgccggcgacctcaccccccaagcggcgccgctcctctcgccgccgttagcttaggatcgcaagtcaaagtttggg

SEQ ID NO: 16281 - DNA, 2640 bp, Cannabis sativa
ttattgcttatatagcttgtgaataacatttgtgaatgtagtaggtttcattctgtgattgaaacctttaaaattgttagataattttcattgaattgcttgtatctactcgcagacatcacttgattctgaatccatagatgttgctgtcttttgtctttcgcttatgggaaccaacttctcaagttacctacaggaggcatacagagttctgaagccagggtgtgcaccttataccttcgaaaaactttcgatgatcttttatgttcaattttcatatctgtaacttacaaacgttggttatccacagagggtggcttttaatagcagaagtaaaaagtcggttcgatccaactagcggaggagctgatcccaacaactttaccaaagccatttgcgagctgggattttcatcggtttcaaaggtattttcattttactaccataatcatgttttgcacaaattgataatactagcctcgatatgctgacagattctatctcattcaggactttgctaacaagatgttcattttattctacttcaagaaaaaagtgagctttttcgaaggctgtacactcgattcatacattgattttgtttgctgttgataagggcgttgttagtaattactcgcatgttttctgcaggaagagcaaaattcaacgaagaagaagaagaagaaagatattgaatggcctgagctaaaaccttgtttgtacaagcgccggtaagacaacattaaaagggtttaaatgttcttactctttggttgttactttgatagttatgtaacataaatactcaactcaagtgctgagattttttctataacaatatagtttggtatgaaaattcattatcttttatgattcttttatttatagctgtgaaaattcaagatacctttactcttactaaagttattatctctagatttcattctatgtacttgtgtggattgttttgtcgcaaactatttatagatggaagacaaactaagtattaaagtaataatttaatgaattctccaacttatttttacttgaatgtttaaaagttaattaatgacaaaggattatgaaactagtgttgataggtatcaaagtgtttttttttagaaaaaaaaagaaaaagaaatataaagaggttcattgggcacatgatttatatacatgtatacactagttgatgtaatggcttgtgctagatcatactaataacaaagaaaaatcccatttataattatgattaaatcaatcatttttttggggggggtttattatactagttgtagttggtctaatggcttgtgttttgcataattttctgtttgaattctgtgttaaaccctgtgtttggtaaagaaaaataaaacattaatcttgggacttattttctctcaaaacatttgagcatagtatgactagaatatttagtcagatttggaactcctcaagtttttctttgagaggcaaaattatcaacgaatcgtgcctaaaagtttttctttattttatttttaaaaacaaaaaagaaaacactaacaagtccttttgaatttcccttatgtaaaaaaaaaaagaaggaaaaaaaataaagagtatttatatcattgcttaatactgtgtctgtaagggtttggaacaaaaattagaaggaatttaagggtgttttttgtgtatagtatttaataaacaagattttgatcaagggttggttctatggtgtagtggttagcactctggactttgaatccagcgacctgggttcgactcccggtaggaccttctttcatttttattttttttgtttttttttttgttttgatcagaacacttgagaattaaaaagaaagaagtagagaaaagtgtgtaaggagaggtattaattataatgtaatatgtacggtcaatcatagtcatatcaatatacttatatgtatatgtataaatgtaatttggtttagaatacttaaaagataaagtatggtattttaatatatcactcaactaaaaatagaatatctatatttttaacatctttttcttctaaaaatattattatattttaaaaaattctctctctctaactctctcactttaattaggtcttgttgtttttattccgaagccccaaaatttatgagctcaaccatcccgaaactattgaaatccctacctattgttggagttctcaaattactcattttttgcattttagtttttaacaatgtcgtgaaacatcactaaatatctctaattcacaacatcactaaacacatcgttaaatgtcacgaaatcatactcgaattttcacgatgattagcgatgtttaacgatatgatgtgcattttttagtctcagatttagttgaaggtaaaacaataataatagtaatagtaataataataatgaaaatttattagaaaatttataataacatttataatttattagattttgttaaatcatttgccttatgtttctttatgttttgttaaatgatttgctaataaagccccttattatattggggagtgtgaaggagattagttagttatgtctgttatttccgtttcttgattagttacagctgttagttagtttgttagttttgctgtaactgttttctgtttc

SEQ ID NO: 16282 - DNA, 10597 bp, Cannabis sativa
  modified_base (134)..(135): a, c, t, g, unknown or other
  modified_base (6582)..(6590): a, c, t, g, unknown or other
tactgtttcagtgattgtttatgtactaaaccatgctccacaaactttgatatctaccaaatcatacccctcaaattttgatatgtattaaatcatgccctgtgaattttatccatgttagaatttttttactnnaattagacaaaagtccttaaataacaatttcaatagttcatagggaatttttaacggttaaaaaagttcagagggcataaattagtacatatcaaaattcggggaaaaaaatagccaaaaataaaataagaattgctcaaaagaaaaataataaaaaaaaaggaaaatgagatggtcaaaatagaattaagaaatagtagagagagaataaaagcaggcaaagtgaaccaaagtgtggaaagtgtatggtggctacatcaacctccttcttcttctcgccgatctgatccaaacccttggattgacaattcttcaatcaggttcttcgcttattcttctttcctattttggctttatatattcagaatcgatatttattcattatatgtattatatgtatttgtattgctggtttcgcatctgctcttgagtttttcataccctttcccctgtaatcgatgtgagtacttctatggtgaaatgggacttttggtttttgtttgagttaatttcgttatctcatttaggtataaatacacaagtggtaatccttcaaatgaatctggagttgaagtttttattgtttgttcatattttcagtgatcggaggaattttgtgaagaaataaagaaagatgttggggttattaaggcaaaaaattggctctggaacctcatctgctatggtattcaactttagttttttctcatcaacgtaaactgtagttggtttctgtatgtttatgtgatttcggtgtgacccaattgtgtgtcgattcagattttggggcaatctcggcagttgattcgtcctgccgtatcagctttgaggaactattcttccgctgttaaagaggtaatggttatgtggacatgttcacgtcaaatgtgcgatgagggtttttctttggtgtaaattatgataatctcgttcttttttatttgtctttggagtatcaatgtcattgtcagacctctgcctattacatttgaagggagctttgtgtgtgtgtctgtgttatttttacctgccaaatagtgccaaaaggaacttgtgatacatgttcaaagttttgtgttaattcaatattaagctgcctagtgacttacttattcatgtgttgagagtttctttctatatacgcttgtttagactaggtgctgcattgacgattcatttttttttttatgcttttgcaattttctttttttaatggaaaatccaatatatatatctaatatgggcaaattatatttcttattctccacctttctgcttaatgacatggtatgccttttaaaaatgctgaacttgtttttcttgtcttgaaacaataattatgcacagatgacagtgagagatgctttaaactctgcacttgatgaggaaatgtctgctgatcctaaggtcttcttgatgggagaagaggtaggaaaatttggatataattttcccagctattccttgctctttcagtctttctgttcttatttttctgtcatatttttgtcaatgcaggttggggaataccaaggcgcatacaaggttggattttattatttattgaagaggtgatttttttttgggtatattctttaaagacttttgtttgatgattctttttcctttgctttgtatagataactaaaggtcttttggacaagtatggtcctgacagagttcttgatactccaatcacagaggtgtgttttgttatttgacatgctgacctttttgagtgtggttattattcaaagtgttattatgtttttccctttctcacactgaatctcatctcaataataacaagtttatgtttttgaacaataataatagcaaggctatgttaatcgaatgtcttgtttattctggaataaggaagggagattattcttgttttagtagctgcacttcttgcatgacctgattttcttctgtatgctttccaggctgggtttactggaattggagttggtgctgcttactatgggcttagacctgttgtagagtttatgacgtttaatttctcaatgcaggcaagattcttctcagggtttctcattctattgattaccctttttttgtttttgtttttgtatgtgatgcttaatgcttgctagaattgggttatacatcttactaaacagaatgttatgaatttgtttcattaattaattttttttccctctaaaaactgtgtaatgggatttttaggatcagttaggagattaatgctcctaaattttttcactattggtttgtattggttttgaagaacaagtcaacgtaagttttatagtttgcctgctcctattggttgactaggttggcttggcataagggattgtcctatattttaatgaacttcttttttgaatggtagtttaaagaattgaacgtgtattttgaaatttcatatgattctgcgtactctactttttaggttgtagttgttgtatctcactaggttggcttggcataagggattatattttaatgaacttttttttgaatggtagtttaaagaattgaacgtattttgaaatttcatatgattctgcatactccactttttaggttgtagttgttgtaaatctcacttggttgtttttgcaggcaattgaccacattatcaattcagcggcaaagtcaaattatatgtctgctggccagatttctgtacctattgttttcagaggaccaaatggggctgctgctggtgttggggcccagcactctcaagtatgtctacacacatgcgtttctgcttgttgtgaaataattagatgtatactttatgctgctgtaccttctgggttcagttctcactatatgaaaagttcacttattgatatgctatttatgtagtgttatgcatcatggtatgcctcttgtcctggattaaaagtgttagctccttattcatctgaagatgctcgaggattgatgaaagctgccattagagaccctgatcctgttgtttttcttgaaaatgagttgctgtaagtaattaatggggggtgattgtgatgctagactgtcttttgtcatgttaaagattattaaatggttgaattactttttctgctttagatatggtgaatcgttccctgtttcagctgaagctcttgattctagtttttgccttccaattggaaaagccaaggtgattgattttgaaaagttgattgttgatttatttatctccatatttgaattactaatatgctgaattttgaataaaatatattatttaatgattatagattgagagagaaggaaaagacgtgacaattacagccttctccaaaatggtgggctatgctctcaaggtttgtccattccatcttcatcagctacctttggttttgtgtgtgataatatttattgtttgaaataaacttacatggtatgggaaaggcttgcatggtattattgcgccactaaggcactaagtaggaaatctatttcgtcttccttggaaatttatgtctagtatctttttttattttttgaagcagttataaatgaaggctcctaattttagtgaagtagtcaatatcataagatttctgagattttattgtaaaatgagatgggctttattgttttacattatgtcttttaaagtcttgaggtttgcatttgtactgagcattaggagtgagccagtgaggctcagttgccttagtacttcaaagtgtggatgcatacattttttctgtttattgaaagttagttttagtatttttaaattgttgacatgccttttttaagttgggttttccttccactgagtaattctatgacatggtgttcaggctgctgagatacttgccaaggaaggaatcagtgctgaggtaaattattgttgaaagaacgcggtcttttttttttttttatatatagttccacccttgttgcagacacggtaaattggtaatggcttgttttcttgataggtaatcaatttgcggtcaattcggccactggatagagccactattaacacttcagtcaggaaaaccaacagacttgtaacagttgaggaaggactccctcagcacggtgtcggtgctgaaatatggtttgcatcattgcaaaatttgttctctgtattaatgtcacttgatatttaagcttacatacatagcgctcttctgtttttcttatagcacatctgttattgaggagagctttggctatcttgatgcaccagtggaaagaattgctggggctgatgttccaatgccttatgcagctaacttggagagattggctgttcctcaggtttgtagattacttactaatgattatgttagtcttaatttggctattttatatagactttttcatcattgtggctctaaattgagcatcttgctgaattttgattgtgcagattgacgatatcgtacgtgcagcaaagagagcatgctaccgagctgtgcctttggctgcaactgcttaatttttttttttgccaattccatccacaaacatctcctggccctggtaagtagtgtcaaactatttacatcatataatagtttgagttacttgtccatgggtttatggcgcacaaaactttaggttagctcttgaatatagcaaacttgtattctaacatacgtaaacagctgctgtttaaattatttcaggagaaattgggactgtatattattttctcttcacatctcttagggggaggaaatgcttgtcaaataacttggagaatatgttgacaggagcgataacttgtggctctattttgtgtttttctttttttgggcagttcaacatgaaaaactactctactcccaggcagccattttttcacaacgttatttgctttcttccaatcttcactttcactcccaaacatttggttttgggtaatgctgttttgtgactggcttgacttccaatgttttttctgttccatgttatattattcggtgactcttgattgatgtactcttgtatgtgaatgggcaattcaagagttgttatgaccaaaattcttaataagaggaaataaatgattgaagatatatacacgaaagtcaccttttggattatgatcttatgcacatcctctattaatgagggttttttatttgtttatttaagggttctataattaatgagtttttaaagtgtccatcattccatggcgtctttacactaattattttaattaaaatttatttacttaatattaaattacactagtcatttgtttgtcgatttgatgacccacataaatattcatcaatatgagttattattatgtttatagaatttccaaaactttacaaagcatagctttagtttttcctaattatgaaaagttttcagtttaaacacggaatctgtggaaatttggctgccaaatgagacaataaagtaccaataactaaaggggcaatttttagctaaaggctcctgtttggtttttacttgttatgctgagaagtcttgaaacaatttcgtcgatggtttgatggggatttccacaggaaattagacaaatattcacaaagaagaaaagggttacactttgtgttgaattgatagatggggtatgaagaaacacgttttgttgaccctagagaaactttttagttctttccaccttaattttctttccttctctcataggtaatagccaataattttgacgcatgaaaggtgaaaacccatcaaaacaaaaaaggtaattccgacatggcttgattatgcaagttaagtgttcgatatggattttacaatgatttgcttatttcattcttggtaaaactttgaaaggatattggtacaagaaagaaacctcactcaataatcattcttcaactcttttcattttaatgtctcttaattcatagttttcatgcataaactgtaaacacaccacaccagtcgtgctgcagttatgggcaaaattaaaatgaaaataaaatggatgtatgagaaaccttaatctatgctttagctatgtatttttatgtatacataaaatattgtaaagtaatacttcaaagttcaaaccatatttagtattatcaatactattatatatggtgtattcttgaccaattatactatgtgatgttgaagactttgaatgtagctaaatatatatatatacacataacataacaagcattttacccaattataattagttcctaacactaaaaaattgctaaaaacacaaataaatgtattattgttaaagtaaattagtctcttataataccgatctataatattattttattttgtttgaaaagtcaatgaaataataacggtcaacggtactcaataaagaaaaaagtaaacgatacgttttcattcccttcaaattttagtgtaccaattattacaagaattattgttaatgttaatcaaaaataacaattactcaataataataataataannnnnnnnntaataataataataatatgctttatggggtcctgacgtgaccagaccagagcaaagaatgggatggagttgaagaagaagaaatactagtgtgttcttctctctctctctctctctctctctctctcttcatatttgctctttattcagctctttctctctctctctctgcaaatattcaatcaccatcaccatcgtcgtcgtcaattgattcatttcttgtgaatttctaacataatccctcgctttctgcatcggaatcggatagtggaaactagaaaggaagatacgaagatgaagacgtctctcagaaaattgcgaggtttcgcactgaataagcagggacctaaagaccgcagagatctccgacctctttctcaattagacgagcttgctcaggcagctcaggtacgcctttctttttctattttctttgtgttctatgcttcttcccaagctgaacaaagatcattcgaattaacgccatttttaaccccttcctttaatttttttttctttttacaatttggaaacacaaatctgttttcgtctggagttttacttgcatgaaacgctgcctcgaattagaaacctagggctggctttgacaatctagggagcgagtattttcggcttatatcttccgaaacgattattgttatttgatgtatgtatctgaatgtatatatcgaggtgaagaactgtagtatcaactgttatacatacatacaaatctaaagtataaactgaaagcttggaaccatggcgaactgtcttgctagaattgtgcttccattgctataccagaactttactttcttgtcttttacgactgttcgtataattggaaaagcatagtttcttataattgatgtgatgttgttcttgaaggacatgcaagatatgagggactgctatgatagattactttcagcggctgcagccactacgaacagcgcttttggtatactcttctcgttcctttgcttgtcttggattatctgtttcatttttctgtgaaatgttgtttgttgtgattttgttattgaatgacaacttacattatccttaatgaactgattgctgagggagtcatttttcatttttcattagcactatgatgcagactttcattttgttatttggtattccagcacttccccatgtggatttttgcttatgattttgtcctctaaactaatgtaagcattgccagttacctgtgatgacattttgtcaatatgacctattcaaagagcaagcaagacattttttacttactattagtaaataaaaaatgcagattcatccatgctatgtcctattttctttatattcttatgtctttccttctttccagaattctccgagtcattgcgggagttaggtgattgtcttcttgagaaaactgcactcaatgatgatgaagagagtggtaagtgttattttaattctactttctgttgtcacaatttttttttccttaccttcgctgaaaactttcagatatatttctgaagattacagtttgtcacactttgttctctcaatctgtgaaaatttacctttttatttcccgcacatttaaatgtgtctgctgcattatgtaaaattcaaatatgatttacagagctgtgggttcagtttttctacatttgggagctatcgttcattatctttatcagtttttttagtctattttttaatttacttaaaacgaatcatcgcttgcgtctctctttccacaagaaacatgctaacaagcatgtattgtcaaaacacgttactcccattaatgtggctctgtgtaaattctttcacctgtattaatataccattggtggcaaaaatattaattattttctccttctattttcacgcaggcaaggtcttgcttatgctagggaaagtgcagtatgaagttcagagacttattgatagctatgtgaggctttactgtaaagtaatcctgagattccattacttgtcacttgcaataagtcttatttatttctttcatgtcacagcgctctcatatatcccacacaatcactgtcccatcagaatcccttcttaatgaacttcggatagttgaggtaaatccttgttgatttaatttcatatttgtaatgattcattctttccatttctctgttttctattgctggctcagttttgctattaggactttcttacttgggtagtaatttatatatgtggttactttttatttgttatggttatgggtgctgcactttctgcttttcggacatgttttggttgttactttctctgtgtattcatcaagtgtttctaaacatatgtatctccttgatgcaggagatgaagcggcaatgtgatgaaaagaggttttagtcttctaccttttatttttatgttataattttatgtgtatgtatatatgcatgcatgctaaaacacacctaacatactcacatgcatatacatctgtttcatgctgtcttatcacatggtcttcagagaagtatatgaggaaatcaaagctaaacatagagaaaaagggagatcaagaagtggaagggaaaatttttctatgcagcaactgattatggctcatgatgaatatgatcaggaagcaacattatttgtattccgcttaaaatctctgaagcaaggacaatctcgaagtcttctaacacaggcagctcgtcatcatgctgctcaggtactagtttcagatcataatcatcattttgcattcttaaattcttttactgacctacttattgtgttgctctataatctgttcaaaacagttgtgcttcttcaagaaggctcttaggtctcttgaggcagtagagccatttgtgaaacatgtgactgaacagcagcacattgattaccactttgttggtcttgaagatgatgatctagatgattatgatgactataatgatgatcacgatgatgatgatgacggtagctatgattcaaatgatgatggagaattgagctttgactatggccaaaatgatcaggaacaagatgtttctacatcaagaaattctatggaggttatcatattaacttctgtcactagctgagagttcttctctttattaattacatatattggtcaacaaaaaagagtttgcaaaatacttttacaagatcacagttctcaattgttttatcttgatatgtgcatgcacacacacacacaagatatgcttgtgagcatttatctagaaatttttaggagatatcttatgcagggaaaggaaacaaaactttcatgctttttactattatttttatgccacacacttttgttgctagtggctagaataagctatattgggttgcaaaagatagaggataatgttgttgtatttatagcaagcaaacgcagaaatagtttgtgtttaacaagcagggaaaattatgacaataatgttattaaaattataattttaaatgtctaattaccaaaattaatcataaaaaccttttctatcaattcataacggaaagacgaaacaatatccaaaatagttgtcctccagttattttggttgtttgttgtttgctctttttttttggacgttttgattttattgaaaccattctgacttcatgtaaacatgtaaattttggtacaggttgaccaggtggaccttacttttcccaaggtggcaaaggtggaagatcccaaggtaagagaatgtgatacattttcttttctgtttgcaaagatatgatccattagcaattgaattgggatcaggatcactctgtattggattcttagtaaattccaatatgtctaggttattgtttcagttatcagttcgtttgtatgttgtttatgtgtttgcacatattcttgttcatttatcaacatatctttaattattaatccacctagtctctaccataactgaacccccttaggttattgtgaactaaatttgaattttcattttgaaagttgatcccaaggtttaaatagaataggtcaggttt

SEQ ID NO: 16283 - DNA, 4209 bp, Cannabis sativa
aatatttttattttattttagatagtattgtctattttaaattattaacatatataatatttttatacaatttactatttttattcataatttaattttgttttaaaataaatgggtccctggtgggtattacttgctccagcaaggattctccgccccgccttcgatggggaataagtggggatagaggctgggatgagttttaaaatagttaagagtgaactttgccttacagttgttaatagttctagctttccatttcctttgagcattctcattgttcttttagggcttggaatttttttgtagagattgtgggcatcacagttgttaagtcaactttgccaccctttttaactcgttggaatccatcttaatctatctaaaggttgtgtagccactattggagctttccttatatattttttcttcaccactcactcatgttctgtactttccttcttcctacacacctctgtggcatgccccatccttttgcaatgagcatgcatgttaggcttccattcacacaccactaaaaccctaatttcctcatcacactcattaacaaaggaaatctcctttggacactcttgggataatcgtacgtcaatcgtgactcttagataattaagtcgttccttctattttgtgattcagttaaccatcatatgctttcttatctggtagggaatcttgaacaacactctctcacccccagtatttcaaatcaagtcctagtagttgcacccaagttgggaaagttctcacatcctctttcttgatgtccattgaagcatcccaagcctttataattatgggtttcttattaaagagaataaaaccccaagctatgacatcatctctaatttcttcatctagaaatctagctatgaaaactccatgtatgatcaatccgacctaatcaactttaaccttccaaactatcttgacaaacccaacaaaaaccaatatcagagggttagcacaagacatagcataccaaagcaaagttccataatctaatctcttcctctatatcccttcttctttagattcttagttctagatctcttcctctatatcctttatcctctaaattatattcccatatttgagaatattcgagaggggggggagtgagtttacctaattttgcctgttgttcacatctctgggtagctctactaagtaggtagaaaaatccttcctaatctaatgttctttttgcaattgttgcaatgccagtcgaggtgatagtaatatggaccttcagcctctgtaatcaattcctcatctttggcatcttgctcctctttagagaaagtgattggctccactccaaaagttcaataattgactttattttcttcaccccttttgaggatgacaacccctgttctgccttgtcttcatgatcaattttttaggcttctcctatttcttcaatccctttgccatggcgccaacaaaagctgagagaatagaagagagaaaaatcttaaccaacacaattttgttttcttttatatttcttaatttttattatcatttcaaaattttaagatttattgtttatttaagttttattttaaatctattaaaatagttttattttttaaaatatttataagttagaccaattagaagttgacatatttcattctactcaactacttaatagacctaacaaatgagaaataacaaaattactacacggggtaccttttttcgcttacaaaaagattgggtttttggtggttacaaactctaaacattaggtatttaggctgccaataaactttaaatatatatttttatttttgaaagaatatctatggatgacaaattaaaaaacttatatttatggattcaattaatatttttatttcgtgttaatatattcgtgattttatctcgcgcttttgcgcttattatgtcgtgttgtgcttatttttcgtatagtgcctcaagccttttcatgtcgtactaggcccaaactcatattttctcgcaacgtttcaggctcatgtcacttggacttgtcccaaaaagcccaacccaaatgtacaactccacaatgttacacgtatattcaaaacataacatttaattataattggaattctgttaatgtttgagaaacattccaatacacacatgagaggatatactcaaaagtaggagtgacattggatctccttaacgaagagtcctttttggttcaaagaattaattcaaagaaccattaaaaatgagattaaatttggagttctaacaatcatgaccagctctacaaatttccttggtaagttaaaagcatacaataattcttcaataaagtcccactcaatcatgtcatatgctttctttaagtcaaacttgatcatatcttgattataacatttaacaataaatttaacataaaatcatatccccatttttaaaaccttaaaaattttgatatttgcctcctatctctatttaacaaacttatagtaacttagtaaggctcttacttcataaaaatttattcatttttcactaaagttatacttaaatggaaaagtttttgggtatagtgaagagagaaattggtaggatttgggaagagagagtaggattataagggggtattttaagatttaggcaaaaatgtgatcattttttagagtgtcaaaatattaagtctttttttaagttctgtattaatttatgcattaattatcaaatttccttaagatgcaatagctatatataaattaataatatatattattatttcattttgttatagttggagagagcagcatttattttgttagtggtacattacaactctcaaaattttttgtcaaaaaaaaaaaaaaaaaaactctcaaaattttactgtgtatgcatggataaacgagaggatgaggtcgaagatataaatatatatatataattaagaaggtgaaggtactaaccggtaagctgtacccatgaaaaatcacacacctatataatttaatttaaatcaaataaaaaactaaataataatattcccaagctccaagtttcaaagcatgagattttgtcttagttcctttaaccacatatatatatatatttatttatttattttaaaagaaatagtaataaaaaagagatatatatataggaggaaattattaaattacgtagggtatgacttgagcaattcatgcatttaattaattagtccttattttctccccaggtaataaattgacttaaacttcattttcacccccgcccagtactatgtcggaccactttgcttagggatgctatatatgtaactactggggcctcaatattcagctctacttgttttctaggccaggctaattaattaagatataagctatatatatattatatataaataaatatagagactcagactcatctccaaaaaaagtgatgcttaaatggaaaaaatagacaaaatcttgttcaaattaattaattaaaggcagagctaaattaagtttagatcagtttgaccgcgttttgtgctgctactcattaactcattattacattatatattatataaatgcatcgatgatatatctattattggaggaataataagttatatatattgccaattccagtcgtcagctttccccttattgggttaatagtatagtagctaggttttaatataacaaaaatgtcttgtatcactaaaatgtaagacgtacattgggaaattaatcttttatttatatatatatataatgcaaacgtttcaaaatatatcttataatattattattaaattataaatattgttttaatgtcgtggcgctcgtcagcctaaacggcgttgatttcggtgattccttcctttcgtttttgtcgtttcactgatactcaaagcacaaagatagagagagagagagagaggagtaattaattctaggcatataattcaaatctcaaggcaaacctacgtacatgctcctctggctgtatcctaatctcacgaatcaccacgtagaaactaatattcttctgattagtagtagtacagtacaacacactttggctacgaaaaatacataatatgaagttttattcttatgacaaatattaataattgtttgtaaaagcaaacatacattaatcttattagttatcagagtattatgaagtaattaaggctttaattaatta

SEQ ID NO: 16284 - DNA, 1683 bp, Cannabis sativa
tctctctctttgttcttgacaggttgctggtgcccaaattccgtaattgtagatttcaccctctacaattatgagagaaaaatatttgaaattgtgaaacagttccagttttgagttttggcagaatccaacataattactgattattgacatatgaaaaagaacattgggtgcatcacaaaattgggcctggcatggcccgtttgtcttttaaggttggatgcatcggtaagcccataaaatttgtctcctgtttttcttttcttaactataacaaatttgtactccggttacaactagtatgaattgcaaattttgagggatggtgaaaaagaaaagaaaacagaaaaagaaaatccacctttaaaacactaaatttatataaccataaaatatgtgaatgatgatcaagttattttaagcataaatttaacatttcaataagaaatcataaattaattagcataactaataataaagattcatgtgactacatttaagatcctaggcaatatgactggtttatgttcataaatttaatgcaaattgcattagtttaaaaaaactctaccagtttcgcacagttgtgctgtgggactaaaaaatagctacaactgtgctgtgagaaaattgaattaagtgtagtaaattataaattttaaagtgcttgcaattattatgattctattataataatgataatgttataatctaatttattataattacaaatatatatttatataaaaaatatgttatataattttttttaaatatatttttaattattttttctcatactataaatttatatatatttgattgaaataatggggtttgtttatttgtacatttcaaagtaatttttttttttggcatgtttacaacaatccatatagcaacctaaatgtggccctaggctaatttaggggcccaaataaaaaaaaaattatttatctttatagtaagggcttaatttttatttttttttttgcctatggcccatttcaagttagggctggccctccctaaatcacaatcaaaatccacatagcaaccaccagaacaatccaaatcgtaaaaaaaaattaaaaaatagtagatagagtgattcctctaaaataatttgtataattttaaattatattttttatcacttacaaaaaattgtagtttataagaaatttaagttgatgttgtttgttaataataaaaataaaaatataaatataaaatattttttaaaacaataaaaattttaaatattatttatgttaatattttttcccttcaaaaaaaaatatttttatttttttaatatataacaaataattaaatacatttttagtaaaaaaataatttattatagtcttttaatcaaaacagatttttttttttaagttgtactagctttaacttttaaatgtagatttttcataaatttttcaataaactattttttaactacttactaaatacttttttatcacaatttttttaaaaattaatttttaatttttcaaaaagttgtactaaatgaaacctaaagtagatgataaatctattaattgcgctcatgaagtgtttctaataaattctcttaagctatgtttagaagttggatttagctgaggaaaaaaaagtagggaaaaatgtagaaaaaaaaatgtgtagaaccataca

SEQ ID NO: 16285 - DNA, 2385 bp, Cannabis sativa
gtgtcaatcgtttacaataaataaataggagtagctagacttgtatttaggatattaatgaagattgtttgacatcttattatgatttcaatacaaaatctgaaaagtgagtattgattaggctatagtgaaatagggacaaatttcgacatagaacgagagtacctatgtggcttggataacatttagggtttctttacttaatgtctcttatatgtttaaatttatcacgagagtagaaaatttacatataagttgagatttatttatcctagtccgaatataagttactgcagtaagcccgtcattgcatagaaattggtatttaggaattaagttgttaagccatataagatagattcaattgaagttaataaccttaaactctaatcattgttaattttcattctaagttagttgtttttattttcactagattataatattcttcctttaatttttattaccaaataaaattaggaatttaattttttaatacttaactacaatcttcgaaggaacgatactttatttaatattatattacttgaaatcgattgcgtagaaaaatccataacagatataaaatcatgcaaatatagctagccagatcacaattttatctgagttgcagctaagctaacgaactgttatttgttgacttatagatttatttctattccaaaagacatgggcacatttaattgtggggcatttgttgctggaattgtaagggtaagcacttcatttactttgtttcttgctaatcgatcttgtggttaaaaatttctgatttctgattagcactcctttgcctttgaagggtgttcttgatagtgctggttttcccgctgtggtgacagctcattttgtacctatagagggtcagcagcgacctcggacaactattttaataaaatttgctgaagaggtgagtaatacctttccatttgtgctcttttcttctttgatagtctacttttttgcattgagttggtgtatgtctgatatcaaaagtgcccgtttaaggatccagaatgtgttcttaactttttaacttcatatccaggaattcttagtctgtttatgtatattccaacagcatttttttttttagatgtaatccacaccaaacatgcaacagtgttattatggtagtatatagttagtctgtaatagagtttgaaaggaattttttttttgagttgtcaaggtctcttcaaacagccatatgcttttataatcatctgtcactattatgctaagctctccaagttttgtcttgcttaattgtgagtttcaacctctaaaattattgtcatttagctttttttgcttattattttcaatgttctgtgtagagctagatatttcatgctgactcttttccaaaagaccataataagattagacttgagatgaaagttttcaagcctttcaataattgagttgggttaaggttggaatacattttgctgcatgaaaagacagctggaagtattgaataggttattatgagtattgtctacctgtcatttcaaccttagcctaaacattcctatctactttgagagttttcaacattaggggataacttagttgtacagttttgtattgattttgctatctgatttgattgttatattattattaatttcaggtactaagaagagaagcaaggttaggttgagtgtgtgttgaagaccttctctgtctttatatgaagtagttttttctttcatgaaaatggaaaaaagagaggatggtgaatgttcattaatagctaagctagtgattatcaaaagctaatctgggtttttcttgccaatcatgtatccatcatttttcttgacaaatttaaatatcaaaaaattgatttactataaaataactatatttatgccatggagcactatgcatatgaaattgaagtaagtaacaaaacagggttctttgtgtgggttgtggttaatattaccaaaacccaaaaataaataggacaatttacatgaaaaatacaaaatgatacttttattacaattttacttccacaaggcttggacaatatttttacttttattgttgttttatttactaaaatacatcttaaccatattatacatgattatctcactcaaagtttttccttcttttttttttttttttttttttttttcagttttaattttgaattggatatccataatcatatttcgtttcttcctcttaatttctccatacgattacaaccttgatctttccatcatttaaagttcttcctcacgatttcttttctgtattgttattcttctacaattttttttatataatagtaataactctcttatcatcttttccatccctattgcaaaaaaaaaaaaaaaa

SEQ ID NO: 16286 - DNA, 5450 bp, Cannabis sativa
tgaactgtattttggaactattgaaatctcattggcattcgaaaaatacttgtttgaaccagtacactaatgtattgtaccatgtaacattttctttttctctttttgacttagttttaaaatttctttcttaattggctacagagaaagcaagatcattccaattcaaagagccatagtgaagtgtttaaccatcgaagagaggaatcttactctggatatttgattgatccaaccaagcagtcccgggttgttagagattcaagaaaggattctagagatgatcataacaggaggacatcatctcattcagggccactaattcctggatatggactaacaagagctggaagggaccgtaatgatccttccaatgtttcaactagagccaacttgtctaagttatctggtttagtggcagctaggactactgcatcatctgaagatcagcaagagaaagctggtgcctcacactctcaagagacaagtgatggtggcagattacgattatcaaataatggagcagattctactaaaaagcaggaccgaaagcatcactcgctaagagtagcacattctcgtcgtcaagtagatgatggaaaagcctgtgacaaagaatcaagtctggttagtctcatctttctttcatccaatgcattgttttgattattctgttttccaacataattcccctgttgattcgtattgcattgtcaaaatcattagttactgttgattcgaatatcacgaatattatgttataatttgccaagttatatatctgatgcatttgtttctgttttccttctccagcatggtcataaccccaagtccaacaaaatttacgtctccggccctttacttgtttcatcgaataacatggatcagatgcttaaagagcacgatcgccggatccaagaatatgctcgaagaacaagaatcgacaaaagcagaccgggttcccaggggctaccttatccagtgtctgcctctaagcaagtagctggatagatatacgatcccacggcacccaacacattcattccttttcacttgttagagataatgtagagagaaaacgagagtgacaagagcatgctaagctctcctcccgtagtacttacttggtgtgattattccatgtataggtaggtaaatctagaatagagagctgtaagaggcctctccatttactgcatttaatacagtcagagacccagagtcctttttagaagtaatgtgagaatgaatccgtaattgtattctggcaatattcatatagtatttcaatttataataatagatagaaggagaagaagaagaagaagaaaaaaaaggcattatgaatttatttcaaaccacacgtatggtccctagttttctttatattgtcagaggagttgttttcatgcatggcgtccaaaatatctggcatggagtagcggactggtctggacgtgatgttattcaaaattcagaacagccttttccttttgtcaaaagaggaattttacgctatataataatgtaaaacatcgtaatgacattaataatgataagatattattcttgatcgaaagaatgaggaaaagtcaaaagaagatgttagtaacgttcacctgtttttttgtcaaccaaacgttaagacttttatgttatccgtcaaacttttcctacagcgccagccaattatcatagaacaaacaaacacaaaatttcaacactacaataaatgcatgtcctctgtatattgtcagtattttctactactttcccttttaccaccaaatccatgaacaacttattcctattttaattttatgaagttaaaattgtacttttttgactttttcttttaactggattgtacattgagctctctgagagataaaaatgaaagagacaacaaaatggtattctactttcccaaaaacaattccttggattattctctcggcttctccaatgtctctgaaagtttttgccttgttctttccaaccatcatagttataatccttaacttgaactgggtttcgtctacaactgagttcatcttcaacactaacttcaattcctccaatattttactctttggggactccactgttgaatcttccatcctcagcctaacaaatgcctcaaccttctcccttggaagatctctgttccctacaaaaatcaccacaaaacccagtaattcttcgactttggtagaacccttctcgacctctttcattttctccatcgcctcagtcgatggcttccaacccggccatggttttgtgtttgtgttcgtaccctttacaggtacagtgggcgggacctcatcccagaatctgggtctctttaatttctccaataatggtgattccggtaaccatattctcggaatcgaatttgatgtgtttcagaaccaagagttccaagatattgatgataaccatgtgggtctaaacgttaattcgcttaattctgtggcttctcactctgctgggtattgggatggtgaagatggtgaacagttcagagaaactgagcttaaaaatggagttaattatcaagtctggatagacttttttgattcaaggattaacgtaaccatggctcctgcaggtcgaagaaggcctcgaaggccattgataagtgagtctgttaatctttctggggtattctttgatgaaatgtatgttgggttttctggatcaactgggcagttggttgagagtcataggatattagcttggagctttagtaatactaatttctccattggtgatgctctggtgactcaaaacttgccttcttttgtggctccaaaagggtcggtttttaagtcagaagggtttattctagggatcagtattggtggtggtttactagctattgtgtttttggtaattggatatgttgttctggtcaggaaaaacaagagtgtggaggagaatattgaagaatgggaaacagagtattggccacacaggattggttataaagagattcaccaagcaacagaggggttcttggagaaaaatgtaattgggtatggaggtaatgggaaggtttataaaggggttttgccaggaggagtagagattgcagtaaagagaatttcagtcaagaatgatcaaggaataagagagtttttggctgagatttcaagcttgggaagactaaagcataggaatttggttggattaagaggctggtgtagaagagagaaaggaaacttgattttggtttatgattatatgcaaaatgggagcttggacaacaggatatttgactgtgatgagagtatggcgttaacttgggaagagagactaaaggttttgaaagatgtagcttctgggatcttttacttgcatgaaggttgggaagttaaggttttacatagagatatcaaggcaagcaatgtgttgcttgacaaggatatgactgcaaggttaggagactttggccttgccaagatgcaccatcatgagaaattagccagtaccacaatagtagttggaactgtgggatacatggctcctgaagtggttcaaaccggtcgggtctcagctcaaacagatgtgtttggttttggagtacttgttctagaggtggtcagcgggcgaagaccgattcaagaaggattgccaggcttggtgcattgggtatggaggatgatggaggagacaggtgaagtagtttgtgttcttgatgagaggataaagagtaagggtggatataacatggaagaagttgagagagtgctgtccttgggattgtggtgtgtgcaccctgaacccaatgagagaccaacaatgaggcaagttgtgaagttattggaaaggagtgttggtgatggtgtgactgaagaggagggaatggaaatgaacaatttgcttgagaagatgaaagaggctgcggcatcgtcgtctaacactcgcctgaataacattggtggaagagggcttcaccctacttttgatgagctcaaaaacactctctctacttccatgtctctaagtggctcgggtcccattcaggttggccggtgaagattttgttgttactgtcttgtgtcttgcttttgaaacattgttgagactttagatactggcttcttgagtgctgccatggaattattagctgctttgtatgatacaaattgtatatcgatacatttcatatttataccgattataaatacaaaattcgttagttcattttttttacactcaatgctgagaacattgcaatgttggtggtaccagttggtttgtctgtttattggtaataggacttggattgaatatgatcgtcgagttgtacttaacatatttattttcatgtttaatgttttcaaatccaccattaccaacaacttaatgttagcatctaattaaggaaatgtcaaaataatgaagttcattaaagtaattaaaagctaaggtatggttgcggggatagctcagttgggagagcgtcagactgaagatctgaaggtcgcgtgttcgatccacgctcaccgcattatcttttattcttttttaccagcataaatagaaatgtagttctacttctattaatcttttccaggtcatttttttttacttataataatgtctcattattatcttttatttgggtcatagtatctcctattgccttagagaggaattccagaaaacatttaattagtatagatatatattttctcaatgtatacaaagttaacttgtgtttggtcgaacaaaatgtggtacctttgattgcgaattggagaggatgggaagttgagttgcagtttaacagaggagagagaagaggcatgattagcaagaccactgataaaggattagttaggagttagtatgttagctttagttaaattctgttttaacataattagtctcagactcagaagcattttaacttttgtaaaggagtgtttttgatggtgtgtgactgaagaagaagagggaatggaaatgaacaatttgcttgagaagatgaaagagtcagacttgtgatactggtttcttgaatgctgctatgacattatttagttgcttaaattgtatctatacattcaatatttatactgtttattaatacaaaattcgtttgttcatttatttgtacactcaaagctgagaatattgcaaatttgttagtagtagtagtacctgaatacattagaaaagttcctaattaagaaatttttaaattgtgataaataaataaagttactaaagtcaatgtagcggggatagctcagttgggagagcgtcagactgaagatctgaaggtcgcgtgttcgatccacgctcaccgcatcattttttgtttatttatttcctgtcaattaacgtcataccatattttgacactaaacatgaaaattggagagaaagtgagggtttcttaagagtttgaagagagagagagggaccataggcat

SEQ ID NO: 16287 - DNA, 3875 bp, Cannabis sativa
ctgctataaaattaaacatttggaattttggagactaatttgcttaaaataaaataaaaatgagaaccaatttacaaaaaagaaaaaaaaaaatcaattgctagaaactcaaattaattggtctttaaattcttcattattcaacccacgttgtattgcgactgcaagaagcaacatttaagcagaaaacacagtaatacgtcaagtgtgagccaaatctaagccacaagagtagcataaaagtctccagccaacaagatgtgaagaaaaagcatcagcataaaatataaattaatatatttacttaaaaataattgtttagaacagtgaccaccatctccagctcttattctccctaccattggatgaggggccagtaatttcgagattttggtggctatgttgtggaaggggtcgaagggcaattgaagaacctcttctttctgttccaagatttcctaaccacaagacaaaaaaaatgcccacaagaccgacaactggagcagctgtaagaaaaacccatcttctcatacaactcggatctctagagcaatttgattctggttccacatcctgtagctctctctgctctaatctaccctcattaaattctatttcttcctctgctctgtaagaggacaagctacctcgtctagacatacggtcctctggtacattctgggggcgagtgctgatctccactctactcctagtgtcactcttctcctcttcataatctttgtcgtcaattggtagctcgtatctacaaagggggcatgaatttcgagactgcaaccatggcaatatacatgaagggtgatagagatgtttgcagggaagttgattcacctcagcaccaatcggtagcatatccttgcaaattgcacaagctacgccatcaagctgcttctcatgctcctcattaatgataacacgaggtagactattcataaaagataactctgtaggtggcatttcatgtcttgagttgtcatcctcaaccagatgctgaagaagctcttccaagcctctcgcatcaagataatttgtagattgtccaacatcagccatccaagctggttctaagttcgcaaagatgttatgggcatatgtttgattgctttccctactttcccaaattatagtatcatcagattcagaatgagccattcgttcactttgactagaatatgaaaagttcctactacgaggtctggcatctggggatggaatcatgtcgtcctcagcatggcccttttcccactcaccaccatcttcttcgtcttctgcttctcctccacttcctagatcatctgagttccaaagattaagcccaacatgcattggatcaatatcagtgtcactgtcgaaatcactaccttctattgattgagtatacatctctgagtccagaaagccatggagatcttctgaagcatcatagtctcctccgtaagtactacaagaaatgacatcattgtcaccttgtaatgtcttgtgacatccaaaactgacattagattcattatcagcaaataaagaatccacattatctgaatcttcacttttagcatcagagggaatgagcacccgcctccatcttctagacccccttggactattacgagaacttgtctgatgcaataacttgccagtaggatcaccttctcctagaaaatcctcaaatgcaaagatggttggctgattttgcctcaccagattaatcacatgtgagaattgttgcgaaaaagtattttctgaggactcactactgctatacctggttcttcttcggcttagtggtctccttcgacgagatccacgtgatgggatatccagatcttcagaatacaaaaatttacaatcaccacaaatgcaaatcgtttcaagatcatcacttgcctcattatcttctgaaaggattttttggcacgatgcacatactccctgaacagaatggtcaatcaatatatgattgcccacaccactatggacaatagattgaaaatcttgtgacattctctgttggacacagtaagaccaaagaaaaaaaaaggagtgagagatgatgaatacaaaactaataaagagaagaaaaatgtcaaggcataaacatagaacattaaaacacatacatgttatgataaccaggtcactatacaatgattagcttgtgctgaaaactagagcaaagtattattccataagatttaatcatgttttcgagggctaaatgaagaatgagagtgggaatatacaaccccgtgtttggcaatattgattttactcaatacgcatttgatttgctaataacagattttaaatgaaattcctagactctgaaacatatagttgactcagctattggaatctaagtcaaacttcaactaaataattctgtcgaatccggtgcatcacatatagcttagtatcaatagttttctttcaataaaataaaaatttaattgtaaaacagaaaaaaaataaaacttgagaaagaaaacaagaagttgtcctctaatgaacaatagtgtaagtgggaacaagaaattgaattataagttaaccaactaatctttatcaacatagatagaacgtaatcataaaactttaatgaagaaacaataaggagatccaacatcttatcaggttctatcccaaaacaaaatatgacctttttttcataaataaaaaataaatcaattccttcaagctatattactaattaagagcccacaacaacactaatttggctagtcaacaagctcaccccataaaaggtttccacaagatgtccataaatgtaggtctcatatacctctcctaaagttcaggttaatgattgtatcctagaaagttctagtttatttatatataaggggttttctagctatcgtgcaatccaaatggtgagattgacatcattgagcagagggatatgagatttttccattgatatcaatttggaacattgagtggaccaaaaagccaaatctcctcaagctaaaactaaacacatcaagtgaggatattcgctcagcattcttagaccacgtagttactaccatggctttttctaaataaagtactttatattaaaaccccattttcattccatattatttccttcatctagtacagaaatagagcattgtcattcatttttcttctaccatattaataattactctcattaatctcctcattccttcttgggattcttacttctcagtcccatttctttccaaaaacaacaaagtgttgcatatttcaatttgggttgtattagtcaaaacaatctaaaaatataaccgtgaaaaatggaagatttaaaataaaagaaaaaactaacaatatgaagtgggtttgatgtaatttaccagatgataaatatcggtgcgatcctcagcccgattgtaggatcaatcggtgtaggcaaaccttctcaaatacaaaatctactatgcaatatcaaataagtgtcattatcttcaacctaaaactaactaaactcagtaactcgaatcaagatctggcactttccatatgaatagttggtttgcgagttgtgattatggtggccctacttcatctaagtctattgaggaaaaggaccattcgttctgaaccaaaaaaacactatttatgaaatagaaatgctcaaagcacaatagtgtccagcagagtagcaccaccaaaaatgtatcatatgatttgatttaatttaataacaccagtggagggaccactaagagcatctccaaattccaactattttacaaatttagtgtaaaatcttcacatcatttattctaatggcatcttaaattatacactaaatcaatgtgcatcaaattgaataccattaataatgt

SEQ ID NO: 16288 - DNA, 3849 bp, Cannabis sativa
  modified_base (1993)..(1993): a, c, t, g, unknown or other
  modified_base (2040)..(2057): a, c, t, g, unknown or other
atgaatatgaaaaaaaaaaataaattaaaaaattattttggataccgaaacaaattaagagtgcatcagtacatttcttttaaggggctggattgtagaatcacgcgtaagttttaaatctctcaaagttggagccaatattttctacataaattttcttcaaactttgaccattacacaacacggcactttaaatatcattcttttcttcctattcatacaaaattcccaaatgacaatggcaacccaattttcactcgccttcctaatatgctcatctctaatcgtctctgttcagcctcaagatttaaactttgtcttccatggattcaaaggaaacgaaaccgatctcaaaagagaaggaggttccatcatcaaaaacaatggtgaactcagactcacaaaccgatcacagaacgtcatcggccattcattctattcaaaacccattcaaatgtttaatcccaactcttcttcttacccaaacgtctcttctttcagtacccatttcgtcttcgccattgtcaaccggggctccgacccaggtgggtacggtctcgctttcaccattgctccaaagacccgattccctggagctgaagcaggccactttctcggccttttcaactccagaaacgataatgactcaaccaaccatgtattcgccgtcgaattcgatacagttaatgggtacaaccaactcactgacacgagtggaaaccatgtcggaatcaacaaaaatgggatggattctttgacttctaaaccggcggcttaccattcaggaggaagtgatgaagaggttgatttagagagcggagatccgattcaagcgtggattgattacgatggtaaaactggtttcgttaatgtaacagttggacctgaatctttagacaagaaaccgagccaaccccttatgtctcactggataaacttaacagaggtttttttgccaaatatgtatgttgggttttcttcatcgacgggaatgaaatccagttctcattacgttttgggttggagtttttccttaaacggtgaagctccgccattaaatctctccttacttccaaaacccccaaaagagaacacacccagttctttaaaaacaagtaccgttgttctaatcgccgttctgtctactctggttctgacccttttgggggttctcttcatactcacactttacaaaagaattatgccatttgagcgtcttgaagattgggaattggattgtccacacaggtttcgatataaagatctttacttggcaacaaaaggttttaaagaaacagagatcgtcggagttggtggtttcggcgccgttttcagaggtgttataccgacgaccggagttgaaatcgccgttaaaaagatcacgagaagttctaaagagggtatgaaagaattcgcagctgagattgaaagtttgggaagattaaggcataagaatttggttaatcttcaaggttggtgtaaaaaaaagaacaatcttttaatcgtctacgactacatcccatacggtagcctagactcgcttatatttcaccctaaagacgacgtcgttttgggttgggaacaaaggtttaacatcatcaaaggtgttgcttctgggcttttgtatcttcatgaagagtgggaacaagttgtgattcatagagatgtgaaatcgagtaatgttttaatcgatttagatatgaatccaaggcttggtgattttggtttagcaaggattcatgatcatggtgagttgtctcacaccactggtgttgttggcacgattgggtatatagctcctcagttggctcgtgttggaagggcttcgacttctactgatgtttttgcttatggggctttgcttcttgaagttgctattgggaaaaggcccattgggtctggtccttttaactttatttttgcccttgtattttataaaaaaaaaatttccgttcaaatattaatgaaatttattttattattttattatatntaaataatattttattatttttttaaataaaaataaaaagtcacccnnnnnnnnnnnnnnnnnnaagaattcagttatataggtacactttatatagaatagatatttatatacataaatgattagaaatcattgtattattaattataaaaatatatattgattgacgcggaaattgggatctattaaacatttaagcatttattttttaaagatttaattaaaaaaacattgacataataattaattaatatatcttgacaatacttaaaatggacatataaaatataaatgagtgtattttccctattttcatattattacagatttgtattgacgtttaagatcatggtctggcacttatacaattttaataagataatgccaggacattacatttgtttaagaaagataggacaacttgaaaatggcctatgaagctgctattaaataaaaatgacttcgggaggcattaagataatatattaattatatcaaataagggacgacactacaaaaaaaatgttactactttttaatcccaacttaatttttttgcgactaaatgtgacttttaatcacaacaaaatgttacttatgactaaaacaaagtatttagttacaagttatcactaatttagttttagtactcacaacaagtattgtgactaaaaatacattaagtcacaacaaattgtaatttttattactaatacttttagtcacggaccttttagtcacaacataagaatcataatttataactagttacaattttttcacttttagtcacaagttttgttgtgactaaaaacaagatttattttaacgtcggccattgaaaaatatatgagagatcatgacatttatttttaaaaattaaaccccaaaaataagagttttttttttattatttttatatctcattttatttttatagaaattcacataaaattacatatagcaaccaacagagcaatttaattaaatcgaaattaaaatctacatagcaactgatataaaaattactgaaacaatcaaaactataaattttaaaaaatatacttaaaaagataatatatgtgataatttaccaaaaaactatattaataatgccggaaaataatgaaagaatgtgatcaagttagttgtcttttacattatttttcctcgttttttaaatatatatttttttaaaaccttttataataatatataccaaaatctaaatggaaaagtattttcaaatatgatgcttcttctttcttatcaattaccaaacatatataaatttcttaccaacaatttgaagacatatttctcaaaatttaaagcattaattatatgaaatatatttggagttactttggtcaatatattggacgcacaaaaagaaaatccaatttagaaatttgaggaacaaatctttttttttttttttgtcatgccaaatattagcatatattagatatttttgtataactttttaaggaataagagatgtactatatcttaaatccattggcaaagcacattcgggaagataaaattgacttaattagggatagagaccaacctaagatttcattttgccatcatatattctctatatgtttttctctcaagtgagagagttagagcctccaacttgactttatgttggggattcaaaaacgccttcttccccttatttttctctgtagcagttattccttacgaatgttaactatgtttgtgtccggcttcgtccatttctttcgtccggtagaatatcggtgggcgtccaccccatttcctgtgcccggtggtggttctttcttcttctccaacctcatcgttctcttctatgcattttt

SEQ ID NO: 16289 - DNA, 5379 bp, Cannabis sativa
catgagtgtaattggatggtgtgtcatgatggctggtttccgagttttagctagttcagagctttctagctcgaaaactagctcatcacgctcttaattaggtggcgtgtcaaaaaatgataacgtatgatcttttattttgacacaccactttaaatccaacaaacaaacctctctagctcgagaacaagcctttgtactcgagctagatagaactatttttttcttaagtacttttgcatggtttttacagggctgtgatgcatcggtgttgctacaaggaaacgggacagagcgaagcgatccagcaaacacatctctagacgggttttcagtgatagattcggctaaaaaagtacttgaatttttttgtccagagactgtttcttgtgctgacattttggctttagctgcaagagatgctgttgaatttgtgagtgtttttatcattatgtttttctatgtgttatggttgagtttttaaattgttgttattaatgtgattgtatagactggtggaccagttgttgagattccaacaggtaggagagatgcgaaggtttcttcagcttcaaatgttcgacctaacatcattgatacaagctttacaatggatgaaatgactaagctgttcatctcaaaagggttgtctttggatgaccttgtcactctttcaggtacatatttacaataaattttaatcttaaactcattattatgacactagttactacttagttactagttaccagttaccattaccaattacgagttacttttttaataaaacattgaactattataagagataaacaatattcaatttctaatgttttggcgtgttttggatgtaggagctcacacgataggacgagctcattgtggcgcatttagtgaccggtttcaagaagatcccaaagggaaacttaccctcatcgatgcatcactcgacagtgcatatgcaaatgagctcatgaagaaatgcccggctaatgcacaaccttctacgacggtcaacaacgatccagaaacctcatttgtgttcgacaatcaatattacaaaaatcttttgaaaaagaaaggtctattccaatcagattctgtgttgtttggtgataccagaacgagtaaaagagttgagagttttgcgaaaaaccaatttagtttctttgagagttggagtcaatcgtttttgaagttaactactattggtgttaaaacaaatgaggtaggggaaattagagccttatgttcatctactaatgatggttgaaaatagtaatgaataaaaaaaatctttagtactaaatgctaataaataattaagcttaaaagagttgctttgatcattaatatacctcttatagtatatacataattctgtccattaattatgagccttaaattttgtttgttgcatgtttggttgatgaacattgatttttgtcctcaatgttgtcaaataattaagtgtataaaatgaatgagagactagtaatttattcttttttatataaataaatatatgttttgaacatagtatctagtgttttattttagtctaatttttagtattgttaaagtaatcaaaaaataagaatatttgcagtatatgtacttaaaattttgagtttgtaattaacatagatttatgacttttttagcaggtaaagtactcaatgatataaaattgtaattttgtctcgttcctccactataagttttgttggtgtcttaaaatttgtaactaaattttagtttttgaatttgttgaaaaaagatttgaaagtaaccgatgttacacgttttcgtcaaggtgtaataatttaaaatttaaatcttatatgtgatttatttaaaacactaacatattgataggaatctcctattttttaagtatagacagtagtgaaaaaaagaaaaatagagttaaatagtagctaataattgaagtgaacaagctattgggtattccagagacccagtgctctcccaagtcaagagcaatagttctattatctttatacccttttatttattaattaaggcctatcacatgcatgtattgacgaaattgaacgaaattacaattttactataagtattttaagcgctataaaaaaattattaaatgtttatcaattacataaattaatatttttgaaaatttatataacaaatatcttcatgaagttactattactccaaaaagaccaattaaataacaatataagtttttggtgtagatttgttgttattagtcttgttttatttttgagtaatttagttaatttaaataattagtaaatagtaccctttcaaaacaaaaaatacaaatagtattataatgatatacattagcacacaatatgaatcagtaaaaaaaagaaaatattgcttctgaaattaaagattcaataatattaaattaattaaattgattgtaatatttaaattttaataattataattatttttatatgagcttctataattattgttgaaaaaaaatattaaaattatttttttaaaaataaagaacaaatatttcatccaaaaataatatgagagtaatacaccatgaaaaaataatagagaagtcattcatactaattcaccatccaccgtgtatacagtgttaattcatgattatgaaaatgattactaaaatacatgtctattttataattttaataaaaaaatacattaaaattataaaatacatatttattttaatgattaactctttatttataataaaaatacaaaatatataacacaaatttaaactaagaaaacgagttggtatattaaaaaaagcaggggacttgaataaaacaagacacgaatccaaacacgacatcaaattaagtttgagtcgtgttggacttactttataaaagtattgcatggtagagacatatatttacaactccatgtccacctatcattgccatgagtgtggaggttgaaatctttgtactctcaatctcaagggtgttcactcttacatctgatggggtttagagatgaacacattgtctcagccaaacactctttttgtgggaaatatatatagtgtttgaaggtacaaacaaaccaccataactctattgtgatttttgtgaccaaaagactattgaatgcagtcactgcactcacttatttatagttcattaaatgcattttccaaagtttcaataacccattcatgggcaatcaaatcaggttccataacagatatttacatagctaacaacatccttaatgggtattcgaaatttcaagactttcggtatgcccataaactgtttgatgaaatgtttcacagagacactgtgtcttggaatacagttattgctggtaatgtaaactgtgggaaatttgagtttgcttgggaagttttgagaaacatgagaagatttggatatgaacttgatggttacacatttggaagcatacttaaaggagttgcttttgttaacagatgggatattgggcaacaattacattcattgttatgtaagattggatgtattggtaatgtttactgtggaagtgcacttttggatatgtatgcgaaatgtgagagagttgaggatgcatttttggtgttcgaagaaatgcccgaaagaaacgctgtttcgtggaatgcgttgatttcgggttatgttgaagcgggcaatcgaggtactgcgttcggtgtttttaaatgtatggaagaagaggaaagtgtgaagcttgatgatggtactgtctcaccacttttgacattgcttaatggtgttgagttttatcagttaactatgcagattcatgggaaaattataaagcatggtgtggaatctaataataaggtttgtaatgctttgattagttcatattctgattgtggatctttaggagatgctaagaaagtgtttgatggttcttttgaaaacagagatgtggtgacatggaattccatgattggagcttgtttagttcacaacaaagaagattatgcatttaaactctttatggaaatgcagtggtttggatttgaacctgatatatatagctatactagcattataagtgcttgttttgaagcacataagaactatggaaaatctctccatggtttgattataaaaaggggacttgaacaatcagttccagttaataatgctttgattgctatgtatcttaagtcaaataacagatccatggtggaagctttgaacatatttggatccatgaagttgaaagatcgtgtttcgtggaactcgattctgactggattatcacaactcgggttgagtgaagatgccttgaaactgtttgcacatatgagaaatttagctatagaaattgatcactacacgttttcggctgtcctcaggtcttgctcggatttagcaaccctccaattaggccaacaggttcatgtattgtcacttaaatcgggccttgagtcaaacgaattcgtcaccagctcgctgattttcatgtatgcaaagtgtggaatcatagaagatgcaaagaaatcgtttgaaaacaacccaagagacagttcaatcacatggaattcgatcattttcgcttatgctcaacacgggcaaggctacattgcactgaacctctttgaagaaatgaaaaacaaagaagtgaaagccgatcacatcacattcgttgcggttttaacagcttgtagccatattggtttggttgaacaaggctgcaagcttttaaaaacaatggaaaccgagtatggaatacctccccgagcagagcattatgcttgcgctgttgatatgtatggacgagcagggcatctagacaaggcgaaaacattggtcgaatcaatgccattcgagcctgatgcaatgctgtggaaaactttcttaggtgcttgcagggcttgtggaaacattgaactagctagccagattgctagccatcttcttgaagtggaacccgaagagcattgtacttacatactcctttcggatatgttcgggtatctaaggcgttgggatgaaagagcaaatgtaaagaggcttatgagagaaaggggtgtgaaaaaagtccctggttggagttggatagagattaagaatgaggtacattctttcaaagctgaagatcgtttacaccccaattctgatcagatatattttgttcttgaagttttgatgtttgagtttagaacaacattagatgttgttgatgatgattttgatgttttgattgacaatgtggaggatttggctttgttttctgatcctattccagttgctttgttttctgaaagtggaatgtaagaccattgtaaaaattgagttatatttggtacaacaaataatgagataattatataagtaaatactattttgg

SEQ ID NO: 16290 - DNA, 5656 bp, Cannabis sativa
ttgtagtttaaaatgtattggttaaaatttttttttttaaatttttaagtatagaaaatcaaatttcccttttgagtttctatggcaaaatcttactgaaaatttgacagtaatcggaaattcatggtgagattttgacttagagactaagaatgacacgaaaataagttaaagaactaccctgaacttggaactatgtcaattttcagaaacaaaataccattaactcaatcgaaaagtgctacattgcctgtataatattttaatttattagtcaagaagattttcatgtaaacctgaaatattggtctgagttttcttgccagacccaaaacttgaagtgggtgttcctacccatttaaaaacactcctaatatgttctgacactgttgtaccaacagaaggtgagtcagggccaaccatatctgataatcttcttactgggtcttgatctccctcttgtgtagatgaggaatttctactgttgtccatggaagaaggtgatccaaatgattgatcatctatttcttcccctttgtatatgatcttaatctcacagttttgcggtgcgttttcaagaatttgacttgcagttcctcgtttagacttcactttcctaataatagttgtaaatccaaattagttttacttattttattaatgataagaaaaacatgacaataaaacagtgcactgaccattcagagtggtcttgtaccttagagtggatttggtggatccaagaactagctttcttattttgagagatggaattagttgtaggatggcctctgaaggaatgtcactctctatttgcagagtttctaccttgacctgttttattaatcttcttcctagtcagagctatgtaaatacacataatttttaatgaagaaacaaagaacatactactagtatagttgttttaaatgtatagtatagacgcatgtttttgaacacctacacaacattttccccctaccttagcggctgagcatacatcaatgtaattttgcaggagcttccttctcttgtctctctgttgagctacatagatctccaccacttttgggtttgcttgactctttggcagcatccctcctactaaagttgttaaaaaaaaatcaataaataatagtttttttttgatgttttcttgagcagcaagaattgtatatataggaagttttaatggtcacaacaaatatgtaacttggttactgcctaatgctgaacacaatattaatttattacgtgatagcatggttagataacatgtatcattctcaaacttatgtcggtgagtggcccacaaacaactcgaaaatcatttttttctctttagaaactggttatagcgggatttgtttaactcgtatattatttttgtttaaaatattatttttgactgggttaaaattttcatttaaaatattaattgataatttaagagaaattttatttgtaccacataaagttataactgcaccttaatattaaaaaataattaaaacttaaattaattttaaattaatttttaaaaatcacttttaatatttttttgaatttgttttcatattattttcttttaatattcatagttagttttgttttatttttacattttttttaattttttccaataaaattgtatatcttaattttttgtgttttaatatttaaaatatattttatttttatttttataggtatattaagaatatgacaacgaagaaaaaaaatagcacaaattaaatatatatatattttgtataaaataaaaaatattaaaatagggtgtacttttaactttatgggttggaaataaaatacctttaatttaatgtgggtgagttttatttacaccgcaaaaacttataaatacactctcttaatcattttattttacataaaaatataaatctttaattatattaagtaccccataattaggagatgtgtacaagatttattgtagattgtggagatatgtcttgatcaagaacgatcgagtaaatttgacacatggtgtcttagcaaactctagttatttgagcaatccactatgtaacaagtttttggtacctgatcagaccataggatcgttttagaattccctttaattggaaaggtgtacaagatttactgcatattgtgcagataggtcttgatcaagaacgatcaagtaagtttgactgcatagtatcttagcaaactctagttatttgaacgaatgttaaatgccaaaatattacatatttaataatttaaaaatacaaagttaattaaattttaattaattttttcataaaattattgtaatattcctagacgtaactattgattttcaagaccttcttgtcggttgtgctggttaaccaagagcaatcaacttgggaaaaataaaagtaacctaagtaagcggccctacttcgagttagatagacttcaagttgaaaaaccaatttatgtcatgaggggagggcaatccccatccttgctatgcgtacaggatgtacaacgtagccaagtacttgatccccttcgacgaaaattgcgttgggcaaatcatgtagcagtttgcgagtttttggaggtatggatgatgaggtaaaaaagtcccctgctgagcgtgcgagccgtaccacacatagagaccttctccaggatcatttgtgagctaatctttaaaaggaaaaaaggcctctatatcccttaggagaccctttttgtccaaattcacaagcctctttactgtgaggatggacggaggagagacatcagcttggacttttcttggtctacgaacgggcgagcctcttcatactcctaaacaatgtagtgacagttcttaaccatgatctctccccgcaccgtgataggctacccggcctcattatacctgtcgaaacctgcaaatggtacaacatgaccagtagcctatacttcctcatcagcctaggctggtcctctacttcttgcacttcacactagtgtgcatctcagcgtcttcctcattgaacccctcaacgtatggagcatgaactaacgtcattattcaagcaaaatgtgggtcttcaactgaagtctttttgtacgtctgcttggttctcaccactttcttagtcttgggcaagcatttggatgaggtgtgtagtgcgatattaactgcaatctccgcttgcacggttatcttctttgaaggctctaggttaccttctggcaaggtctctggaaagcctactcggaccttgtatgtcaaggatgcaggcaaatagtctcaaccctcgtgtagttcccaaacaaatcttttgtacccctcactgccaatatggttgaggtagtgatggtgttgcatggtaggttttggagattctgactcggttgttatttcctaactgtcaaacctgaatgctgaattctcactagacaatggcgaggttgcagggagtcttggctggtcctcgtagagcaattgaagtaagtcatcgtctactcggtgcttgcctctccaaagtttgtccgagttcatttacaaaagagggaaagagaggtaagaactgggtagagtcacgtgatctttttatggaaacaactctgatggtcgaattcaaagattgggcaaaggaaacttcacccttatgacgagaatcccagattgaagatactcaagaacacgggatggatccagaattctacagaaacaccgagcaaagtgtttttgagtgtttatcaacaaaaaacaatgaaatttgcaagaaattaaagattatggtccctgcatatgtttttggaatcaaattatatgtcataatctctaaaaatgaagaacatcatagttcctaaacccggaatgtttgcagaaagcaattcacaagttaaaagcatgaaattgaaggaaattcataaagaaattagaaatttactcactattgaagaattcctagtggtagtttgagtcaaagtctagaaaggatcttaaaatcctttgaagcttcgaagaaatttggagatttaagagaaaatgagtttgtgctctaagttttcaaatggctgaaagagtagaaatgggcttaagacttctttttataggtaactgctaaggtatgttggtaatcttaagatttgaattttgagcttccccccaaaagtacaattggtatgcatagaggagtacgatctctagcacatggcccaatatacatttttttgaggtgaatcattaaatgctcgagatatgaaaggactatcttcacatccctcgtagtccgggcacttgtcattctattctcctagcacatgggccgagcaagtccatgtacgtgcagaaagttcccacgcagacttgtggggtaaatgttatctcaaattctgcacaggttaacgtggcattcttctaagtgacacgtggagaacatattaagactttgacgggtggtacgttcttcagtatgctatccatagtgatttatgatctagaaataacttatctgaagaataaggtggaacattcggatagggtaaatgcaattttccgactagcctcaattctcacagcaagctcacatacagcgatcaggataaatgcgactaaagcagtattagagatactttccttttctatgtttcaattgaatccttttttttttttttgtgggatttatacacactgtttatgtaagataggaaagtagtcatatttctatttttatttcttatatattttggaaaacacttgacaggtttatttggcgcttaacaacaaaaaattaacggaaaaagtgttgaccaaaatgattatagaagttaggaactttagctataatttttttagtgtaggggttagatcataccaaatttaaaagtttagaaaatttgactgtaaattaaccttttccattttttttagggagtaaccgaccatcccattagtaagtatagattgttacatttctacttcttcctagcctgacaaccatcttcaagttagtaccgcacaaactccaaaacataaataatatcccacaccattccattaattgttatattaaatactctcaaatgagtgaccacgatcaaatgtggaaaaaaaatccgcattcgtaccagcgggactaaatcagtgcccataaatataatataatatataatgctactgggattttaactgatgaaagcttttgttgtcataagctctatacaaatccactctaaaagttagtaaatattgggcttggtacattttgatgtctaaagctgtaaataaaccaatagcaagttaaaattgccaaatagcaatgggcataaaaaagggtggctttcatatttctactatttcatcaattcgtgtcattttggtatgaaaatcattcaagtgttgtgttatagttgcagaccacttgcctttatttaatattttaagtcaacccttctatcattttcatccttaataagtcaaacttaaagtttttttaaaacaataaacacttttttgattatgttttagtaattaataagatcgaagcttataaatgaaggcatcaaagaagaaatggtaggagcttacatggagatggaacaagtcgaagcacagggaagacatgaatgagattgagattggtggtagaggctgttatagcattgtttagagtccaca

SEQ ID NO: 16291 - DNA, 7120 bp, Cannabis sativa
gaagatttctttcttttgtaactgcagttgatatagttgttagaaataatcttcaaaccacccaatatatttttttacaattgcaacttttcgccttttttgttgggtttggtttgaattggcgggaaggacttattattcataaacagaaataaatatagtagacatatgtaaatatagaagattaagaagataataaacatgtcttgtgttctagtctcatgatttatttattattattattgggattaaactcaaatcaaacaaatagttactcccgggagatttatttttatttccatagctacaaatcccatcaaatttcaatatttccttccaaagcttaaaaaaatagaaaagaacaaatgaaatacttcacaactaggaagaagaactggtctctctactccacaaaacaaaacacaagaggttctctcctctcctttcccctttggataatctcaactctttcttcaataaatataatataatgtatatatatatatatataagatatataggccagaccccttaagattcagtcatctaacagaagagcagagtttccttctcattcattcaccaccatttcgccattaaaaatagtctcaaacctgtaagaaacttgcgtacttggcacccaagaaaagcctctgaatgcatagtaatgcgtttttggtaacctctgcattctcgtgattcatcagtttcattactcgttccttcgccttcaggtctgtcactatgattcggccagcagcatggtgttggatgaactgtgacagatcaaagcaagcaaccgctagagctctcgggtcacttgatgtgtccaatatagtcatcaacaccctcagaatctgcaagatattggaaattgtttgttgtccaataatcatatccatttttcggttttcacaaagtaaagagaaaaagaagtacaaatcttaatgtcatacctgaaaatcattctcttcaaaatttgaaatattttctcgccagaatacaacatctttgtgcataggagaccagtcgagatggccaaggaggacttcttgcttatatttatcgaaagagctcaatgtttttatcttatccttcagacccacatctagttgattcaaggcctccaataagtcctgacaaaatcaggtacattacccgtattggagagttagaagcgtaagaaaagtcaaccttttctatgcaaaaacaaagccaaaacaggttgacattctaattctctaacctcgtcactccatgcttgcgctttcaaactcagaacaatttgcggtaggccaagatcaaccatttgtgcaccaaaagtccctttggagagcaagttcttgaaggtcaagacaacaaccctaacaacctgccacacaatattcataccgttaataaataacacacattgtgcctgattactatgcttagcaagggtaaaatctgtaaataccgtatatgatgtaaattttttaaaaaatagcagaacaatgaaatgaaaagggtacatacttaacaacaaattctgaaagtaactgaattccaaaactactctaaagtcgcgtgtgattacgctgttaaagaaataatatacaaaccgaaacacaagatcctcaccttttcctttgtagagctctttaccacatctatgagtcgtggaagagttctagaagtagccaagtactcaatggcaggttcatagtaggataaaagccacacacaaaggcatgtttcgtaaagaagctggttcaaaaataacatacagttagctccaagttccctatatggtatatataaaaaaactcttacacagaagcttgaattattgttacaaaacataattaaaaataaaccaaattgctttattactacaaaagtaatgcaccaaaacttggacactttaattgaccccaccacatgctttattctttagcaatcacacatttataacagttcacttctctcacatcaaactcacacacttagctcacacttttttagactaaggacccaaggtccaatgagcttggccctaagggatccaataatctacaatgagtttggccctaagggatccaataatctacaatgagtttggccctaagggatccaataatctacaatgagcttggctttaaagctagaattttcaagcaatttttaaacttgataactctagaaaattctacattttagcagaaaatctatttttcatgctcgaataaagcatgtggaggtacattacaattttttgagagaaaaaagagcgaagagcaaatagtagactcgttcactagaggaatcaacactacaaggttctagaagctaagagaacaagtaagcaagagacaaaggatgaatgggttggtgacaagggggagtattgaagagtcgtcaccgacaatgtgataactctaatactctagaattctctactgtttatatttgtaaaaactgctagacttttctagctcttaggccaagccaatgtaagactattgctagaattttctagcaaagacaaaatcaatcggttccttatgtggtgtgtctagaaaatgtgaccaaaagtgtgtacgttgagtgcaaattagagtataatatctgttgccaaaaagagaaatatttatggccaaaaaagaatgtgagaaaagtgaagagttttaagtgtgtgagagtccaaaaataaagagtgtgtaagtgcttgttgtgtcatgtggtcaagtaaagtgtacatgtcttggtgtaattacttctgtaatataaagtgattgcgttcatttttacgtgttttgttgttctacaaatccaaagcattgtgttgaacataaatggaagcagaagtaatacatatcaaataaaagttacctgaatagactgctgagtggatgctggggtaatcaagggcacaagcaacttgactccgtcagcttggacaaaggacgatctaaccacaggttccttgagtagggttgaaaggcagttaatagcagttgggatgccacggctaggatgtgaaggcctcttcagctgtagatgacatttggccatatgattaaaactaatatctagaaactaataaattgtacttgaacaagttttaaagcttgctaatagcaaaatggctatcaattgttggttgcaaaacaaataataacaagttctacactgcatagtgcttgttaaccaaaaacataaatcacagaaagttggcagcataaaatgaaagaaaccaaagaacccagaattataacaaaatatgttaaccgctatccaacaattacagaaacactctacatcacatataagctataaccaccatatgagttgaaacatccaaaagctgaaagcatacctgtacacatagccagtccaccaagcctttcagcacatcatcaatagtagctgatgttctcttcgaattcgaggctcccccatttgccataactccatcatgggattttggccttgcactgtattataagagggaaaagaaaaattattacgcttacaagaaaatgatcctcactagctcgaagtgataaatgcagtgttgagaaaatctatcatgtttaaattacctcactatagaagcaagtatcttacagctcttctcttgtgcaaaccaattaccatcacaaagcaatctgaaaatttcgataattcaaaggtttcgcattcaccaaatactaaagtggtatcaaattaattaaagactctaaatttgtaagtctttaaatttaccttaagaaaggattgtaagtatcctcaccagacagtgaattgtcatggaataatctagctcttttcgggtttgctacaaaaagagaatctcggaggtttaaatcacaaaagataattcattttcattacaaagagaaagaaattgaaaaaaaaaagtacctgcaagcatttcatcaatcaatgccagtacatattcaacagtttcttctttatgaatgtccctcaaaatgctaacaaacacccgaacataagccggtccatcctgcgaaaaatcgaaagcaactaatgtaaaaagctacaagaatgtagtttgaagtaaaaaagaaagaaagaaaagattacatcatcaagcaattgggctctgtaactctctgatctgttatcataacgcctcaagagttgaagacaagttccagtaatgagcttggtggtcatgtaggtctcccatgggatatcccttttcaaaaccttgaagaaaaaaaatcaagttattatttttctcggttaaagtttcaagatttgggatttaggttaaattagaatcgattgattgaatgatctgcaattgaagttgaaagaagtaagagaagaacctgttcagtggagagttcagcatggtcgatcgtcattggattgaaattgaatcacctgttactgttaaagataggttagatcgagaaatcagatgagaatcgagatagaaatgggaatcgggaataaagaaattgaaacctaaagagaattgggattggatttgaattgaattaccttggattgggattgggattgggatcgattgagagcttcggaggaaggagacgacgatgaataatgggacttcactcactacaaaagtacaaaacaaacgaaactgtaattatgtcgtgttttacatttgtacacgtgtcatttttgtaatttacttaatatttaattaaataaaaattacacaattaagtaatttatttatttattttatttttttcagcataaaattttaattactagatcaacatcaacaataacatcaacattgtaagagaaattagaacttgtttacaatccttaacttgtactaacaccgtacagtcagatttaataatactaacactcgggaatcacgcttcaatcatgaaagaagttctttcagaaccacaactttagccatttctagcagaactctcccatatcacaacccataaattatagtcactacatgtccacgatgatttcgaataaccccgccaaaaccataccttccttcatcgtcaaaaatagcagcttcaatattcactttgagttttttgaaacctagtttagactacaactcagccccatcgaaaggtaccatgtattaactgaagataacaaacttctttcttaaacttttctccactgatcaagagtgatatgagccatattgacaacaaactccatccgacttttcctaccttccacaaaagtttattatgcatgaactaaattgtccacgtcaacatcaccacctgagcactttgttcctcacccagccgagaaaacaagtgaaagaaccagtccccaaacgaccttgcatcaaccggaatcatagccaaactaactacctgccaataattctgagcaaaataacaagaaactaaacaatgcaaaactgattcacttgctccatgacaaaccggacataacaataaaaatatccacatgtttagttttcaaatgaactcttgttggaatacacccattaactgccatccacacaaaactttttgcctttggaggaagtcttaaacaccaaaatttcttccaaaatgccacaacatttccatccacgctaccaactcggtctacctgtaacaatttaaaagcactcttaattgtatacctgctagaagagtcaaaactccaatacgagtaatccctcaaggtcgacttagatagaataatactaagaatacttgccgcctcattctcagcaaccaaattcttgacaacatcaacatcccaagctatctcacccactaaaaagactactaacattttcattagccaaaccaaaattcaaactagctagacttaaaattgaaccattcaaaagccacaaattatgaaacaaaaaggtcttctccccatgacaaattcccttcctctatccctcatgaaccaactcttacatttcaacaagacttctcaaattataacttggattggtactaaattgtaccgaaagaaaggtctcattttttttaaatatcgagtcttgtacactctagaaaccaacgagtcgggcttagtcagaaagcaccaaactagtttacccaacatggcaaggttgaaatcatgaattgaacagaacctcattcccccaacctccttgatacgtgacatcctctcccaactcatctaagaaatgctttgacgggaattcgcagacgactttcaccaaaaattagtcataaattgttctaaattatgacaattaatttattttttaattggtcttataaataataataaagttattagcagcaaaaccccattattttaattcttataaacttaacttccaaattttttttgtggcaatatccattgagtttacatttgttacaaatttgaggtgtcaattaatttttactgttaaatgtcaagagggcttgccactgtgaatatatgtgtacacatgacactaaaagcttgaatccaataaaaatttgactagtgccttaaatttgcaaacaaaaataaatttaaaggagtattgccacaaaaaaaaatagagaattaaatgtataaaattaaaatataagagaattttaccgctaatcactcataaaaaaacaaataagaaatgataaaaaaaaacctcacaagatttaatagtattgttattaggcatatggtgccgttacgaggtgacattttataaacgaagtagatttctataattattattaaactaaaataagtgagactgaagcttttaaaaaaaaaaattagattcaatattaaattgtattaagagtgatattttataaaaattaacatattaaatcatgatatattgtaataatatttttttatgaaatatcactaaccattttaaaagtcatattacattattaatgcttaatagtaatattctaaaaaatatatatcgtaaatatattcatttttcttggatattttcaatttttagttcaaagacaaattatattctaattttgtcatttatagtgatttatattattgttatactaaatatcatgtgaatttttaaattactttgaataatttattgggatcaaaatagtaagatgcatgtgtataaaataaaataaaataagcacctacaatttattattttaattatattttt

SEQ ID NO: 16292 - DNA, 3872 bp, Cannabis sativa
  modified_base (3807)..(3812): a, c, t, g, unknown or other
agaagataatagtgatgatcacccagaagataatagtgatgatcactcagaagatgttagtgatgatcacccggaagatgataatgatgatcacctaaaagatgctaataataacgagaggaagacacgaggaaaagcaatatgtaaagaagtcttaaaagcaagtagtgagggtcgtaactatgaagttgagtacaatcggtttggtcgagcaatggggaaaggggggaccaagatgaacagcatgattggtatgttggcacgtaccacccttcctttaaataaacctcattggaagaaagtgcctgtagagaagaaaaacaaaatatggaatgagatcaaggtaagctttaataatatatttttttcaacaattctaaactttataattaagtaatacctaaatattgttaattcgtgcagaatacatttaaactctcaaactcttctaaaacaaacgtcctaaaagaagctggaaagacatggagaaactggaaaacaaggatgacgaaagatcttatatatgaatacaaggatgtggctcctcaacttcttgaaaaaccaccaaaggactacatcaactattactctcctgaagattggaagggatttgttgcaactagactaactccagaatgggaagagttgaggaaaagaaagcaagcttcccaagctcaaaataagtatccccatcgaacaggacgtggtggttatgcattaatcgagcaaaatatggagaaggagttgggtcgtgagttaactgagtatgacagatcagaaatgtggaaaagggcccgaatgaataataaaggagaagttattgatgaggaagctcgagaggtggtacagagaattgtaagtgttatttgactatgtaacttgttcaaataatttgcatgcgatataacttattctaaccaagttgattttttttcctgaatattaggaaaaatacaagaaaaaagttgcagacggtgagattatggaggaaggttccaatgacgtattaactatggcactagggactccggagcatgggggtcgtgttaggggggtcggtagccatgtcattcttcgtcaattttttcacaccccagcacctagaagattgacacagaaaaaatctagtgtggatgaagatgctcgctataaagacctcgaagataaatggcgccaaagtgaagacaaaataaacaaattgatggcgttcattcaatctcaacaaagcggggtatttgaatcacaacatgcatttggttcgggcgttggaggagcctcaaacacacctcaagcaccatatgctcctccaccacactcacaagcaacatacgctccaccaccaccctcacaagcaacatacgctccaccaccgccctcacaagcagcatacactcttccaccactctcacaagcacatcatgaggtatattttcttacttcctttttgtttcatctattgattataaaaaaagctaattttttgtttgttttggaatatagcagaataaatgcaagttgtgcattggttccataaacaacattgtagcagagggcacacttataaccattaattgcacagaactccgtactgttaaatcgaatcctagatattgtcgtgtgaggattgatgttgtgcatcaaaaggatgctattttacctaaagcggttacaagaaaaggctacaccttggttggtcaggtaattggttatgaggttgcatggccaaagaaatttgttttgtgtgagaagctacagcgagaccaattttccccttcaactcaacagccacgagaatcaagactcacaagggagcaagtaacgcaactaacacaggagcctattacagtgccattgacaccaactttgaattgtttgaaaaagttgatgacccggtggaccgatggtcgggtggtagaaattccgagtcaaaaacgagtttttggattcccaaacgtagttcgattaatgaaatatgatatcgaaaacttgtgcaattatgagatgcttggagagaatgagatacaattgtatatgtggttagaacatgcaaactttttctttttctttttttttttgggtaatttgaattaaattagtttactaactatttaatttgtaggatgctcgatgaacaagtccatacaaatggtttaaaccatttatacgcttttatgcatcctgctttaatatctacaactgctggaacagatgaagtacgtgctgacaatctcttcaagcgattcctgcaaatgagcctagaaacacaatttctaatttgcccttggaaaattaagtaagtaacctaaaattgatgtacattttttataaataacaaatatttgcctaacacaaagattgtttgattattgcagcactcactggatgttggtcttaatccagccacacactcattcagtggcttttttagatccaatgaattcacatttccgtgaagagatcagggatataatcattatgtaagttatacaaaatatttgttaattaattcgcatgcattttcatttgaaacacttataattaacttaatattattttctgcagggcttttgataagtatcattcatacctttgtaaagcagagactgacaattctaaactttgtgttccgaaagtaagtaaaacaacttttaataaaatcttattaaaagttttattataaacttcagattttatataatacaaacttctcacatatatgttctaaatttaattaatagtgtccaaaccaaagtagacctaccgagtgtggttactatattatgaagtttgctaaggaattgacttccaagccgctaccaaaacaatacttgagacgggaggtatacaatgtattgtttagatatgtaaatttgaactaatttttgtaatttgaatatgtattctaatttattaaatatttttattttaactagatgaagaggaccactccatatacagcagaggaaatcaatgatttacgagatgagtgggctgagtcaatttttcagtatctagcttagcttcatctcatattagtgagaacttataggcacttgttagaactttagagcactctcagagagctattatagctcatcaaaatgtaaaatatgaagaagatgtgtcaaaaaaaaatggctccatcaaatgtaatattgttcaaaattttacattatgaatagtattttttcacattcaagtaatcttttaaggttatttaggatttttactcttgatttatgacatatatgaatgtgcctcttgaatttttcagtttgttaaaaatggtctttaaactattcataatgtcgtaaagtggtttttctgtaagttttgttacatgtggcaaatagaatgatgatgtagcattttagactattgttatgtcattattatgtgtgtaattaattttaaaaaaataattctaacttttttaattattttattttttaaaaaattttaaactacacaatggtacttatgtggcaatgatataaatgtagaaaatgaaagatgggctgagaactccaatgcgaggggatttcagggcggttgagctagtggattttagggttttggggtggagaaagtaagacttagttagagtgtaagacttagttagagtgaaagagttagagagacatgtttttttcttgaaatgtaggtgttttggagaagaaatgatattaaaagtgtagatgtcttatttctaattggttgttattttaaaacatcatgtttcatattggctaattagtatttttgccttctgaacttttaaggctattgaaaatgccccctgaactnnnnnnattgttggatttaagaacttttgtctaattttattcaattttactatttcaatgattgtt

SEQ ID NO: 16293 - DNA, 3231 bp, Cannabis sativa
ataaaaacaaaatagaataaaattatttcgtgtccccaatactgtcaatacttacatctgcagcctaaaaatgttggaacccaatgaatcaatataattttgcatacagaataacgaatttcatcttttataattgatctgatttgtttgaaaaagaaaaaagaaaaaaacagtgacaagagaatgtttattctacgtttcttctagtagtgaactcaaaagaaaataagaaaaaaaaataaaaggttaaacagagcaaattgatcacaatttcatcacgattatgcttctcctatttgtagcgcaaaacataccatcgagagcatacgacggcgttttcacatcggaagtcgccacataagcacaattgggcttctcaccttgtggacaccattcttccataccaaagctccaaactccagctcagtttgccgtgatttcttcttaaacgtgaccttatacgacaatttctgaccgaccttggtgaagttcagagaccgaggcacaacattaacagatacacctttaaacggcgaaaccgaaaggtggtaactcgaaaccggagaacccacattggtcactgttcggcgaacactaagaacagaaatgtttgttttatccgggaacacaactgagatagcagggtagttcaagtccgctggaccggcgagagtgtgtcgacaagttctgttggagtacttggcgaaaacctttaactgggttggagatagattctgagtacaaaggaaatcaaagtagtcctgaggctctatgtcgtagaccaaacccgggtcaagtgcttttctcgggtttacatgacccgctccgtggtcaaaagggctggaaggaatcgtcgaggaggcgtctctaagggggtggagagtgttgtcgtgaacataagcagtggtcataagagctgatttaatggcggccgggctccattcggggtgtctagctttaagcagagcagcaataccactcacgtgaggacacgacattgatgtaccagacaagatgttgaatttcactcttctacgatccgttggtaaacttgatggacccaaatcccctgtccaagcggcgaggatgttgactcctggagctaccaaatcaggtttgagaatctcaaacgtgaggaaattaggtcctcttgatgaaaacgctgccaccacaggagatggtctaatccccacgcgagttcccaaaaatgctatgttagctgtggctttggggttagctaaagcgtaacgctttacaattttggcctcgttttcaccgacggccgctgcaggaagaagatgggaatccgccaccaattcctcgccgtttgcacccgtgtttgtcagaatcattccgacccctccagcgtctttcacaacctgacccttctgaactcgagggctaattccacggtcgcatatcacaatttttcctgcaactttacgcctttctaaggtcccttctaagcataacgatcccggatcagggacggtcgagttgtttcccatataaataatcgggtactgtttgttttgaagtgttcttcgacctttgtagagcgaaactccagatagagtttttccatttcctagcttaacagttgcaggaaaatctctatccatggtgctagctccaacagtggttatccacggtgacacattggtaaggctaaccgggtcgggtcctccgttacccgcggatcccgagacaaaaacgcccatctccatagccccaaacgctgcaactgataaactgtctctatagtaagatgagactccaccgcccagagatatcgacaagacgttgactccgtcggcaacagctctatcgacggctgatagaatatcggaactgaaacaaccgccgacccagcaaactttataagctgcgattcttgctcccggagccattccccttgctgtgccgtacgcatagcccaaaaggtttgctcctttgaccggtgcaccagcgacggtagcggcagtgtgagtcccatgcccatcttggtctctgggcgatttgtactcgttctggccgttgattttgccggtagcggattcgtaaccccggtagaacattctagcgcccacgatctttttattgcagtggtttttagtaaaacctcgaccaatctcgcaagctcctttccagcgagctggaaccggagtcattccggtgtcgttgaagctctcgctctccggccaaatcccggtatcaagcaccccgacaatgacgtcatggtcagagatcttttccgaccagacccccgtgctgtcctgttttgaatcaagccccagaaagagtggacttcgcgttgtgtgaagctcatacttcttttccgggaatatggccagcacgccttcttctttctcgagcttgctagcttcttcttcacttaatcgagccgcgactccatgaaatacagtctggtagctgtatattatcctttgatcttcatcggcgtcggtttccttgtcaatgagaaccgactttactttagaagagtaccactgcaagtgatcagaaaatgattcaggcatggctgacttgtctatttggacaatataagtagtcttcttggccatctgggtctccacgcaaagtacaagattaaagagtaagcagttcagtattataaaaaccaaccatttgactgaattttcagtcatgtttaagctaagaaagatgagcttctaattctttcctaaactaatatatatatgtatcaaagaaacagagtataaatgaaagaagagaggtttgggaaactttagtgaggatttagagtttaggcggttgaaatatctcgaaaggagctatatgaggtgtagagtgtggagtgtgatttaagttcagtagatgagtggtgtggtaccatatttgcaggtgtataataaagatggttggttaggatcatgaatgcatgttaatgttgaatagagatagagaaagtttgtccgcggggcaggtggcggtggcagtaaagtttggccatattgctctgtttttgaagcagtgtattcgtgttagtttcataaccattggctgtgtaaattgttttgtacttttacagctagttttagtactggaaccacatccaattggactgaacacacccagtatattacctttttatggtaattttattcatggtataggtttttaaaatcaagagcatccaatagatgttttgtaagtaaacaaaaataactaattaaaattatggaggaa

SEQ ID NO: 16294 - DNA, 3693 bp, Cannabis sativa
aatagctagctctacgaaagtacttactcgaaaacaaattgttctccacacttccacgagacatgtactcgtaaattagtactcggtgttcatcttcgcagcaataaccaacaagtttaaccaaattcggatgtgaaagctgccccaagaaaataacttctgcctagaaacatacaaaagctctcatttttagttacattttcattgaaaactctgttatggaatcgaatatgagacagagcatttttaccagccattctctatgtccctgatgactgttatctccatcatgaacctttacagctaccggaagaggtgtaaggccatctcttaagtcctcagttataaaccctttatacacactaccgaaaccgccaccacccaacatgtaatcttgtctaaaattatcagtcattaactttaattctttgaatgtgaatgcaatcaaaggatttgctgcagaatcgcgacgcaagctctcaacttcctcgggatttgatggtagttttctaacttcttttctcataactgagggactattgtctttggatgactctgcagagtaagatcagataacaaaagaacacacatttcagttctagctagttatataaacaagttcattctattatggtaagaaaaagtggtaaaactacaacagagaaatgttaaaaggcaacagtggtgcccaatactagcacaccatcacgagctgtctattattagtttaattaagtatcagtgccacatattttaatttaataactattataaaacatcactaggtgatgctaattgcttggtgtggctataatgatgcatagaaagcaaaactaaagtggcaagctttatgaatggctaagcttaaaaaagtggaagaactacttatgactttgtagcacttaaatgctctgttaaaacaattgaaaaatgctaaaaggtaagagtggtacggaatacgagtatcactattggttcagttaagtatcaggtcgtacatatcttaattcaataattacgatagaatatcattaaccattcgcaagatgctactttgtaatcgtatcaggtactactagtgccttattttgtgtggctaaaggtccttattaatttttattaatgatgcctctaaagtattagaaagcaaaactaaagtggcaagctttatgaatttcttaacttaataaaaaaaactatctttatatcaagcaagttcattcttttagtctcatgtgtaaaaaaaaatgaaaagtattgtccttttaagagatttaaagtaacaaaatttcttggctccaaagtactaggaagcaaatctttcctttttctccattataacagttaaacaaagaaactatctttacttacacagttagtaaaaatcaccactttgaaagttactccaaaggctatgagagagtttgattcatatttttatttattttttattataagggcaaagaaaaagagtgttcatctgaaaagatattttattcttaaaaaaaaacaaattataatatagacataaaagacaagtccaaaatcagccatatgtattaaattatgaccaaatatattagtaaacaatactatttgtataatctagaagaaataggaaaaaagtttgactttaaagaaaggatataatttgataaaaaagaatagtagagataagagagagcgcactataatgaggaggactacccacttagcacatgagaaaaagtaaatggaccactatcatattcattagtggtctcaaacaaaaaagaaaatctctctcttcttctaattgatttttgcttacacaataataggaaattctaaagtgaacattttcaaacactctaaattctaaaaaagatggttttttttttttataaaatctaaacataacccttttagcttaattaactatgattatgtagttcactatgattatgatcattttagattgagaaaacacaaacccaagtaaaaaatccaactttggcaaaaatccaacaataaaaatcaaatctttttagtgtatcaaaagtaaagatcaaatttttatgaacaaaaaattcaattagtaactaacttacctgactttgcattggatgatactctgataactgaaggttctcttctgcaacaacaacaattccccatttttctttttaaaccaaaatgaataagaaaaaggtaaacaaagaaagaaagcttcaaaaaagactccttagagaaaacttaagagaaagagtttgccatggaaatgaagcaaaaaagattgtattttttttgtttataagaaaaggggtttgagtgggaatggagagaaaagtagtgggagaaaatggtgatgtggaagaagagaagatgagaaagtgtaagaaagagagaatggaaaaataaaaatggattctttgatggtaatgtaatgatgaatgagttgggaaggaaggaggtggagaattgaagtggacatttggctcttttgtcatggcaaagaaaatggggtccattgtatagtccacatttttatttatttataattaaagaaattatttttattattattgaagaaaaatacattcaaatatctttcaaaaatgataattatttatcccactattatgtcttcttgtagaagcttgattctccatttatttggaaaataacattgttcaatttcattaaaatatgcaatgtcatattaatatcatatagtatatttaggtttttttatttttacacttcaaaataatttttttttatattttacaaaattctacataaaaattcctattgcaactaacgctgcaacctaaatcgcaacaaaaaatcatataaaaatccctactgcaactagcattgcaaccactttagaaactcaaagcgtaaatgtggaagaaaaaaaaaattaaaaaaactaccaaaaacacacataaaattacaactaaaaaagactaaaaccacatacatatattggtaagctagaccgccacactttagcgttatgatagcgttaatttgtgcagagaattttatcgtttaactttaatagttgttgattttaagatgaagttgcttattttacaccgttgagaatatagattatatgttgtataatcttttgagtttttgaaattttgtataaatattactatgagagacatatttctcaactattaaattggaataagtataaaatatcaaattatattaatgaatgattatatgtaattttttgtctctataatttcaaggaaaaaccaagtttttaaaaaaaaataaagaaagaaaaatgcatccttaatgtcatttaatacttaatagttatccaactaaatttaatatatgattaatattagaattcaattttcaaaaagtatatattttaaaataaaatatatcaacaataagagtttaattagtgcataacaccaagtaatatcatcactataaattcaatttgtatgtgcatatgtttagggtatggagtgttttggaaataatattttttgtaaagatagaattattaaaatattatatattgcaaaacaatatttacaaaattattttattaagaacattttttccattattttgtttcaaaattaaaattggctctttctttctttattagtgcgcatagaaggtgcatagcattttcaatatatataaacaatataaatatatatatat

SEQ ID NO: 16295 - DNA, 15916 bp, Cannabis sativa
  modified_base (14235)..(14242): a, c, t, g, unknown or other
tacagtttttatattttcttatatacaactgacatttgcaaaaacacggtttttcagagaagattctttctatagtgttaaagattctgacaatgtcagcagtgtcaaattttttgtaacttaccaagctgtcctccattagataattcttgtttactcaatgcatcatctctttggattttcttaatcgaagaggtgaagatagttggttcattgagcaaacatgttcttcctcctggtcttgggcctggtgtagacgcaattggggtaggtaatctcattgtgctttgagttgtgtgatattgtatgtattctttcaaagtatagaaactcattgcaacctatacaaggtttaattatagcttttctttatgtctttgtaatgtgtcttgctcttgttccagaaatgagttgttttaactccatggacacttcatttttgggtttggtttctggttttacctctactctgatttcaaagttggttcaacaaccttattgcaggctaatgcggttacatttataagctaaattttatgctgttaatatcctggtttttgaaaatgggttcgccttttacctaagtcccatcctctgcagcatctagtcaacattccaattgctggttttgtcttgggttagtatttgtctattttgaagctataaaagtctataattttacatgaagaataaaaagaaagtaagcaagaatgtggaacctgcattcctatatatgcttactcacaaatacattatgcttatgagttttccttgcatggcattctaactttactatttctcagcttgcttccttgtaaactccaacaaattttcacccttttgtccatcttctcgaagtctaaatcattgagctagcccaatctaattatgctttgtttaactgtaattgtaaaattagtaagttgtgtagctcagattcaattattttatgatacattttcatggagttatgtttgattagattaaagttggctgtgctagtcatcattatgttgcaataccacaatttcaataagtgttcaatgcttggatgcatggtgattgaatagcaaaaattctattgactaatattggggtatctacccaagtcccacattggaagaatatacaaaagttgtcttgaatataagtgttccaccttctccattaatatgaagttcatattgctattggtccaattaagtattaggtcacatatagtttaatgtaactactgtgcctaatatcaatgctcttattattaaacgcctccttagtgtatgattttttgtttgatgtaacataagatttttacatttaataatctaacagaagtcgcattgaatgtcatatgtcatgaactgagccaagattataagccagacaaaatgctgttgtggtgatttgttgtaatttctgtataatattctattcattaacaagatattatgtattaaacactaggtattcaatatgtcaatgttaatccattttgtatagaaccattgccttacatttttcacataggtttggttggtactacaatagcataatgaggatgagattttttctaaacaaaattttgaccaacttttaaagctatatagtatagtagctttatataaatttttattttcaaattattttggttgaaaccacgtgatcatgcggaagttgatgttaatttgcagtttggagtattttatttaattgaatggggtgtaatttgtttatgaaagtttctgcagtggtccaataatagggcacaaatagtaacgggtacagcctactttgcttattatgatacgagtaaaaaacactaaaacagtgaatgaatgaaatgaaattaatccaagtggaaaccaatgaatgggtgttgaattaatggctttgaatatcgagagagaagtcgttgtcgaataacgttgtgctgaaatgggtgtcatcctctcaacaccattggtcaaaatggttatatgagaatagtaaagtaaagtggagttaattgccctgctctgaaatcttgaatcaaagacgaagcaagtctttattagtcttattattattattattattattattattgcattatttcacggactcccacacctttgacccctttgaaactatgcacgtgttgttctaagtttttttcaaacacctcagtcgactcacacacacacacacactctatatacgaataaattgtgatattgtagtggtcagcttgtgttaactaatctctttttttaacgaaatgtcatcacaggctccaccactgagtgtagtagtagtgtcgccgcagcagcagagagtgagccatggttcatcttctgttggtcctgttgttggtgtcttagttgctattctcatcttaggagcaatggcagtaatggtgggtcggttgtgctcaggtaagagaatcatgggctatggaaattttgacttggagacatgggctgaaaccaagtgctcttcctgtattgatggtagaatccaagttaatacccctttgcccaaacccaacgattctgctgttgctgctgctgctgcctcccaatgaagatgaaactacttatttgattgagaatattttatggggtttggcttgtatttctggatattattttggttgtggatcttttgtgttttttactcttttcagtagccaaaaatgtgatatgggtttacttttgtcttttttggatgatgaaatttcattcctttttgtttacattattagttcaaggttttagtattttgtctattgagttcattttaatcaaagcctccactttctggttgttgatatactttgaccttaatatatattaacaaacaaaataaaactaagcatactttaattcagggtaaaattttgataactctatcacacatttaataagattagatttagaagagataagtttattctcatacctttctgattctttgacaacttttttagtctctattattttatttttctttttcattttaatgtgctaattaataaaggatatatactccactttataattttttttgttaaaacccattgagtagttgaacctctcttatgaattttcaggttcaataaattacatatgtgaaactacacgcaattatgacactagcaaaaaataaaagataaaacatttatgaccatccaagtaaagaaaaagaaaacagataaccattattatgacaatttaaaatttataacttaacatgcaatgaatgatgatgttgcctttgaatgaaataaaaagcctaagccttttcgggtcgactagtcttactcatatcattctcattcattcactcaacaaactctttaaactttaagataaaaggggtgacaatttgtgttcctatcatgacaagatttaagcattacaagtaaatagtaaactcaactttgatccatttagtatcgaaaactaaactcaaacctaacccatttataaatgaattgacctgacccaactcgtttaattatctatttatataaaaaaaaccatacttaattttagttaacatatcaacttattcttcgataatattatcccacatgccacatgaattaaatgtaaaaaattgagtcttatataaaatatggactcaatattaacatatttatgttttctttaactaaaatatataatttattaacatatatttatagtaaatttaacatgtttactatctttttataatactttaaagattaatttagcatgtttatgtcatgtttaactaaaatatataatttatatgtaatgaattttaatagatttaagagtgtatacttttatacaatttatttttgagttaggcgtgttaagcccgcaaactcaggaaatcgaaattgtaaagaaaaatattaatatataaataaaatattaaataataaaaaaatataacaaaataatatttagtgtaatggtagagagtgtaattttaagcaaaaagagattaatcctcaatctctacttttacaattttttaaaaatatttaatatgtaaaactttggagctcatataaagttttaaatttttttacatttacaccaaaatacgagaactattattttaataataattaatatatttatataagggacttaaaatttaattttgtctttaactccatatattttagggacgactctatcgaaaatgacccgtttaataaatgggtcaattatgtcaacccaaaatgacccgtacccatttaaaataaactcaaactcatttatttcgtgcgggtttcgagttgtattattgtatctaacccgaattgccacctctaaactctaccaaataatttatgtctttttctctctccttattttcttcttcctctttcactaataatattaaagatttgtcctttgtatttgtattgtagctctatgtcatcatgtatagactagtgaataatgcaatagctcatttatataaagctgtgactatcatttatcaagacacagaagaagaaattagtctaaatgcatgatggaattgcaatgcatgttcaccatcattacttgctctatctcacagactcaactcagtgctttgaaaaatataattaaatctctctctctatatatatttatatatatatatggccatatatatatatatatcagagaatagaataatacttcattccattccttgggctttgggcattaatcctgctcaactaattcaacttcaccatgtgattcaattgaaattgttggctccacatgacacagtcattagtatcaaaataaatcaagataatcatgttttgaaaatattagactctagctcatgcctttaattatcatacatagttgagttgaatataagttcttgtggtatgagtatattattaatttgcacaagcactattttttttcttaattaagactgatcatttattttttatttgttaattttcttgcttattgttagagataacaatacaatagaattagaatatagtagataagttacatgttatcgagtgcaggcaaatgctagctgtgtcctcttcaggattattattattaaagctttattaattagttttgactttaaagtattattgtcactggttccagttccagttccagttccagcatcaaagtggaaaaaggtttaatttttcttcttcacatgtctttgttttgtagtgaaaattaatagaaatgcaagtaaatgctagctgtgtgctagatattattttataaaaataataaagtttatacaatcgatatcaattgcggaataatataaacatatcaaatatatatgcaaattacaaaagagatcgaagaaatacttccaatcattgatcttttgagctttaatctcacacgaacttcgaatctacaaaagaaaagaaaatgcgttagtatgagtaattgagcttctaagatctctctactctctttagatggaattgactgtttacacaaaatgagtgaggagctcagcaccctatttatacgtgagatactttattagtatttgtgccacattaattaattcgaaaaatcaaatcgagaaataaattaaattgacctaatattagaatatttatgtttatcaaaaaattgatttagaatcaattataatgaatatttcatattcatacaagtgtaatcaattgatcttcgaaaactaataaaatagagcttaagaaaagaataaaataataaataataaataagtaattttttacgtggttcgagcgttgacaattcttaatccacgagttcgctgtattagccttacaactgtttagttaatacaagtgtttacaatataaaccctagctctacactcctcttgtttctcttgaggaaaaagaagctagtaggaattttagcagaggttcgactagtatcaaaatgttcaccctttgtgcataaaaaatgagagtatttataggcatacatgtggttaagggcataccctttacccacctagggtttcgtactcaacacgctgtaagagctggtactacaacatgacgatctatttgttggttggtaggaaacttctccattgtgtggtgtacgactacagtgagggatttcatgtgaactaggacacgtgtcactaaaaggttttaccttgaaaagttgttgcctagacaagtcattaggaaaaaaggagatttcaaagtcaagtgcgcgcactactatagtttgacacagggtacaagatttgagttggtgtcgaataataagtaatcgtcgcttcgagctccgtgtaggatatcgtcaagtatcctttgggattattgagccacatccgtcccggatcatactgacctactaccttcctagaatacttgtagctcccggaaactctgatcctccctaatcgcagatggaatgtaagagtcctagagtcctttacatctttgctaacacttggggatccctgactagcttccggaatataacagtttccttagtttccttagtgtcattaagcaaaaatgacatacctgattgcagatagtccaaggtggcacccttccgtgattaccacgtagcaggcatttgggaatacagataacaggtaggatacaaaataggaaactccctagaaatttctcagaaacaaacaaaaaaggaaacttcctagaaaatgacaaactgacaaacatagaaaatgacaaattgacgacaaataaacaaaccgacaaatatagaaaacgacaaacctacaaacaaacaattagggaaatttcctacaaacatcatgactatcagaaaatttcttacttatttctatcttacaaaaataagagatatggaatctctttgtactacttatgagcagtctataattaacttgtggtcagcattgtagtcggagtcataattggggtccttctaaagtgggtgccaacctgatggtttatcatcttcatcgcttccagctggtggacatgctcatgcatcataatcagaaaaaacaatctcccattctagtctagtgtactgaaagagataaggatcttgcttgattcttggtccatgtatgggtcttatgaatcttcaaaaatgcttgtcttacggagtaggactcctacagtgtcagtttctttgaatagtgatgaatttttcttcttcgctttaggggcttggacctgattgtgactattttcataaatttaaaatttttctagagcctttgctatgcgtcatgaataatctgaggaaaatatttttcatggggcatcatcttttatttatggccaaattcctagttgaatagtttgattttacttaaaaataaccttttggagatctctatactgtgaactttctctgaaagatgcttcctgggagtcgtatagttcaaaggtgggactgcaaattactttcttattctcgtccaattttgcattaagacttacaaggaagacagtgtagcaatccatcatgttggctacatgtggtcctaagggataaacaaagacgtgtctattgttgcgaacattttcccattcatctcaaaggatttttcttccactcttctagagaagcataccaagataaaatatccatttaaatttggtaggctgacttaattttttcttgtttgagaaaagactatatagcagtgtgaagagtcataatttagacttcgacagcaattgtcaaatacatgttaagtaccaaaaaagatagactatggattttgaagtgaaaaacatagtccagaagggtgaattaaaaaatcacgttgaaaatatggttcaaatttagaaaaattttagttgaaagtacaaacagcctgttgaaaatcatcccaatgtgtttcattctcttttatttgacaaaaattttcttagaccaaagttatgcgatgctgtggctaaatttgttctaatactgaaatacacctaactaaaaatttctaacactttaaatagactttccattctcaaaagaaaacccatttctattcatatcaggaaaaaacaaatctctatggagcataccatctttctacatattgtgtttaaatattgtgtcaaacaggatcggtctatctttaacacacaaaaatcacgttattttcaagtatacttactgtgttgaaaaccgttttaccacagtaagtatgcttgaaaataaccgtgctaatccatttggctttctcttacataatttaaaatttaaattgaggaatttgtccaaataaaagaaaatagacaaatggattgtaaattataatatttattatttctaattcttttaaagaaattataataacaggaaaattaaatttccacgacgatgacaaatcccgttgatactagaattattttgttttattttttggaatcacaactcattaagctgcagactatatcatgctcaacaagattacaggtaaagaatttagcatacaaaattctcattgagaaaacaacaggtttgagaagcaagcattgctttgttacaattattatgtaatcatataataaaattcagatctagacatcccattcacaggctcaccaaaaaattgtgtgtggatttgcttgttgaagtagtctatcaattaacattgtggtaagaatcaatgattgcatctgcaaggtattcgcatttggccaaagataagccagccaaggatatccttccatcctttgtcatgtacacgtgccacttgtcggtcatgttatcgctctgatcaataacgaagcaaacaaaaattattattcatataataatctgtttctgtggtaattgatctgattactacactcaacagaaaaagttggcttgtcaccatgttaagtaatcgcggaatacagttgaagaagagaatcggaattttacctgggctttgttcaaccctgtgaatgaaaacatgccaatctgcttaagtacaaatgaccaatcctttccactcttgtctttcgagctaaggctgtcgtataatttctgtcttacgttctttattcttccagccatcatttccatctctgctttccattcattaaagagagttgggtctccaaccacattagccacaatccttgccccgtgaataggagggttcgagtacataggtcgagcaatccttttcagttgacttttcactctgaataacataaacataaacttgttagcaagttcttgacataatgctccactaaataaccaacaggttggctaaaaaagtatttggttcgactatagaaaggcaatggaaaatatgagaaattcactactgctaacaaaggaacaagcatacaggatgaatctatgacgacatgaatgatttctgatattgtgcgttttaacgttataactttgtactttagcgtttcgtagtttattttacttaatttaaatgtgttttgtagtttgaaaagacatcggaacaaagaaaaggaatggataattgagctaaaaaaatcaagtgcgaagtcagcgctccgtgttatgacaactttcttctgagttgcgacgctggctggtgttagcgtcgacgcaagccaaaattcagaaatggaaaacttgccttatttgtgtatttttcttgcaatttttttttttactaatttgggacatcttgtagatgagaaacagcccctaagcattatagagataacaaaagtgatcaaggattgaagagctaaagattcacagatatttcaagagtttttcttaatctcgtttgttcttccattgtaaacatgatagctttgtttatgatattttgctgggtttatactagtgtgataatgaactaatttccttttgtaggatttgcaattgaaactcgatatgtagattgaattaataatttgatcttaattctgaaactatattaagttgttcaacgtgaaggtttttgacgtcaacgatcgaagcagctttggttgaaagaaaggaacaaaaatagcaggttttttcatgctcaaggaagcatggaaaaataacttatttataaattgaaaaatggggacagagagtgggtggattgagatcctgggttagctagcgaaggagatgatatgttattttcataatttgtttgttgctttaggggcagattggcgagactattgatgttttccaacaacgattatagatgaaaacgttgagatgcttcggccggttatagatgaagaagcgaagaaagcagttatgcatctggataaatcactaggactagatggttttgagtccaaccttttatcaaaatttttggatgatcgtggggaatgatgtggcagctggtgtaggaggataatatgaaggttactaatatagtgccgattccgaaaaagaaacaattttctatggggaatctgagacctatttctttgtgcaatatactgtacaaaattgcttctaaggtactggctaatataatgaagtctattttgttacatcatgtttttcagaaatgcaggttatttttattctgggaaggttgataacaaataatgtgatgttatctattgaagggcttcattacttaaaaagaaagcagaaaggcaaggaaggatacataactcttaagctagatatgagcaaggcttatgactgtctagagtgggattacttgagagtgatgctttaaagatgggatttcatgaacgagattcaactagttcctcagtgtatttccaaggttgagtataaagttgttcatgggggaagagagatagggccgattagtccaataagagggataagacaaagagatcctttctccttacctttttattgtttgggtgaaaggtttttcgtctgtcatcaagacgtatgaggcgagagagtggattcatgggtgtaaggtggctcatgaagctccatcagtgccgcatatgtttttcggggatgataagttatctctattgcaaaactatcaatcaaagaggcttgagggttaaggagcttttacagaaatttgggctggcttcagggtaaaaaatatgagtacttcaatgagttatttttggtgataaattctccatgggatagcgtgcttagtttaaagctcaacatcaattttctcaatcatttactagacaaggttaatggatcgctctgcaataacgggtgctgataccacattcaatattatcatacttctatttacttaagtgataatacttcttactagttactactaattacacataacttgacagatgcgcttactagggagaaggcacacatatagctaggttgtcatatctagattttctgtgggtttttggatgaaattataattgaaggtatactacaaaagaaataacctttagggtagtataaaaatgttgtagtctacctttggttgaaaaagacactggggagatggaacaatcacacatgaagatttaggatcattattatcagagcatgagaaaattaaaataaaagttcaagaacttgccttgctgctgcatctgctgaactgcagacaacattcattgctccaatcctttctgaataaagacccaaatttttactgtaagactgagcgatcaaaacttccatgccacgtgcagcaaacagtctcaccgatgatgcatcagcatcaaggcttccactagcaaatccctttaaagaaaaataaaataataataaatatacagttaaataacgactcaacagaatgttctaaatgttacatccaaaataagaaaatggatactgcatgcattgcattgcaacacaaaatcttaaaagtagtagtgtaaatagagaatgaatctaaagcaaaatttcaaacattggtacctggtatgcaacatcgaaaaatggaataaggttcttttcttgaatgacatcagcaattttctcccactgttcgggtgttggatctatgccagttgggttgtgagcacagccatgaagcaatacaaaagacccttcaggtgctgcctgaagaaaattacacacatatcactaattagaaaagagtgaaacacactcggaaatacataaaaatacaaaggaacacataatcttatagatagcatctgcccaatttgacactacaaaataaaggaaggcattacgtgaactttacctctcctttttcaaaaacaaaagagaaagttatcaggggatgaaaagaaacacatctgcatagcatagatactacaatttacaaaattgaaacacataataaaacacaagtgagaatttacaagattaagccacagtgcactagattgaactacattggtataatagtactatgaaatgttgatcaagcagtccgtaaatgatcatcatgtttacctcaatgtcagcaatcatcccctcaaaatccaaaccaactgtttttggatcgtagtatctgtattcagaccagggtactctagcatcattaaaaatattcttgtgattgcctgcaatgaaaagtttgttagacataaaaatcaattttaaaggttcagatcaaaaacaaattcaagaaatttattttggcattacacaccccaggttggagctgatatcagaactttagccccaggaaaatatctttcaataagagcagcggcgagacggagagaacctgttcctgaaagtccttgaacggttgcaacctgatataaagcagagaaaatatgacaaaaataatcaaggtaccatgaaaagaattaatttttcttgactcaaattcgaaattcaagcttactctttgttctttgattactgggttatctgctccaaacaataattctgccgttgccttattgaatgcggccaaaccttcaattggaaggtactatatacgtaaacaaatcacatttagtaactatcatcaagagggatagaattcaagtcaacaaacatttcgactacttggattttacctctttgttttctcccctctcaagcataagattctccgcctaaaaaacaacaacaaaaagaaaatgtgttttgtgtcaaaattattgtgagaactaaaactatcatcatcagatttgttaaaatggaaaaacaaaatcaaccttcttaacaacttcaagcacgtaaggatgaagctcctcagtcctataggccccaactccaaggttaagcttcaaatcattggtgtctgctttgaatgcttctgaaactccaaggattggatcagcaggggccatgggaactccctcaaaccgagatgtgttgacagcaacaaccatagatacacggccagaagactacccaaaaccaattcaaatgatttaattgaaagatctcaaaactctatttcgataattaagcatatatagttgtattagatatatacatgtatatgtatatgtacctttccatttgaaaaaatgttgattttctccttggtgaagctcaaacttgaactgtgtagcttcaaccttccctgtttgaaaagaaaaacacaaaagtttggatcggcaaattgcaattaaaaaaaaatctcaagagtgtttgtattgaatccaatttcataaattatctcagcaaacaaaacaaaaattagaaatcagtaagaaaattaatagaagaagctaaccctaaaagaatcctcagtagagaccgaagctgatggtgaagaagagagtgaagttatagagagcagtgaagaagccattctgaaatcgaaatggataataaatatgagttaatcaaaacagtttgtttgtgacattaattataaattgattaaaatttagatgaagagaaagaaaaccttttctttagatcaaatcagataaaaattaagctccttgtgttgtggtagcttagcagagtgagattgaggacgatgactacgatgtaataatgtaagtgaagagcatgtgaatgtgttttcgattcacggattgtaccaaaaatcgacatttgtccaacatttactggctaatggtgtttgtggacttctagcccactagattatatgatgggcttgaatattgggcccaattaaaagataaagcctttctaataggtaaacttacaaaaatactggaatttgggataagttttacaaaaataccgtcacacggaaatattttcaaaaataccgtgtttttataaaagaccagtagaacacaaaacagaacaactaaaaataatagtagaacaactacaaaacaacagtagaacaccagtgaaaacttaacacattatactgcagtatgaaacttataaaaaaatacagtaaaaaatactgtctggtagtatttttgtaaaaaaataacannnnnnnntataccatgtaaatttcccttctaataaggtttttttacaaaaatactgaattttgtacaaaattttattgctacatgaaattttttacaaaaatactattttttataaaacaaccgtaatttactacacagaataattaaaagcaacggtagaacaactagaaaaataatagtggaacaacacatgaaacttaacacaatacacagtatttttgaaaaaattatgatccacagtaaaaaaaagtaagaaatttcagtatatggtgtaaaaatcccttttctaatattaaagggaaaacttacacaaatacctaaattgggccaaactttacaaaaatattaggacacataaaatttaatatttatactgtcctaatttattttttaacttttatattgtgtgtaagtcaaacaataccaaagctccttaaactcaccaaccacgatgaacaaccaccaatcaatcatggaacagtaagaaaacaactataatttaagactccaatcctaaaataataacataaaaccaactaaaataactttaaaataataataaaactacaaaaacaaaataaaccaaaaaaattacaataaataaatactatacctcaataactattttggcaatgaagacttccatatcttcatgagaggaaacctttctctcagaaagttttcccttaccctatatacatttaagaacaattcataacaacaacaaaaataaccgtaaaaaacataaaaatcaagtatataatactaaataccgaataggacatacaaaataacaaaacatataaaatttaaaaaatcagtgaacatgcacaagcaaaaaccctaaaacaataataaaacaagagaaccctaaactgcataacaagattgaaaacaaaacacaacaaataacataaacaacaacaagatgattaaaaaaaccccacccctcccgaaaaaaaacagataaatacctttgttactttctctatctcgaaatattcatcttcaagctcaacatcagagtttgaatcttcaatgatagttttagaacatttttgattcttcttttccgcagaatcaactactaactatcttttagaagttatgggagatgtaagggtagggggatcatctttgaaatttttcttcttacacttttcttacccattgctgaactcttcacatttgtttcagaagttttttagatttttttacaattggagaagaagaacatgaacgagtaacagccatggatagaatgaaacaaatatataaagggaaacaatgaccaacgaaggaaggtaaaaagggagggaatatgattttagaaaaaaaaaaattgaactgaaatggaattcagttcaccaagttatcaaacgtgcgtaaccacccataattgaaaaaacgtggataaaattttcaaacaagtgaagaaaaaaactaaaaaagaaggttaagaagaagaagaagaagaagaggaaatgagtttgaaaaaggtgtattcagtttttaaaaaaaaattggctcaatgtgactttgacgtgacaaatgttacttaaacagtaaaaataaggtttcaaaaacaaatacaatataaacgaaaatattacacagtataaaagttgaaattccgtattttaatattcccagttttattatttaattaaatgcggaata

SEQ ID NO: 16296 - DNA, 5808 bp, Cannabis sativa
ttggagctgatctttactaaacagtacatacacatccaaaagtaagggcatcattcagatgattgttcactgcgttagttccttttcgtatttatttcaattttattatttatttttaaacttcacttcccaaattctgttcctttaaagttgaatttgatgttttgaattcacaatttcatatcagtattacaaatacaaaggaaaattatgatgttaacagatccaaataacaacacggagtttaattgaaattatcttgttttaaagaatactgcaaaatgtaaaaaacaaaataaaagataaaaacacacttgtttttaaaatatgaatagccctcattagataaatactagtgtgattaaatctataaataataataataataataataatctccaaagatgcacaaaatatttcctcattaaattacttaaaacaagaggcattcactctacaaatcttacggcattctaagagtttcaacatctagcttttcattaataacttaactctctaacaatcttatcattctattcattttcttttggcataccctttactccagcaaagaaaaaaaataaagtgatgaacaaaaatgagccaatcaggcaaagactttattgctccatatgtgtgaacttttcactgtgatacccacttcagcatatcaaaatacaaacttttcctcctcggctccaacagcaagaagtctatcacccatctctccaagggcggctgccgttgagtcacttataccgagaagatactgcaaacgggagagcttttcaggtgcttgttcaccattcaggtatatggaataaagatcggcaagctcctctggcacctcccacgaaaggggttccgaaggtactgccttgtcacaagccagcaaatcattgagagatgaaacctgcaatagcaaaaaaaagaaagaaaataacagcttcaaacatcaactcttatccatttaaatctactggaaaattcacatgtaaaagtataagccctgtaacaatcaaaagaagaataaatgaaagttgtatgcgttatgaagtcataccactccttgacgatttctctgtctcagtaatgaaacagcctggatcaatgaatttgataacctgctttgggcaagctcttgaacaacaccccttgccttctcagcattaatgttaagatcaagtgggattttctgatatacttcttcttcatcgaactctcctgttcctgatgagaaaatctcatctacagtctttttgaaaaggttctctctcaagctctcagatatcatgttgtccaaatcaacactcgcttccttaagttctctaatctgcttaatgttcagccttccctgaccgatggctgtctcaatagcagctgccattttcgtagttgttatgttcttaattatcttttgtgcgtattgagaaggcaaaccaacttgtttctccaacgcagtaagctgttccactctggcctttgtcaattgtccatcagctaaaatcacctctgcttgttgcctgaaagcttgctcagccaagcttctatgtacttccactatttctttagcatccaaacccaaaataccaccaagctgatttaagaaaacatattctgaatcatccttctttgtagtgatctgagcaccaaatggaattctagtcacttccccagttagacagaaaagcaagtacgtcttgtataggtcagtcctatctctttctggcagatcatccctaagagttatctcagtctgcccaggcttccccatctttgcagcaagatccttgttaggctttattttccggagagtttggagagactcccattcctcatcttcttcgacgtatttctcctcttcctttgttgtaggctcttccgagggaatatcagtatcagacgattcccctttgatgtcttttaccaactctgtcacaaccaacgtgttaaaggcaatgagctttttaagttcttttgctgattcagtacgatttccagcagcccgagctcgttttacatagttgataaaaatctttcgaacctacataaatcgtaaaggtgattagaaaaagagagaagacacattggatgtatttaaagagaaatgatagcagtacttaccgccttactggcaattgacatggcagactctctactcaatctcaaaccatgtgctgcctttctaacagcttgctttaaatctgcatcataaccgtccactccagctgcaattgcttccttcacaacctggaattgtttttcatataaatattagacggcgctagtttcagaactgaactattaagtcagtaatatgaatacaaatatgatacaaatataatttttgctcccttaagttttccccaagctgaccacaaataaaactgtcatataataaaaaaaaaagaaagcttccagaagcaacataatatgaaaaaaattgttaagaataaggcattccatgtaaaccagttcatgaaagcaaaaaacagatagagaagttaattttattgttaccttctcaaacaaagtgccacaaatatctgagtgggctgcttcaactgtctgctgaggtacacaaagcatgacacgaagcctcagcaaggcagcaacatctgcctcgcttagctctccatcagccacacattgctgaagcttttgccgataaatttctttaaaggaaaaaagaaagtcagacgctaataatggaaaagcataaagtgaaatatacctaattttggtattaagcaacacagatagaatatttgaactttaatgtttaccgataatctatatgagaaacaattagcaaaattaccttcatgaatctcactggccttttgtgggtcaaagtggagctcatcacagagtttttgaaggaaggctgctttgctatctgctgcttctaattcacccccagtaacagactgtgaaagacgtttgcgataggcttttgaagtaacatcaagcacaacaacttctgcttctcgttttcctaagccaaatatattccttaattgattcagagaggacagctacataaaccaaaataaaattattagagcaaacaagaacatggtaataaagcattaaattaatttagaaaagaaaaaaaaaagagagaaacatgtctaacaaaagggaatatttgactcttcaaatgcagcagttgacaaacataaagacgcagtatgatattatatgtgggaacttccctataaatgtagcaatttctcaatgttgaaaactaaatcctcacttctattgaccttttaactaatagcaagtactaacatctcaacacaagttttcacataaattaaactagtcttgcaaattagcccgcatttgcttaatccaccataagcaaatcagcaaaaactaatatatatattcttgacgaccataaggtgcattaaggaaaagaaataacaaattactagtgcataatattatcagctaactatagattttactaaactattcacagcctgtgttagaaatcacaggcaaggaccaaaggttaactgagaatccagtaattattcctgtcatcccagaaaaaaggtcatagacaccccaagcattatggaaaataaaaatgaattaaaagataaataatcattgatcatacccaaaaaaaaactgtaaatttcatttaaataaatatctaggcttcaaagaaaatcactgtttggtaccttatgttcttccaagcgaccaccagataatgcatctgttgcataggctctaaaaagaagctttaactcatccatctttttatcaccgtactcgccatctacataccatcaaagcacaaattcaccaaaaacataagcattcttcactttaaacattacaccactacaaatatgcaagtagttaatttgaataccacgtcttcgtatatgcaataactttgtagggatccttacctaataaaaatactggaccaaccccaggagcaaagcgagttgaatctggatggctctttaaggaaataagtaaattattgaaagcaagtactttatcaagctcctccacaacctgtgtaactccctgactggaaatccaaaatttataagataatgcaaatgatacatgccaaaatacaaaaactctaagaaatatcatattataaggcttttagcaaatcattgatcatgtttgatgacacaaacattaatgtaaaagcaattatgtgtgaagtagagagtatacgtggctcttgttctagacttcagtaaagtaagagcagaagagatgtgtttctcaatcagtttcgttgtatgctccctgaacaagtccccagcatgctgcatgaagcagaaacatcaaaataaacacctattgaccagctgcagaaagactatcaattgtatactgaaaaggtacctcatcagaaagcttatacaagagttgtgcttccctgaggctaaatagctgctctacactgatatctgagaaaatcatagtaaatattataacttaaggaaaagtaaaagaaaacttcaaatttaagcatgtgggtgtggtataaaccaactaatcacacgggtctttaacaaactgtgggattactacttattttttgttttaaaatacttttggaagatactgataaagctcactaccaatcactccaataacttaaggctaagaatgtaaaaaacaattgatcaaatcattacttcaaccaaataaatccaaaatataaagaaacaatgcactgacaatcatagctcatttaaaattataattgacattaaaccaaaaatccgtaaaaaaccaatatatatacatagaaatatataaatacaaagccatcttctattagccaaatttgactaaatttagacaaatttaacattcaaatacttttttttaacattcaaatcattttatttacgttttcctatctttgtattaaaataaatattatatatagtgaaggactaccataaccaaaatgccaagttcccactgatttttaaacatttttgtagatgtagacagttgacacaattatgtcatgtaattttgacatgaatcaacgagtcagtataattttccagaaggaataataacaagggaagtatcaaaacatttcctgaatataaaaaattaattaaaaaatcatcagtgtaattttttttaatacagctgaagtgcaaaatgcattacaatattacctgtgccgattgatttcagtttagtggcatatagccgctgagcattatcacgaatagcaatctcaacctgagagaaaaagatataaatacagtttacatgggcaaatggaaaatgaaaatatatactaccaaaaagatataagaatacatacattgtgtacatgtaaggttttgataaatccaaatgaacaaaaccaatttcttggacaaaagaacttgacaaaaatgttacatttactaacacgtcagggaaaagcaattgaaggtacctgggaatcagtgactttaaatactcgtttccaaggtaaaaggaaagatgatgcatctccaaaaacaagagtcgaaacataaatcagcttctgaaatgcctgcactggagaatcactaataatgctcaagctctgtatcttcatccagtattatctaatatcccatagaataacccataaaactcaataagtgaaacagctgaaagacctacccgacgttcttctaagtctccatcccgatcaccagtctcaagcctttgcctaaaaagtcttcgaccaatctggaaaccaacaaggactaacccagtttcagggatgagaaatttaaagcaattgaaagaaac

SEQ ID NO: 16297 - DNA, 6253 bp, Cannabis sativa
tttttttttttttggttaaaacaagcaacatttaatttttgatattaaaaatattaaattttaaaataaaataaataaataaatataatgcatttaaactctccacgtgtccatatttatgagtttacgaaaatagtagtttcatgcgtaaaagaattgtaacattaagtatttttgctttaaaaaataaagataagatatttaagtgtataaaatctaaaaattaagtatttatgtcgtaatttatctttttttttttatctttaattgtctcattttttttatactatcatatatctacaaattttgaaataacaacatttatttagatagtgctataatttctcctatcttattattattcttataggtatattacacacaaagcattataatcaacaatagtagtacttaaacttgcaagagaaataatgcttgctatcaaaaaccaaaggtctatgtacaaaagaagacttcatttgaatattgtaagaagcataacttttctaaacaaggaatggttttgagctaaacattttgacatgctcgtgtagacaatatgtaagagtatcagtgatgttgaccaaaaaaaaaacattgaaaagaaaattcctcttcaagaaaggaataaaattcaagagcaccaattccaacagtagaataaggaaggaacgcgaccagttcttcgaatgtactctgcttgttgttctgtttttgcagcctgctggcttctcttagcttctgctgctgctcgtttttcttcggccttatgccttgcagatgcaagcttgttcataagcttatcgtgagctcgccctcgcattttttcaacttctacctgaaaaccattgttgtaagtaaggtgaataccattaaaaggatgttagtcacatatttacctaaaagaaatatacataaacaaacagaaaatcttctagcatgtaaagaaaaaaggattaaaaattaactaaagaaaaaattagtcaagcagaatccttgaatataatgttgttcttatgaaatattatgagggtgagttagctattccaaaggatgataggtttttagttctccctactccctgaactcagtaaattacacatgttgaaacatgaacaaatgggtaatgatgcagattaagcatgtcggtcctctgctgaccgctcctacccctgttactaagacacaaacacacacgaacatatacatatacatttacatatgtacagtacctcaattttcctcaactcagcttctgtttttgctttctggtgattttcccatgcttgaattttcatctcttctcgtttgaacctgagaaatgcagtcaagatcagttcacactatctacaaatatgataagcatcagcgattatggacatcaactgattcctaacattaagttactgaaaatcgacttggttttatatgatcaacttgaaagcaagttgtaacatattcacacattccggtaaatgatcacaaacaaaattgtttaagatcagaaattagattgacttggccatgtgcaacattttgccaaagtacactttcaaagatcagattagataatagttgattctgctgccatgtgaaatttccaaataaactattttattgatattcatagcttgcagcatggataaccaagatatcttggtataaacttagaacatcgcatttatgaaaactgacaaattccaatggaaatgaattcacctggccatgtacttggctttctctgcttcctcccatgccgttgcacgggtctctataacattttgagcttgttgttctgctgctatgttttttaatgaagaggatgcatctttatcctcatcttctttgctagcccaggcagcaatgtttgctttaccaagctgtgtaccaagagcaataatttctctcctagttcttatttgcagctctttctcagacaatccattggtaggatccagattgacaatcggtggatcagttgaagatgactccagcgctgttctgcccggagtagaaggaagtgaagaaattgggctgcgacttggtgttgtagccctcacgggagttccagtccgagaaggttcttgactagcaataggtgtcatttctgtgcccatatctctcattgatactgatctagctgttgaagggggtggaataaatgtcagtgcactctggatggctacagatgagctatgacggctgagattgactgcacataacaacagcacatgtaagtgaagattgcaataatttagatcaaaattattattttgtagcccaactgtgaataattgtgcatgaaagttgaatttgatgagagaattacatggcattttgttagttatgtagggtactacaattagttatttcaattttcccctagtatatattatgtagtagtgttaaagatgaaaaaaccccatgatgaattttaagaatacaagccaaacaattaatagagaaagaaaataaaggtacaaacaagatcttggagaataaaactaaattaacaatgacgtttaacagccttttgtcagtgaaaattagctcgtgacagagagagagaggttcaaacaaattaatttgaactctccaagatatcgctctctttctcaatccaaatactccatatgaaaaaagaaaagagtcaccacccttcaggatctaatgaatcaagtctgattttatttggacaaaactagcacattaatgagaaacgagtatcatcaaccttgaaaatccccttatcaatgaatcaaatgttcctgaaacctttataaaaccaaccctagttcattgattaacaataagtaatactctcgtttcccttctctaagatcaaataaccatcctccatgaaaggttattctctctcagaagatagaaattgcttaaatattaacaagtaccttacctaaaactcaacatatccttaatgcaaggatatagaccatatgactataatcaaatattaattattcctaccaacataccatgatttttctcaacaaacataattatcaagtattcttcttcaccaaattgatatgtcaacttattcactactgatttaaaatgaaaacaaacatcaggatgtagaatgggaaaagctttcatagaaaaactgatcatctaacttaagaagagtgaagtactaccaaaacaacagcatgaactgaaataattcagtaaaagtcttacttgctgattctccaactgagttttcgatcatgagcacaggcttgctatacgaatctgcagtaggatatgagtcagcctcccaaggtagaagcttttgaccccaactttccatcttagtttgatttgtatccatctgtttcgtatcaggttcttcggaagctaccactctttgatctggaacttcaacaacagtctttgtagactgttgccggctcccatagctaagaccacccaccttacgtgatccagctccctggccagcctgccctcccttaggccggttagaggtaggacttgctatccatttctgggcatcgtcccatttcgaaggagctggcttggagaaaggagcaaggggaactctttgttgggtcctctcacccttctgaaactcaaagattgatgaggaaatgctcattccatcctgcccacaatcataatctaaaggtggatcttgttgatttctagctcttgaatttactaatgtactattatccttcaatctacgatcactaaccatatccaagcctaacgaatcagatgtcactgaggttgagaagtcaggaagaacactcacaacatctacatctttgcaggtatcagaactattgccacctacaaaacaaaacaaaacaaaaacaattaaatacaaataaaaatgctttctttctagcattactttcaataaaaaaccaaagttagttagtttggtcatttgggtttgtaaaacacaatcacaactacttactgattatatcaaacacatgatacaacttctgtttggttgcagagaaagcttaggaaaatgaagaaaacaaatctaagatatcatgtgtttgaatgagaaaagaggcatacccaatgttggttgcttatcttgctttttaaagagaatgaataaatgatatgatacacgatgtattgtaaaacaaaaacattcaaaatcagtgaatcactttactttattggtggtgggtacaatttcaaaaaagtgagtacaaacccaaattaccaaacaaataaaggggtcatagtgaaaatacacaaaaaaaaaatacccaaaataaagaaaaaggttttaccagattcatcaacatcaaaaggttgagatctcaatgtgaaggctgattcaatgaggtcttcttctttcttcctctgtttctctactcccataagcatgttcctcaactttccaggcgaaaatccaccacctcctcctcctccaccaccaccctaacccaattcaactcagtcaacacacaagcataaaaacaaaacacagtatatattatcaatgaagtagtagtagtagtacaaaatgtaggttgaaaatggcagagatttcgatcaaaacggtggtgggagtagcagagatttcagctttcaagaaaggaaaattacaaaaataaaaaattgaaaatgacactttgttctttttacattaatgagcattggaagaagagaaaaaaagcaaaaaatcaaaaataaagaagaaaagaaagatacctgaggcttttggatcctttcatattccatggttaaaaatggaagtgagattttgttgttgttaatagtttgaagagaaatctgaagttgggaccaacattataagcataaccatatccataataatgagtgagactgtaagagagattcttcttctgatcataatataagctccaaagctaaataagaagaagaagaagaagaagaaagaaagaaagagccttttattttgtttttggtttgattttgcagtcaaaattagtggtgtggtaatgtaatgggttaaatattaaatcaaaattattaataataataaatgaaaaagtgatggagaaagaagagtacggcttcaacttctctctttctcttttttttttcttttcatttttttgtttactataatgtagtgtgtagtagtagtagtacactagttgagtaggttggtaagaatactagtacaagtactagagtgtcccccacatctttaattactattttaactcacttttacttctttggttcaaaaaaaagaaaacctccttacttacacaaaaattatgctatttgaaatttagtgaatgtttggttttagggaatgaaaggttgcaatggtatggattatggaatgaagggtttgcattccatttccaattccatactaagattatggatatggaatgagtttaaccttgttagtgaaatattgaattgaaagtaaaatgacacttatactttttgatctatttaaattaaaaaaaaaaaaaaaacctattaattaattaatatgtgaatatttttgtgatcatacaatttattatatttcattccaatattcattacattaatattaaatcacacatcataatactattctcattactacttatattatatttttttttactattcttatatcattccaattacattgcaatgaagcaaacactagggtaattatataatagactcttttgacaaaaaatcagttcaggtcttatttgtacaattttagaaaatataagattcattttgtcatttaacaacatagaagatctaattaataattttcgcaaaacagaagatccaaaatagtatttactctttaaactacttcacttaggtggatgagagatggttagttgagatgattaaagcatggtgttgagttctttcgctatattgttaaggattaacgcctcaattccatgtggtcgaagtcatgaagacaaattgtcttacaaatgtgtgatgttattaacaaaaatatgatcaataatttcacttttaaacaatattgctattagatattttaaggtgttcaatactatattaatacggtgtattattataagtaagggtggcaaaataagttttgacacaacacacgaacactacacaaattttacgagttagagtcaaaaaaaattagacgcggatcaacacaactggactcgaaataaaaaacgaatcaaacacgacatgatttgcttaacacaaatttgacacgatttttttaaacaaaataaaataaaaattattaata

SEQ ID NO: 16298 - DNA, 5751 bp, Cannabis sativa
aaaattataattagattgaatatttaaagttacattctaatttgattgaatcgattattagatgtcattatcaaaatacaattaaaaaccgatccaatcaaattacatttatataattatatgtattaaaaaattatttatatttatttatatataataaaaaaaaaatacataattttataaattttttttgtgttaaaattgtaatatttggttgttttgtatatttgcttctatgatattttgttcaattttattatttagtaatgttgttgttgtgtaattattttaaaattttttagagttgtattacacttgtaacaatgatatttttatggaatatttaacttacataatggtgatatttaatttttatatgtatttttatttatatttttaagaatattaaaaattacatgtgtaattggatatctaattaaaaaatcgatgattgaattgaattttaaagtctaattggattagataggatgacgattttctaaatccaattactaattggattggactagatgaggagaaaaagttcgattagatcggatgctcaaccctagtactaacactaaagaggacttctatcctttaaaatcccatattaaaatttcacattctctactctagtatacacatttacattaatcagcttccctgtatattctctaaaatttctcctttgttcgttgcagcgaacctctaacctttgttgtaactccaactctaaggttttagaattccataaattttcaaaactctaaaagaaatatcattttggtgagtcttttcatcctccaaacatctcttgaacatataaatatcaaaattttccttcgtaatattccatctaattctcaaactctaaaaattcataaaacaaactaaagcactaaaaatactaagaaataacacaatctaaaaacgagataattaataatttatagtccaaagtactcttatcaattatttaaaacttatttaccataagacaaatgctaaaaagtaccaatggtgtctagtacccttcttagtgtcatatatcactattattgtaattaaagtaataacttttagagaatatcgttaaccaattataagataccgcctctaagttgtgttaagcatcattagtgtccaataataataatcttattataatatattttattcatttaaataaataaaataatactaatatcgcacacatatattataaaatattttaaaaaattaatataatatttatagcttaataaatagtgtctctttacatgtagctaaacactatttatgaactaatttttttagttataatagcttatttaatataacaacattttatattatttttttacctcaaatcttaacatgatgtttaaacgccaaatcaactctgattcactttgaattgtcctcaagcgttgtcgatcgaacacccccaatgattagttttgaactttagagcctactaatccatatgctcagtatgtttctagttctctagattcgactaagtaccattctgatattttagcagcagttgctaggcaacaccgcccacaactatgaattttattagttggaatgcgcagagcttgaggaacctgagtgcattcagacatttacgcttacttatttccgagcaagctccctatttgttgtttcttatgtaatttaaattaaatgcaggtagtatagtttcgccaaaggttacacgttcctcatgcattagaagttctaagataaggccaaggtggtggtctcatggtattttaaaagtctcatatcacagtttcactaaataattattctaccaatcatatttattgcttcattgagagtgaagacggtccttctttacactttactagtttctatggtcatccttgtgttactctaagatctcatacttcgacagttttgagtagatgttttgatgtggctccattgtcaccttggctttttctaggtgattttaatgaaatagttttgaatgaggataagatcggtggtccaacacgaagtgtagtacaaattgaagcttttagatcaacttcggctggttgtcatcttaaccaactgtcttttaaaggtgagcgagctacttggagtaacaaaagccaaggattggggaatattaaagaaagacttaattatggttttgtcaatgattgctaggattctaccttcctcacaccatcagttcaccatctcgatttctataagtcagaccataaagctattaaagtcttattactaaagttggagatcagcatgatgaacgtgactataaatcacgattttgctttgaaaaaatctagttgaaggagaaaacatgtgctaacattatcatcaagaattggtaccaagatactcctaattgcatttcccaaatgactagtaatatctctaattgagctaccctactccaatcatggcaccagtccaaatttggacatctgaaaaagtaaattaaagaaactcatgaacatgttgcagcccttcaaaactcaccaaagactgaccaagactattttgctgctcttcaaaactttgaatctattcttgatgaattattggaacgtgagaaagactattggcatcaacgatcaagaatttcatggctgcaattgggtgattcaaacactaagatttaccactagcgtgcgagtgctagacagagcaataatcagattaggaagttgaacgactctaatggaaacacccaaataggcacttcgaccttgttgaatattatcactgcctattttcaagaaatattcaatagctaaggtgtcgatcaaacctctattgatgctattttggaaacaatcccaaccactatagatgttgattctaaaaaaataatctcagctccttacactgcagcaaaggtttctaatgctctaaaaaccatgagtagtgataaacgtctcagtttggttggcatgtctgtcatgttttacacaaattactagcacattgttggccccctagtcactgaattggtcttggatgttctcaataatggtgcagatccagccatattcaataaaaccttgatcaccctcatccttaaagttaagaaaccaacccatatcactcaatttagtcctataagtttatgtaacgttctctacaaactggtgtcaaagaccatagtactacgactacaaccctttttttttaccaaaagtcatttccaaatattagagtgcttttttgtctcagagactcataactatcaatgtccttgtggcttttgaactactacactctctccaaagtaggaaacgaggttccaaaggctatgttgcactcaaattagatatgagcaaggcatttgatagagtagagtggcattttgtggctcaagtaatgttgaagatgggcttcataataactgtggaacaactcattcttcgatgtttgcagtcggtttcatacttatttttattaaatggagttgttcatggtgatatggttcctagtcgaggtataagacaaggtgaccctcttttgctatatctctttcttatttgtgttgagggcctctcttgtctcttacaacatgaagaaagtattggatctttgcaaggtttgaaagtctctagatctgctccatcagtttcgcatctcttctttgcagatgacagcatactattttgtcgagctagccaacaatcaacgatgtctattaaaagatctcttgacttgtacagcaaagcatcgggataattgatcaatccccataaatgtgttctatctttctcaaataatacaagacaacaagatcaaatcttctttcaaaatctttttggtatgccaatttagccatgtcatgaacagtacatgggactcccctcctttgctaggcatgataaaatgaaactctttagtggcatcacagataagatttggaagctacttagtgcttggaaggaacatctatttttagttggtggtaaagaggttcttttgaaaatggtggtacaagctattcatacctacgcaatgagctgcttcaaattacctgtcactttatgtcgccaaatagaaagcatgatggcaagattctagtggagttcttcgacatcaaggaattcaatccattaggaaaactggaattttctttgcaaagccaaaatttaaagtggtttgggcttttagaattttatacattttaatcaagtgctattggtaaagcaagtttggtgtctattggaatctatttattccctcataagcagaattcttcaacatagatacttctttaatggtcattttcttgctactgagttgggtacttctccatctttgacatggaggagtattgtttaggggaaaagttgttgttaaaagggttgagatggagggtaggaacaagcagtaaatcaattgtaaatcaaacccttggatcctaggacatacttgcctcacaccttacttattcaaaggctcaaactcaaatttgatggtggctgacttaatcaatgagcatagacaatggaatatggtggctttacaatcaaatttcagccaagcaaacactgatcacacactaagcatttccctaagcctttttccttcagatgatgcaatgatttggaacaattctttcacaagaatctacacaatgaaatcaggttaccactttgttgttaatctagctaaacaagaggatactaacagtagctcctcgattgaatattggtgaacaactttttggaagttaaatcttcccttaaagatttgaatttttttgtggaaagcttttcacatggcgctttcagtcgctactgaacttcatcgatgaaatatagcatcatctcctcgctgctctctctgcaattcacatgatgaaacaataaagcatgccttatttttctatcaaagagcataagatgtatgttgtctctcaaatttaccaattgactttacctcaattggtcgaagcaaatgcccagatttcttgctacagctttcaggcactccttccacttcgcaatttgaatttttttattgttctttgttggtgcatctggcatgaaagaaacgctaaattccatggaagtgctgtaaaaacagctactacaatacttcaatttgcacaatcatatctccttgaattccaaacagcccgtgcaaaaattcaaagatcttatccacaacaaacagctactgtcatggaaccgaatacttctactaggttctcttcgaagcctagatggttggctccaccttcaggacgactcaaactaaattcagatgcagccattgacaattctaaaggtattgttggtattgatgcagttttaaggaactcagctggtgctattgctgcagctttttccaagcctcttcggggcagatttaaatatgaataaatagaagctttaggcctggcttttagtctacaatggctcctatcaatcaatttgtcaactgattttattgaaacgattcactcatggtggtttaaggattacaatcttcccatttatttaattctacttttcataatatttttgttgacagagattttcggcaaccaattaaataatagaatgagaagagctgtagaaagtttaatgcaggagatttttacgtggttggggaattaatgagccttagtccacgagtctttggtatttatgagagtgtctattaaagagaatgttcttggtgaatatctctcttttttactctcttcgattccttaattaaatcgatcgaccc

SEQ ID NO: 16299 - DNA, 2537 bp, Cannabis sativa
  modified_base (2492)..(2512): a, c, t, g, unknown or other
ctggtaaaatatatccaacatattgtacttatccattaattcccagaacagtaaccatatccccctctgcttcttgcaaagcttcatagccattccgagttgctgcctcctactgggtttttgcaactatttttgtccccttctttttaggcgttacccaactttcagcatttttactcccctgaggtttcgctacctgtttggaatggccgatcccttcctctgtactcagctggttcacattatcgattgggattgcctcttcttctgatgtttcagtatttccttgtgctagaacactctcaacattcatctctttttcttcatctttccttttatccccttgttgctttttccttcacataaatggcttatcgttgttgcaatttgagacattgtgaccaagcatattacaagctgcacacttcgttggcaaccactcatattcaacatgttgctcaacaagctgttttttctcattaacaaaagtaatggacctcgggggttcatctttgatctctacatctaccaacactctagcaaatttcaccatggttctttcaagcactaccttatcagccattatgggattcccaattgtgcttacaagcgcactcaagttcttcttcccccaatactgaaggcctaaaccattcaaccttatccaaacgggcaccgattttatcatttgtgcagtgtccatgtcctcggaccatggtctaagaacaaccggttttttatcgaattgaataacccctgtttctaggataatgtccctggttacttcatccttgaaactcaccaaagtaagcccagaatgcattctaacaatcctctccacacccaaatttccccaaatcctcttaataaagccctcaaagactctaaatggagggttggctcctaggacaatacagactatcgaggatctccagtacgaagcttctacttcggcatcttctaaatcaattttagcaaccacttaaagttcagttgggatgaaggggttctcacctgattcaccttaaacttgctccacgccaacttcgccgactcctggtaatcattagcctccacctcatctgcccacttcgtcatagtgggtgtcgacttcacattctctggttctaattctttccactcaggttcgagttcttcacacgggtccaggaacaccttcgtttgtgctgtagcatcatcatcttggattaaaggtagctccggactcactctcgagatagcttcagacttcgatctaggcttcgtaaccccttttctccttttcgccatggaaggagaacgagagcaatatacgcctattatttatttaaactataccttgttatattaatatttaacaaaatgtatttgtgcagtttacaaccaaaaactttaacgatgtgggacgaactaattgagaccgttggaaaaacaatatgtgaaattcttccacaaaatcctattataataggaacacgtctaaaagttgtttcacacaatggttcgatttctttcaactaattacttattattattaaaagtcatcttataatatattttttttttaataattcaataggtatatctttatcatccaagcaacaaagttcatttatcatcaaccttacgaacattccacaaataaatgagcttcgtcaatggtaaactaatttatacttatcttttataaattatttcttattacacctatccataaataattcttacatatctaattattttgtcctataagttaataggagcattaacaataaagaatacctatctgccattatcaatgagaagagactcttccaaacccaaactgctctaagaactcttcaatataataatatcattactattaatgatattcaaaatcttccacaagaggtatgtaaaaatatgtttatttaagttttaattaactgattagtttcttttctcaatgtttataattattttttgttctacataatattatatacttaatttcaataaccatatcatgcttcattagcaaactactttttggatcaatgcatcaatctccatcaaaaatttaagacaacccttctggtacatggcttgcacaaaataccgtcaaaaagcagatcttgacaatgaaacatcatgttttaaatgctacggatacaacaaatcatttgttgagaaaattccaaggtttatatgaacttaatttaacacaaatcttattatcataatttgctacttaaataaattattttgcatctgaatatattagatgtcgctttcacgctcaactaacagaccacgcaggctcactaatagtgacattcttcggcgaaaatgcagaaaagtttttaaattatgccgcagaagagcttattcacatgccaaatgtaaattctactacttaaactcgttcacttcattaacatacattaataatactatcttcctcaatgatgcttttaataacaggatcaaaatattgttgggttttatgnnnnnnnnnnnnnnnnnnnnnatataatcagatttatttattaata

SEQ ID NO: 16300 - DNA, 10968 bp, Cannabis sativa
aaattgaataaaaaattatttcgggtactaaaacaaataaaagtacatcaatgtatccattttaagggagtccattatagaattttcctaaaatatattccctaaatttcttacagttacttacaaaccccacacacaaggctctcacgtgcaaaatgaactccttcacacgtgtgaatagggagccatatataaaccccttagatttctggttcgtcttctcacttcgaactctcgcctgagaaaaaacgaaaatcgagcattcaatcttcgcctcaatccccactcggcaatgacggtggagactctcccccaaccaaacggcgtcgtttccaatggcggcggaggccttgattcaaactccaccatctcaaatgctcccaagaagtctcgggagagcgagcgccgtcgtcggaggcgaaagcagaagaaaaacaaagctgctcgtgctaccgatgttgataccgctaccggagacgatagcgatgatgatgctaaggaaaatcaaaatccgcagcaggttttgatatttctcattttcgttagctttgtggttgtgactcggtgttttgattacagttcggagttgatttagggttttttttttctttaagttgtttttttggtgtttaggagtgtgtttttgatgtttaggttggagctggaaactgtgtttgttttgatgcattttggtacacttggatcggtgaaattagggtttttgaggtttgggattatggtgattggtagaatgagaaaattataggaaagtgaatagtgcttttgaagcttttgggtttggattggctagattgttgttttcctagtcattcaagaggacaagattggtgtttcatggatttgtgggaactatggtgtgtgatttatttcaatgtttacttgtgatatcttttggaacttttaagtctaataagcttttagtgtgtgtttgaatttggcattggtttttgttatgctagagatgtttgattgtgtgtttgtggttttcaattgatttttgaatgtgttgttaactcggtttaggcggatttggttagtatgtttactcatacactttttctgttatcattttcagattctggagcaagttgagattgagtatgttcctgagaaagcagagttagaagagggtatggatgaggagtttagaaaaatatttgaaaaattcagtttccaggattctgctggtgctgaggtataaactaatgtattgtttgtttatttatttaattttgttcatttgaagaatattgctgaagtatctctttctctctctatttatttttctaaggaggataagaaagatgaggctgctgagaaagcaactgcaaataagaatagtgactcagactcggaagaggacgaaaatgacaaccaacaaaaggagaaaggtgtgtcaaataagaaaaagaaggtacagtaactgacttgtatgataattacagtcatgataatggttttgtgtgccggtacttttttttcaagctaatgtagttctttgaacttgtttcagcttcaacggaggatgaagattgcggaactcaaacagatatgtgctaggcctgatgttgttgaggtatacttatattttctgttgaaacatccatacctgttttagactttccttctagtttctgctttctttctaatcatgttcttgtgttcattattttcaggtgtgggatgcgacggctgcagatcccaagttgctggtctttttgaagtcctatcgaaatactgtacccgtgccaagacattggtgccaaaaacggaaatttctgcaggttagaacttagcatttccttacccaacactaacagtttgagatatatgcatgcatgggagatgggcacagggtttagatttaggtgaaagataacgtcgaataaggtttctcttatatgtatatatgtgattcttgcagggattcggctgttacaaacttggagcctggagttctaggtgtttggctaacggcactcttgaattatgatttgtttgtaattacatgtcctatagtgggttggtgattaggaatcataactacaccaatgatggggcaactttagtggataaatacctttgcattatagattttgggaaatattctctttcaagatgctaatttatctgctttgaattttcagatgcctttccattctgcctagtcatccgctgaattcctctatatttttatgtcgttatgactaacgtaattgtgatgcaaaatcattcttatgtatataattgagaacactttatctcatcagctgatattatattttgcagggcaagcgtggtatcgagaaacaaccttttcagctacctgatttcattgctgccactggaattgagaaaattagacaggtaatttcactatattgtttttgaagtgaaatgttacggatgtgcctgtgtaaactgcctccaccccacattaaattgttccaagtagggttaaaaaaatctggaatgtcaatgacaccctctatgaggcactgttcttagtcttgtactctgtaaaatgtatggaagcaatgtaacctttcacttgtctgtttagtggaattattagtatttgaagaattaaattcttgtcttcctattttttaatgtactctatgcaattttaaagccactaatagcctgctgcattgtttatgattgtctatataggcttacatagaaaaagaggatagtaagaagttgaagcaaaagcaacgagaacgtatgcagccaaagatgggcaaaatggatatcgactatcaggtttcgactatttgtatatgtatatatatttcttttatgtgtattattttgacctgtacttttgattcttgtctattgtttaacaataggactgccaattctgtttgttaggttctccacgatgcattttttaaataccagactaagccaaagctgacaagtctcggtgatttgtaccacgaaggcaaggagtttgaggtattatgctagactgatatatatttttcatgttcatttgcatcttttcttttggaaaacatccgggttcaaaggaatgcatgtaagatttgcatcgtttgtattttcttatacgatttgatggtacctttccagagatataggtgaaactgtgatttctggatgcacgtgttttgttttcctgttcgcttttccgagtgctcccaaaatctaatttggaatacagttttttaaacatatttatgctctcttgtttcacatacaggtaaaattgagagagatgaagccaggtatgctatcacatgaattaaaagaagctcttggtatgccagatggtgcacctcccccatggctaatcaatatgcaggtgagatggcgaaatttctttcatggtatttttaaatgcagtttaccaatgctatggcttattttcatgttgtgtgaactctgtttgtttgtttgttcgttttcaacagagatatggtcctccaccatcgtatccacacctaaagattcccgggctaaatgctcctattcctgctggagcgagctttggttatcatcctggaggctggggtaagcctcctgttgatgaagtaagtttttcagtgcttgacattttctttcagtacttcattgtttctcttactgccgataactatttttaacaactagcttccgattcttcttttattctaaatctccaagttctgtgttttctggtttagtccggccacccactatatggagatgtttttggtgttctgcaaaccgaacagcctaattatgaggtaactttcttcaagtctttctgcttgaggttatgtatgacccacactttgctatctgctcttttaatcgtattatttactgaaaagattttacgcttttactttctaggaagagcctgtggataagacaaaacactggggtgatctggaggaggaagaggaagaagaagaagaggaggaggaagaggaagaagaagaggaagaagaccaagttggggaagatgaattaggggatggcacacaatctgtggaaagcttctcgaggtatttaaatttaaactttcttttgatttgtatggttattctggtataaactaaaatctttttgaaaaatgtatcgaacatgcttttttcgtaatattagaaagtgagctattatggccgtctttgcttatgcatatttgctatttgaactgcagtacgcctactggtgttgagacacctgatgtcattgaccttcgtaagcagcagaggaaagaaccggacagacccctatatcaagtgagttgatgactgtgactttaggaaaatcatattcatatatttttgtatccttatctataatttatagcagcagattctaaatatgaattcatgtttcttgtgtattcaaggtactcgaagaaaaagaggagagaattgctccagggacactgctcggaacaacccacacgtatgtaaacagctgtcttgttcatatttcatttgttagaagtttttattatctatttattcttctcgaccgcttttgataatgcttttctgcttgcagatatgttgtcgggaccggtacacaagacaaatcttcagctgctgctgctgctaaaagggtaagcataaactctaccattttaatcgtctctattagagaactatcaagttgattctgttgatatttcttgcacaggttgatctgcttagaggccagaaaacagataaagtggatgtcactctacaacccgaagaattggaagcattggaaaatgttttgcctgccaagtgagtttcattttttatttttctacaattaaaacacccttttaagtaaattaattatgattattcacctggctttttttttttgtttcctcgcagatacgaggaagcaagagaagaggagaagctccgaagtcagcgggaagatttcagtgacatggttgcagaggtattgattctcaaatttccactcttttaagtaaatattgattctgtttttcttaaaaaatcttttgtgatatattttgatacagaacgagaagaaaaggaagcgaaaaatgcaggaaaaggaagggaaatcgaagaagaaggatttcaagttctagagtcggaatcttttctcatcatcattttccatacggccaaccatccctgttctccaagctccaagagcccaatgttttgagggtgagttttctttatttgtgttttaatcgaaaaatgagacgtgttgggttggtaatagaagttgaatgtagtttggtcaaatatgatgatatattagtattgagtattgtctctgtaggaattgaagtttggttaaaatgatattaatacaagtatattactatattaatgtaaccttttaatatatagtcccatcccaactcatctcaactctaggtaatttcatttcatatgtaaactttactgcctgtgctcttactttctctcttgtagactcgagttaagggcgggcagtgcacccgtggtgcctaacaccatcacgattatgaggtggcatataattactgggacaatttattattaggttgtgcaattttttaattagtaactattaaaaaaaaaaaaactatttgttgagcattcacatcagatcttttaaaataaatattatctaaaatatttgaaaaattaaatgctaagtaacattagatactctttattttattttatttttaagtgtttttaaaatttacaatattcgtgctttgtatttatggaatactttttattattgtttttaaatatattttattaattggctggggtttaatttttttttatatgaggatgtgtaaataatatattgtatattttaaatgaataaaataaaattcggaaaacatttacattataaatcatcatacaaactgacaaaatgtatagtttttaatgttttactaaatggtatcaaaaataccattgatttatatatttttatatatatatatatgttttgttgatttactattgggtacctaaaaactatttactattgggtacctaaaaactaagttatgaaaaaacttgaaacaaaatgcgtaggttaaaaatcatcaactattaatgagtatctactcatacgtattaattgtaagaatgagtaatttaaggaaattgaataacataatgtaataatatctgatgataatagtttgtttgatttggttagattgttttatagacaacttgcattataagtatatatatgtatatggtttccttataattataattgtatctagtaataattctaaatgatattacattaattataattcaaatttgttgtcgaattttacctcaattcaagaacaacacactaaggtggcgtttggttggagataatgaaatagaaaagaaataatttttattccattcctttgtttgattgtattttaaagtattggaatgaatagaatgttctttataccattttagtagaatgactattccatttttctaaaaataagaagaccattctaatgtaatacgagaaaaaattttaatgatttttttttatgcattttaaattttattctatttctattcctattcttatatttttattcttcccaatcaaacaccaccacctaagaattcaagaaacaagataaaaaaattgaactagattaatcaacaaagcttattcaattaactctcaatgagaatagggcaagaattgaataacaaactagagacacaatcacgaactgagcttatatacattgctagaaaaacagaaaagaaactaaaagaatgtatttaccccaaaccagagaaaaggacttatttttacatgtaacagaattaactgtcacttagttacaaaaggtaattggtaactagtaactaaacataaaaatattaaagtttttctttctttttttttttttttttggaaaaaccaaataatgtaattgaattaataacaacttacccaaatactattatacacaacaaaacacaaggtataaacaagatcaatttgttatattatttatttttcttaactttttgtggtacatatataagtgattgttttggtcaattttggtttttctaaaagtatggtgtttgtgtccaaatttaaccaaaagaaaagacaaatggtatataggtaggcaagccatgttaaaagctatagctagatgagctgaaaactataggagtgaaaaagatatactcaaagattctaaagtggcatcatcaacttcaagtgtatgtctactcattattctttctttggactctttacaacttcaccattaagaaacttttttatttttatttttttgagacaaagaattatttcttgaattgatatgctaagataattatgtttatcgagtcccacacttatattttgatttaataaatataatataaaaaattgttatttactcacaacgcgctatattaatttactgttagacacattaatattctatcatatactataaacttactttgatgtaatttgacttccattcgattaatctaactattgatctacggttttaaaatttataaaaaaatttactcccaatatttttatttatatgaatatatttatatttaattatttatatgtattatggtctcattcatggtttcatttctttacttattatattggaaagtcatctttgaacaacattaaccaaattggcctttttggtgaaattattgccatttaagcatttgaaggaatcgattctctttaaaatggcaataattttttttattttctagtccaatcatacacttttactactcgatattaattgtagtaaaaaaaaaaaaaataatctaagctctttaaaatatctcatgaatgaaatttgccacattcatattaaaatataggggatagtagggtaagtgtttttgtccctatgtgaggacaaatttaggtgcattgattatatgtttaacttatatcactttaatatttaatattttcttcttttataaattatatatatattttttttaatttttcatattttttctattctccattatgtaatgtattagggagcttctatacattgccggccctgacttttagtggaccatagaaaaaaaaattattttgggcccttatttagaaaaaaaatatggtatttttcaaaatcagtaaaaaaaaatagtataattttaaaaggtaaatattttttttttgggcccctgggataggtgggccctaggcacaggcctagcccgcctatgcccaggaccgggccaatagcctaattttttctatattcgtatatgttataaaaatatagaatttttttacttttacactttaaaatagtatttttttttctacatttttactgaatttcacacaaatgcccctataacaactaattgagcaatctaactcgtaactaaaattcgtatagctatccacataaaaactactagagcaattcattttgtaaatttaacaaaaaaaattaaaaaaaaatagtatataaggtaattctcttaaaaatatattataaaattttgaaaaatttaaaataatttataatgtagaaagaattattcaaatagtcttcgcacacgtttaaaataaatgaaggacatatacaatatgttgtttgaaccttattttagatgtgttgaatttttttaaaatttttaaaaacttaaataaatacaatatatacgatcgtgaaaaaaaattaaacaaaatattcttttgaatatcaaaacaaataaaaagtacatcaatgcaccgcttttagagaatgtatcatataattacaatgatatttaatgacccctaataggagtcatcgtccaatacacataattaggtaccaattaatactgttataatttaatattaattctcacgttttaatttaataaataatataaaaaattacgaaccactctcaccatatatagtattagttagatattttagggctcgtttagtagacctatgagggtcgtattgtattaaataataaataaaatcatgttcagataaaacaatgtattgtattaattattatgactataaattttaatataatataagttgtatatttaatatataacaaattatatgtattagcttctattataatatttataaaggctttgaggtttaactccaatctccaacctaaaacccaaaagccaacctgatttggacctaactcggactcggacccagatcgaactccatacccagataggatcgagacccgagatctggacccaagctggacctaacccaaggtaggtgttggagtcgagtttattgaaaatatattataatttattaatacaagtcaataccaaatatattattgtattaaataatattaatacgtacaatttaacacaatataggataccaaacaaacccttaaaccttaaattaccttataataatattagcttatgtaattaacaaattttaataaaaatgaataacataacaattttttttactaaagatttcattcgttcaacctaaacattagcacaagggatagattaattatttgtgattgtagtactaacttataaataataaaaacacattatatatatatgcatggacatgatatgacatgacatgatatgatatgtgatatgatatatatatataaatatatatttatatatataatggatgaaggcatacaattggttggaaatgtcctcttcttcttaattcttttcttgtatatgaatttaccaacaattcatgggaccccattttcccattctccactttcttatgtctatcaatctcaaccaaagaatatactaattttaatttctacataatttacaaatatacatatatatatatatatatggatgatacaagacaagtgtcactttttcattggttgtacggtcagatcaatatatatattttttaatatcaatttcatacgtgaaattgatcatttgattcatgtcagtaataatatgattgagttgttgatcatctctactacatttttaatagctagtttcatagatttataggtcttcgataaaatttaaaaaaagaaatgaagagactctatagtcaaatcttgtctatcaagtaataataatggtaatgaaatttcatgaaatttcactattaaatttaatggaacattcattactactttgcatgtattttttcactataaaatttcattatttctcatttttattttctagtttttttaagtgtaaagtgataatcatgaattttcattattattatcattattgtaataattctgtcaaattacaaaaatgattataaatatccctttttagtttaatttttctttggaaataatttgattatggacgatatgttaactctaatatagtgcaaataaattttctcacatatgtaaatattatttgtcattaaattattatttatgcatatatattttattttgcttagattcttgaactacaacgaattagcatcaaatttatattaaaaaaattacaaaaatttaactaacaagtaaatttataaaaattttgagcagtaactaacaagtaaatatttataggtaggtgatagtttgaaaaaagaaatattaatttatatctgtggtacgtgattaattatattgtttaattttaaattttttgatttattttaaatattaacaattttaagaaattttgataatttacactaattattaaattataataaaaataaacactaaaaacttatttgtcatttgttgaaagataattaatttggagatcattgtcttattttgtgggcaatgaaacaaaaatatatttgtacttaaatatatctgagaagttcttagggttcatttagtcatctcaacttcagttacagaattctcccttgtatttgaaccgtaagtggttcatcactttctttgtggtctttttatatatatttatatatata

SEQ ID NO: 16301 - DNA, 3323 bp, Cannabis sativa
attagaacctttaaggaaattcaagaaaagctatcccaaggtctccaaacactctaaacaatactcataccagttttatgtttatcagatcctctgtatcgtcgatgtattccttaagctgaattgccaataaaaaaaaaaattgacacttgtcagaatacatacactttaccataagtgtgacaagttttcatggtctcttattccaatctcaacatagagcaaccaccttcagaatagctctagtaaatgctctctttctccatatcatattctgttgtgtgctgttactaatgtaacagcattttctttcagttaatgggttgagatgtatgctacagagtagagcactaaaagtgtcttactcaattttaagataaatgaacagaaagaagaatatcacttaccgtagacaacttgctgagagtgtggtcgatgacgacaaagtacgcctcgagcaacatttcaagttgtacaatgttttctccactgttggatgaactaatgaagcttccatgtctgcttgaacttgtcaattggctaaaagccctttgcaatttatgaactccaccgattgaccccactggtgaaacaggagcagattttgacaatgttttggcctcatagaacgtacctgattgaaaaccaaggtcactcacaggataaccctcagacctttgtttcttctcagtcaggtacatctcagccatgtcttcgtcatcatccatgagatgttctatttcatcgtggacctggattaaactgaaagctcataaaaggagataaaagaacacaatataagagactttgagaccccattttaatattctctcaaatttaccttctgaactcgctgagtcagggcaagcagttggcctttaagtctgcgaacacgttctaggttatgagtgcttatagatgatgccaattcatctagcacagggtatatctccatttccagttctattgcctacgatgtccatatacttctttaagaaaggatttgtggcatgatgtttcatacaatgatattgcacttaattattcttgataaaattgaataaaaatagtgataattgcaagtgacccgatgcatataatccatagtaatgtaactaacatataaactgatgaataaaatccatacctgagcatctagagacatgcaagttagttccaatgccaactccaacgctctaaattcaaaaggttgatcatctaaaacaaaattgaatttttcgctagcaattagcatacattcaataagaacacaatgtataagcaaattattaagtagttttccccaatgctcagttcagaactgtttgcaacaaaatatgtactaaaaactaagagaaaagtaatttccttacccgagtgttgtttgtttgactgaaggcgcttcgacaattccgacttgtattgaataacggatccatctaatgaattcataagaataacctcatcagctgtaattatacatctgatttgttccagactgatgacaatagccttttcgcgtcctaatattgtggaagggtaaatgaacaagggatccaaaagcctaaggtctctggcaggcaaagaacagtgtctcattatgaaagccttgtcaagctccaaaatctctgtgtctccattaacatcaatctttatccaagaacgacttccatggcctctcttcttcaggtcctgaattctaggaccaccacgaattccatgcccatctagttgaaatcttccagtgttattcgaagaggtagattcagaaagattaaatggagaataaggaggtcgagattctcccattgaaatctgttgtctggagttcgggtacaaaatgatacagtgacactatgacacaacaaagaaacagttgaattgtacagattaaatcatacagcgacccaactccatttcagccacaaccattgtccatgaaagatgtttaatcactttcatgaatagtcactatctgacactaatcaagaatcctctttccccatattcaaacttaatttgaataggtgaaattcaatcaactgatcacttcaaaaagccttacttttcacactcttcagtgaaagcgataaatttcaaataatggagcaatcccagaagcttcataagctacacagaaagaaaaaaataaataaagaacattcctatttttaataatctcaatgacagatagataccccagaagaaaaaaaggatctttaatatttctaaattagaaaaatggttgcagtagcagaaaaattaacaaacggaatcacaaaaattaaagaaatcagatacattcaacaattgaatctcataattccatccatgcaccagtctttttcttttttaataacgaccaaacatggaaaaagaagctcggcccacaaaatgcccaccttaattggagcataaaatgtaaaaagaaaaaggaaaaacagcaagtagcaacgcccatcagaatcgccggtgaaggaaaatgatgatagtgatacattaaaaaaaaagcaagcagtaagattgaaacggcgaatacaaatggagaaaagagtgggtaatgatatcataccttgtgaaaattaggctcagatttgggagttgagggtgaaaagaaaggctgggctgctggagctggatgaaagagcagcggcacccttgtgaaaatattctaaaagaattaattacacaattactaagccttatcggttctagttgttataaactaactaagccttggtagaatatcttttgtgattaaagaacaacataaaatgaatctctggagtggagtctggtgtaattatcaaattttaaggatgattcatcaagtaacatgtcaaaatttatcactacgtgtcaagcccccgcatcacacggtatctcactgtaaatgtaaaatgtaaatacatgcgtgggtcgagttagattatgaaaagtggtaagttgaaaaacgctatttttattaataaattaattaaatttgtctctaattttatatttaattaaaatatacctctttttatatgtattgtacctaaaatattctgacataagagagtcacatggagagtatttttgagtaacatgggcaaaattagtacaatgtttaaaaaaataggtaaaaatgatagactttaaaaaagaggataaaaataaaataggacaatataaaaaaggtatagagtgtaatttccccttataaaaatacatatggtttattaaaaaaaaaactaaactatatgcattttaaatttttcaaaccgcaactgcaccgtaagattttaaactcgtaaaaatcacactgtgaaaatacatgcgta

SEQ ID NO: 16302 - DNA, 5176 bp, Cannabis sativa
  modified_base (2898)..(2899): a, c, t, g, unknown or other
attgagaattagttcaatcagtaattttgttgttaatgattgtaaggagttacttgtttctttgaaatatgttttagtattttttagttaaacgatgtgctaatgtagtggcccataactttactaaagctactatattattttctgatcgtcgattcggtttggaggatatttcaaccgatttgctaccatatttggtagcggaagttatacattaataaagcggattttctattaaaaaaaaataggatggctttaattattatgagaacatttattgtggatcacttgtgcaaaaaaaaaaagttacaaaataattatgagaagagaagcacatattaataatgtaatccaattatatgactaaaatattttattgtaattttatagtacacaacttaaaaatatcagaaatatatttttcttctcagctatttatgactgttgaataatttaaaagtttaaacacaatcattttagttcttcttcaaggcctaacaatcgattctcattaattaatataaatattttatatttgatatatatatatattgacatcaaagaaaatctcaacaattacaattacaagattatagactataattccaccactatcacacaaccacacaccaaagaaaaaaaaacagcagcataagaatcactgttaatactgtaacaaacctaagatcaatcaagctttcaaattcatggttttttttttttttttttttttgaagcttagacagataataactcttttccttcatcactactaatcccaccatttggttcatctctaaccttttgcctctcttcaacacaaggtccataagcccaactacagaatatgtaataaaacacattgacaaagctcatagcagcaagaacccaatagtaataatcataatgacccttattgatattacttgaaacccaactctctttaccatttcttgatgttaagttatccacagcacttaaaacaacactagccaaaagactagccacggccattcctaatccaaaaagtgaagctgcaatacttgacatgctttttgggatttcagaatagtaaaactctgtttgtccaattccagtaaaagcttcagctaagccattcaaacagtgttgtgggattaaccacattgcagacatagccacaacaccagttggattgttcaaaaacccttgttgaattgaccttctcctcctaacactctccaccactgcagccacaaccatggccatgaatgtcagaattaggccaattcccattcttgttttcacatccaaactcaccggcttgcctcgaattttcgaagctaaaggaaggatcactctgtcatagagaacaacccaaagagccaaagagatcactacaaacatagggtaagaaccagctgggacttgaaaacttgacaagtgtctatccatggaattagcttggagtacttgaaaagtgttttggctagtgttaatggacatcattaaccctgtagaccatattggaatgactttgataagagctttaagctcttcaactttctcaactgtgcaaagattccaaggatttgaagcagacccatctggcccaatgtcttgttcacgatttctaattacacaagctttattcaaacacctacagttgattacaatctatataagatttttcttttcttgacatgacagtgacaactctggaaaaaaagaaaaaaagagaaaaactttgatagtaccttaatttgtctgatggtgaaactaattcagaatccttgttatggtgatacacaccattatgatcactatttgagttcccatttggaagttgaagctttctgttcttgtaagcaaccacaatgacttgagcaagtccagtgaacaagcttttacaagctttttgtttaacataaagagatgaagcaagaaaaaacaaaacagtggcaaataacataagaattgcaggaattccaaaacccaatttccatccaagttgatcttgaatataaacaattgcagtcaaggcaagtataagagaagccgcagttgaagcatagtaccaactaaagaagctctctaataccctcttgttcttgggattgtctctattgtccacttgatcagcaccaaatgcaagagaacaaggtctaattccaccagctccaattgatatcagactaaacgacaaagcaagaaatgtcgtttgcccaccagtaggagctttacaactttgtgtaaatatatcacagcgtgaaggtttcagctttggaatcatggctgttaaccatagaagcaccaacccctgtcatgaacaacaacactagcttaatatttttttattttctttaataaccaaaaagaaaaaggtggtgtaatgtaatgattaaaaaatgcccacttgatcagaaaaccacatgagtgtgaatctcacaagaattttctttttttaatactatttaactactgttaacttttaagcaaatctcattaagaactcagtttaaaaggaagatagggaaaaagttgaaaaggatattaaggttataattagattgaatcttcattaaagaaaaaaagggtatgacctgaaaagatgaaaggaataagagatgggaaattaccagaaaactagccattgagccaaaaccaatagtgagaaaacgacccagataagaatctgagaggaatgccccaagaagaggcatgaaattagtagctgctgaccagaagaagataatgttggtacctttggctactcccaagtgataatctttcatcaaatacaatatcatgtttggcaaaatgccatagcttgccaccctctccaatgcttcatttactgtcaaaaatcacaaaatgtactagaatattaaaataaattaaaaaagaagaagaagaagnngaagaagaagaagaaaagaaatataggataccccaaaacacttctgaactaaactaatcaagagatcgttattatctatgtaaacccacatgggaataataaatatcagaaagtttaacgagttagtttgatataaaaataatgtttttttatatatatatttattgaagtatatgtgtatgtatatgtacctataatgaatggcatggttatgaggcctcccttggatcttttcacaggcaaatcttggttgttattagccatttctcttacatctgaagagggctccttcttcttttccagttccataactatatatatgacttaattaaaaagaaatgaagaagaagattacagagaaaaactaactacagtagcaaagatcgacaataattaatcttgaaagatatgttatctgagtgatgagaaatcacagctgctcttcttctcttgactcatatctctctttgcgtgtgagaaatggtaaaatttataagacagtagtattaatagtactgctactactactacactactctccttggaaccaagctaaactctaaaatgaaagaaatacagaagagaacatatctcagaaattcttaaaaagagattttagataaagaggacaacacgccatgatcttaccaccctttcctgtttctctctatatatctccctagtgtgtataatgtgtgtactgtgtcccacacacaacaaaagtattctatatcacaatatatatatatacacactcgtatatagtacgatagtcgtatgaaaagagaaaaaaaggtgaagagaacatgtttggaaaataaaataaatatatatataatatataatatctgtattaaagagtagtacaataatgataatgaatgaaggaaggaaggatgttagagagagataaaaagtggaagggttcacaataaataggatggtccaccatttcttttgcttgttccagcttcttggccccattcacagatcaaaatcactgcaagaggttgcagttcataaggtccaatgacaagacagatttaagggccaatattatttttttttttacttttagtttttatttttttctataagcactcaaattcagctctgctttgtctacatgcacgtggatttcaacatatttacagtaccatgttactgctgttgtctatactatttatttattttgtcagctattctgatcacaatgccagaccatttcaactttattggtatttgaaatttttccagctattaagttttaggtttttatattaattaattttctcaataccacttctttaaaaacttaattgtgactttactcttaaataagtgaatgtgcattttccattctatttgtatctttctttcttctcaagactttacaagttgtttgttgttgtgtcgtatttttttctccaaagaacaactttggatagagcttggcttttctattgacttttcatacccttcctctttttttttgggctaaaaagattgacttttcatatttaagtttcagatacagaatgttttctctttttttttctctcttataaaatgaggtcccagcaatccttttgtaacattttatcctaaagaacattaataattgaacccatgtcctcttcaattgaaaataaaataattttttttaaaaaaaaactcctgatgagttttcattttacattctaaatgtaaataagactttcatcaatcaaatatactatactactaagactattaattttggtatacttccaaatttttgagtgagacatatgaactctctctaataatataaccaaccaagattattagttcacagtgatattataataggagagtgtactatgatcacagttttatttttaaccaaaaaagaaaaaagaaaagttgaattgtatgattatgttgtatatgacaattcaaattttgaaaacacacttttattcactatatatatatatatatatatatatatagcctcattcatcaaccacttgcttctgcaatcaatcatcttggtggacctttctcacataactggtggagccctataaaaatattgagagaatataacatttatgactactgcatttacccagggctatggttatggctatacttcaaagtaccatgaccctcataatctaggcttttgcgtgttgaatttcatggtagtccccctcatactttttttctcacaaaagaactctatctattactatatcccacaccaaaaaattataatttaaaaaaaaaaaa

SEQ ID NO: 16303 - DNA, 7084 bp, Cannabis sativa
caataaacactcatgcttagccaaatcaaaagccacaaataaaagattgtgaaccattatttatcaaaactatctctaaaaaatttagacaatacaattataaaaatagcaattagcatgcccaacacaataacgtgtcatagttagtttgtaagttaaacatctacaaaataaaataagacaagaaaatataattagcccctaataatgatattactaaaattgataaaagaaaattcttaatacttataaaataaagtaagacaagaaaatataattagcccctaataatgatattaataaaattgataaaagaaaattcttaatacttataagaaaatgattcttcgataaattattttaaaattaaacttatcgtaaaatttttgtaattataagccttcaacaaaaattgatcgacaaacaaaataatacataaaagtaaatgatgtcaaagaaaaataataaaataattcaaattataatataataaaaaattattaaaatatttatatgtccaaattgaaaaatcgttgaagcagaaattataagtacaaaattgaccacttttttcggccatagcttcatgggttatctcgtattaacatgaaccatactacaaaattaccataaataattaagaacaaatcataattacaaacacaaaagcctttaaaatatcaaagctattatcttatggtgcataaaatctcccaatgcaaacaaattctacatatgtctacattaaaatccaaaatatatttaatgtatataaaagacatttatttattattaagagaaagtcttgattatacatcatttcaaacactataattaggggaatattgttatgttcactttatattaaaaaggaatgtatgactttttttttctttttttgaaaggaatgtaatgtgtgacttttatgtaattgtagtttgttggaacttggaagactttgtagtaaacattcatccatcacactcaatcgtgttttcgatattggaataattataattttattttatatataataatgtatattagaatgattttaatacaaaattttaaaaattttaattaatttataatataaaaaaaaagatttggagagtatattcaaatgtgcatacaataaaatatgcactagtgcaacataatgcttgaaatctttttccaccatattaaattttttcaaaatttttaaagatttactagatattttaaataaatacattgtatattattatataaaagaatattaatattaaaattagagcaaatagtattttaaaccatgtattttataaaaattaaagattggactatctgatttgttaaataacaattcatacatgtatttttaaaatggtacaaaatagaccttgaactcaatttttgtcatttttttaaataaccaacctgaaaccaatttctaacacgaacatatgcaaaaaaaatatatacattcttgtcataacacttctaggtcaggttattattaagttttaacaaaaattaagtttaaagtctatttcgtacaattttgaaaaacacagtttgaattattatttaataaaacatagggtccaatcaataatttttgcaaaatatccaaaatattattagaaatttttgtagtaggccccttgaaagtttgttttagtagaatccttatttgtttcggcattcatgagaattttttaatctaatttctttttataattgcatacgctgtagctatttaagaccacttgtaaataatttatattgctaaaaataagatttaaatagttactcataatatatatgtgtgaaaaacagtcgagcgtgcaacaaaaatatgtaaatcttatttttgacactgtaaactactcaaaattttctgaaattttagaggtgatcctaaagaactataacgtatacgatcatgaaaaaaattgaactacaaatctctcttgtatgtcgaaatagataggagatctatcgaaacacccttttaggaggtgcaatatagacttacccaatattatttaggttaattagaatttttactcctaaattttgatgatgtgtaccaaatcatacccctaaacttttctaatcgttaaaaattcccctggaactattgagattgttaaattttaaaatttttgtccaatttcattcaattttactaattctgtgattgtccatgtactaaattatgctctccaaactttaatgtctatcaaattattcgcttaaatttaaattcaacaatctcaattatttaaaaacatttttaacaaccttaaaagtttagtaatgacaaaatttttatttttaataaacctaatattaaaccttaaaacaatctagatgtcaaaaatcatcaaacattgatgcaccatggaacttcccaaaaacataaatcaaaaatcaaaactttacaaaaactaaaaagaaagatgagaccagtcaacttggaatggtgcctaagattctacgtcacatattataacccaaaataaaaaacgcgtttttagccattattacagtcaaaagcataagaagaagaagaacaagaagaaagaacacaacaacataaccccatcatcaacccttttctctacaactccacaaaaagtccaacctttaaccccattgaaccaaaacccaacccaaaaaaagcttaaaaactcaaaacccagatatatttcatcctcttattgcacaaagattcaatcttttttcttcttctacagaaaatgatatcaatccattgaccaatcaaaccaacgaaaaacaaaccaccatggctgataataagttaatgagggtagttacagctagttcaagctcagatgctttgaccaccacactttgtaactcaatccaagctttgggtaggggatttgatgttacttctgatattaggcttctttactgtaaaggggcacctgggtcaaggctattgaagcttgatgaggttgaaaaaagggatcttgttctctctaatggagttgttgtacctaatgttccagctgatattgattgctctcctggtaaaagagcaactgagaaagttcctgtttgcaatttccatgaggtacttctcatttttgatttgtttgggtttttgtttcttcttgattttggttttgttgtattgctaaaaatgaaaactttctatttggggaagattgagaatttgaatctgtttgtttggatagttatttcaaagtgtttatcacttaaatttgatgttgaatattgggtttttaggattggtaattctgtttctttcattcctttttaaggttctatctggtcttatattcccttttcaatggtgcttcttttaggagtattgaagattgattgaacttcttaactccacattgcttttggtagaatggcattaataattagtgtttttcagaacataattattcatgtcctaatgtgaaaaatacactcttgttctttcctttagtaagttattgttagtgaatatgatgtgtttttgataatcttggttgcaatttgatgtgaatatcaaatgctgaaccagtctattcatgaactctatagcttctaagttcaaattgatgtgttcccatgtctttgttggcagtttttattagttaataatcatcattagtgtgaggcaatgatgatattaggaactatattttgaaactcattgattttctacaaagattctttagttattggaaccagcttcgccaacgtttaagaagccggcattagagtttgtaatttcttttctcatggagagacaatgctcactaaatcttctcaaaagatttcgattaccattgttgttttcccttgactgtgaagaagtcctaaaacaatttttaagatatctcacttaccttattccttgaatgcttgaactatcagatggcggagtacttcaataagaaatcagatatctcgggcaacattccccttggaagtttcaattcaatgttcaattttaccggttcttggcaagttgacgctgcaactaccaaatctcttgccatggttggatacataattcctctttctaaagttaaactagaaaagccgaatttagtattgcgtgaggaagttaaacgagccgttccttattcttgggatccagcagcattggcgaggtgagaactttcactttaaaattgttaaaacagggaatcctatgaactcgatatttagtatcagctaaactaataaggtagtataattttaaccgcaacatggataaatagtccaccgaaaaactctgttgtgcgttgctcaaacgagcaatgaggctgtgactctagtaacattctatgcacttctgcctttgagattttgtaaacacctgtaaaatgctaactttatgtgccctatgaaagttgatgaaggaacgacgccttaaaatcacttgttctgcaacaatttggttagaagcagaaactgacagacacattccattgtttttttccctttcattcttcagtttcattgagaatttcggaacacatattgttacttctgcaacaatcggtggaagagatgtagtttacataaggcaacaccagtcatcgcctttgacagcattggatatagagaattatgtgaaagacatgggcgatcatagatttcaggactcgaatagtcagtcaaccgtcggccctttaaaatacaaagacaaggttagtatttgtaacaatttccttaaccgaaaaaaatcaattttcctgttgataatttcatacactgagtgtatattatctgttatttttggccaaagtctcttcctaattcagttttctgcggcaggatgttacagtaatttttagaagacgagggggagatgatctcgagcaaagtcattcgaagtgggcagaaactgtaggatcagcacctgatgtgataaacatgacatttactccaattgtttctttacttgaaggagtacctggaataaagcatttagctcgtgcgatcgagctatatttggagtgtaagaatcaatctaaaacttactttatcaaaccagacatgaagaacatagctttatttcctaatctatcatgttaggtgacgggcagcagctctttatacgagaaaagctttagtttggctcggcttctgcttctgatttagcttctcaggaagctctttttgagaaagttactaaaattagcttttgttaaacaaaccttttagaactgaaagttgaaactcaatagttgctcgaacagtagtaaaagtgttttctgagcttcagaggcccgaaagtagctttttttagaatcccaaccaaacaaggcctaagtaatttggtagtttattagaagatattaaagtgttgtagctcattgactatctatatattagaagttgttgacttttccatttgtatgttaatactaccaagttaccaactttgatttatatccataatatattctttgttcaaagtatgtcctttaagttaaatatttgacattattttcttaaatatttggccagtcaaaccaccgatcgaagatctacagtattttttggattttcaaatcgctcgagtttgggctcccgagcagaataacctgcaaagaaaggagcccgtttgttcgtctcttcagtttagtttgatgggtcccaagctttatatcagccctgatcaggtatatctcttactctttaagacttgtggtaaaagacataatatttttccccatttcatcgaaacagagaatattaattctggaccctggattttataaatattatcgattagacaattcactctgtattttacaaaataatacctgagctaattttttatcaaaataaaacttaataatagctcgactttgaggtactatgaccagattgttatattttttgtatctgttcgtactagaatctagcttcaggttagttataataaaagaaaatgacgaaaattgagtttaaggtattatttcgtaccatttgaaacatatagagtttgatttatcatttaataaaacagagcgtccgattaatttttgtaaaacacaaagtctaaaatagtatttgctcggaaaataatactaaaagaagtgggaaacttataggaagcactgaacatttcaattttaagtgtatatgttagttttatttaagaaaggttgtatgttcttacaggtaacagttggccgaaagccagtgaccgggctaagactagctctagaagggatcaagcagaaccgactcaccgtacatatacagcatttagtgtctcttcccaaaatcctccaacctcactgggatacacacatagccatcggtgcaccaaagtggcaaggtccagaggagcaagatagccgatggttcgaaccaatcaaatggaaaaatttctctcatgtaagcaccgcaccaatagagtttacagagtcttgcataggagacctttctggtgttcacatagtaactggagctcagctcggtgtttgggatttcggtgccaaaaatgttttacacctcaaactcctcttctgcaaagtacccggttgcacaataaggcgatctgtttgggatcacaacccgaccgctccatcttcagtacagaaacccaacggttcttcatcatcatcatcatcacaagtaaacaacaaaaccccggaagataaaaaggaagatagctcaacacaagctggaaaactcgccaaaattgttgactcgacagaaatgtcaaagggtcctcaagatattcccggtcattggttggtaacaggtgctaagctcggtgtagacaaaggaaggatcgttatgcgagtgaagtactctttgctgaactactgaccattttttttccctcttcggattttgtaacttttttaggctttcttagtaggaatttttagttgagcattctttgcacaggcagttgatgatcctgttcttttgtacatgttcattttgtttgtaaaccattttcggttactgtcacaacaatcattatttgtctgagatttttcattcttataatttgttataactagaagttatgttgttgttgagtaataatatatatagttgttttagttgatag

SEQ ID NO: 16304 - DNA, 9002 bp, Cannabis sativa
ttttggcacagatataaatatgaaaatttaaagtcaaagatcagcgaagtagaaaaccaactacgtgaactaaaggctgatagacatgagactgaaagggatgccaagttgtctcaggcagttgaggctctaaaacgtctgtttcaaggtgtccatggtcgtatgactgatctttgtcggccaacacagaaaaagtttaatctcgctgttactgttgctatgggtagattcatggacgcagttgtagttgatgatgaacaaactggaaaggaatgcattaaggtatgtgttttacattcccgatctatttcttgacctagcctgttattcagaactgctgtaatatagcacattcagttattatagaatgggatgaagttataatgcttactagccggaatccctggttctttcttagatatctgagtagatacttcttttgagtaatattggttttttttttggatttgtttgtatgcaatgcatgttttttttatgttattgttttttggtgtgtgtggggaaatacatgatagtattatgatcttacatctactaagtaataagtatgggagtggtttgtagtttgtaaagccatcctctaataggctagtattttgggagtgtattttacctagttggttgaaccaaatagttatgtgcggatacaggattatatcatatgttttgagggttagttagtcctggctgatctaataaatggccagattaaaatgttgattataatgacagtgtgaagcagcttgaaataagttttctgcttcgtggtggggcacttgttgccgatggtaacattttgtaatgaggaatcagtcttcgtgcagttgctgtttgattttattattttgacaaatcaatgtgttgtaagattagcttgtcggatttattcctttctttattataaatttttagttatatgctcataaacataattataaatattatatttatttttgccgcagtacttgaaggagcaaaggcttcctccgcagacatttatcccacttcactctattcgtgtaaagccagtcattgagagactacggaccttgggtggaacagcacggctggtctttgatgtgatccaatatcctttgttgagtaactatagtgtttgatgggagtcttttgaaagcctgctgtaattccatgtgattattgtgctataactgtctggtcttttgatatattgttatggtgcctttggttccttgtatgtttacattaccatgttactttggaagttgatcaacatttatggctttaatcattatcccgtcactttttttaaagttacaaacttctgtagaatcttttccttaaaaaaaagaacttttgcataatctaatatcccaagttcaaaatcttgtcaagtaatgtttggctctttgaagacgattggattttttaaattttaagtctttcaaaatcttatgtgttcgtcctgactttaagaataggtgcgctgttgcattattgttaaccattattctagttgaactactgatatgccaaatgctagatttatggtttagctttgtccgagttattttattcttatgttaatgaagaatttttttatgcttctgcatatgtatcctcattgcagtttgatccttggtgaatgcttctatctctttccttcttttttttttgtaagacttaactatcgcacatttgatcctgcgttggagaaggcaattgtttatgctgttgggaatacacttgtttgtgatggccttgaggaggctaaagttttaagctggacgggtgagaggtacaaaggtatgttgttctctacttattattgtttatacgactgggttcaaaaacgtttgtactttaatcctatcttgtctctgttgaaatagttgtgactgttgatgggatacttctcactaaagctggcacgatgactggtggtaccagtggtggaatggaagcgaggtcaaaacaatgggatgacaaaaagattgagggttggtatcgtttgtgtatgcattgtttttttagctgtatcaatgtatcattaactgttgttgttccacaggactgaagaaaaagaaagaacagtttgagtcagagttggaggagcttgggtcaataagagagatgcaactaaaagagtctgaagcttcagggagaatcagtggacttgaaaagaagatccaatatgcagagattgagaaggtaacttcaatgattattccccaaaaccctccacactcctccactccttaaaagaaaaatactaattatataaatgtagtatattctatccatgagggttaggtgtagtgttaggccatggttggttgtttgcctgaggtctgggactcaactccgttttagaatgaactcagcttcttgtagctgattaagctgtaatagatgatttcgaatcatcttttcccaatatgaacttgtttcttttataaggaaaaaaattcttcatggagagtttcctagcaatgtgaacaatcatatgacctgtgatgtttaacagttcttttaatggtacccagcttttgttatcactactcatactttttgggtttgcttttcttggatctcgataaaaacgcagaagtgaattaattggctattgttaatttatttgcagagaagcattgaggataagcttgctaatttgaagaaggagaaacaaaatattaaagaagaaattgatcgtatcactcctgagcttcttaaggtgacaccatgtgcaagttgccctccagatcaagttttgttgtgttgttccctttaaacaattacattgtttttcattttcattcagactaaagaagctattgataagcgtagtgcagaaattggtaaactggagaggaggatcaatgaaattgttgaccgaatatacagagattttagtaagtctgttggggtggcaaatatccgtgagtatgaagagaaccagcttaaggatgctcaaaataatgccgaggaaaggcttagcttgagtagtcagctctcaaagttgaaatatcagtatgtgcccaccacttaatatttttattttttattttaactgtaggcatattactttatttccttgttaagcagattctctacacacacacatatatatatgctttagagtttagatcaatgaatgctgtatgtcactatgctttcgtcagttattttggttgtatagtaagtttctttgccagaaggggtgagtggtgcactttttaaacaaaaatctacatcattttatattcctgtcatggtgatcggaatcctccatccatatgttcttttttttttctttaaatatacttttatgccaggttggagtatgaacaaaatcgagacatggaatcacgaatcaacgagcttgaatcttctctcagtgcattagaaaatgatttagagcggattcaagaaagagaaactgcagccaagttatctgcggaaaaagatattagtgatatcaaaaacttgaataatgaagtagaaggtgcgtcataatttatctatataaatgctctctattttgcgtattcttttttttgtgtctattggtaaggtaacttaaataacctcttacatacatgaaatcaaggtgtgtcatggtttatggggagttaccatgttgatttcatgtttcatttctatgaactagtttcttttcgcttgtgtttgtcactttaatttgaccgaaccccgaagataacttctgatacattttgaaagtttaccacttcaaatttcttgggaattaactggcaagagctgagttattgcttggaattcctactgaattgctcattcttttacttcgattcatgttttgtggaattttcacttggggctattattatatttccttgctgatctttcaatattactaaagtgagtgaagaatgaaaaaaaaggaaaacatacattcacacaccgatagattttgcatctttatttgtaaattgatgccaatgaacccactctttcacaaatttatcttacagaatggaaatcaaagtctgaagagtgtgagaaggaaatacaggaatggaaaaagaaagcttctgcagctaccacagccatttctaaacataatcgtcagataaattcaaaggttagaatttacgacaatgtgtattttaatcttttccttgctttggatggattttaatcttcaatatgtattctaaggtgtaacttcttttccttgctttcgatggattttaatcttcaatatgtatttttctctggctacaggagaatcagattgagcagcttatagcgaagaagcaggaaattatagagaaatgtgaactagaacatattagccttccagtagtcgaagaccccatggataccgaaacgtcaacgccaggcccagctttcgatttcagtcagttgaatagaacatatgtgcaggataagagggccgctgaacgggaaaagcttgattcagaatttaagcataaaatagattccatggtatcagaaattgagagaacagctccaaatttgaaggccctcgaccaatacgaagctctaaaagagaaagaaagagctgtaaatgaagagtttgaagcagccaggaaagaggaaaaggaaatagcagataaatttaacgctgtcaagttggagaggtagtctatatatataatataaatataaatatggttgtgttgattgttatttgattgatggaaattttcttttgatgaactcaggaatgagaagttcatggctgctttcagacatattgagggtattattgataagatatacaaacagcttacaaaaagcaacacacatccattgggcggaacggcttatttgaacttagacaacgaagatgatccgttcttaagcggcaccaagtatacagttatgccgccaacaaagcgttttcgtgatatggaacaactgtctggtggagagaaaacagttgcagctcttgctttgctcttttccatccacaggttcatctcgcttgtcatcatctttgaccctcatttcgctttcaacttcttataaaactaattgctcttttcacttatttttcgggttttttcttctttcagttttaggccttccccatttttcatactggacgaagtcgatgctgctctcgataacttaaacgttgccaaggttgccggattcatccgttccaagtcatgtgaaggagccagaaccagcgaggatcccgatataggcaacggtttccagagtatcgtgatttctctaaaagatagcttctacgataaggccgaggctttggtcggagtataccgggactccgaaagggggtaagcaagcatctttaacatcatttttttcctttccatgcacatataaaaaggttcaccattgttaaacatttccaattttttttttttcattggcagctgctctagaacgttgacatttgaccttaccaagtatcgggagtaataaggatttgcaattatgtatgacattgaattttatatatttttatgttcttttattttatgtaaaaagttactgtaaatagcatttggaactattcccctaattaggtacactcagataaagataatcagttagaattgttctagtttaggcatgtggaaaaataataatggagctgggtttcttttattttattattattattaccattatgcttcttccaaattaactttatttatgattcatttcatttattttgtttgtaatttggttatttttaactttttgatattttttttggtggcattactctcttagtctcaacttcactagatatttaaagaggaatgaaaatatgcttctcttagtatgactatgatttaaataatcacctcttttgctattgttatgtgctgtgtgttgaaaatctcactccatttggaatgaataaggacaacttacctaagcctctttttagcaaatacagagacaaatctgttatgacaagattgtttcatatgatcacaaaaaagataggtatgccattgccaaccattttaactatatatactccctaaatattttcctctcatctattttattcctcctaacttacaggtcaaaattaaaaccgttatttttcaatagtagggctaaatttagtaccaacttataagaaaatgacctcataacaaactgtgtccttctctcatttcttgtcttcctcttccattgagttcttaactcgctttggttcggctccaacaatggctgccgaagcaccccctggggtggagcgacaaagagtttcggtggtggaggatgatagctcggtagagaatagctctgttgaatcagaagaagaagaagatgatgattttgaattcataaaccaaggagatgatgaggaactaaacacaaaccattgtattgatcaaatgagtaggaagaaaaagaaagcattgttggaatttagatgcagagttgaagattcaatcttgggtaattatctcattgaaaaaccacccaaatctctatctcaagaagagagcattaaacaaagagccattcttaaagaaactactctttggggtattcctctattgcctagtaaatcccatgaaggaactgattttgtgctactaaaattcttaaaggccaaagattttaaagtcaatgaggcatttaatatgctaagaaggacattgaaatggagaattgagtacaaaacaaatcaaatcattgatgaaaaattatgcccttttgttgatattgaaaatggtaataataaggttttttactacaatagtgttgataaacaaggtaggcctttgtgttatcatagttacgaggcttttaaagatgagaagttttgtagagatgtttttgggtctcaagagaaatttaatgatttgttgaggtggagaattcaagttcttgaaaagggcattgaaaagcttagttttaagaatggtggggtgagctctattctccaaattattgacttgaaaaactctcctggaccagccatgaaggagcttgggatgtttactaagaaagctttgcttcttctccaagataactaccctgagctcatacataaaaatgtaaattttataaacacaaaaacactattttttttcgtatcggcaagaaagtttctattttcggtatttgaagaaattataatttatttttttatatcacggtttacattgtagacattactaaacttttgaaaatttttgattaatttatagccttaaaaatagagtttaaatattcagttacattcgtatgatttatttttcttcatatgcgtgccattattattttaaactctgtttttgatatcatgaaatatctactataactacaatttacgtatatgtcaaaataaacagttcctactaataagagtagaaaatgataccttcttcttaatgtacgtgttttatatgtatctaatattatgtaaaaaatattcatatgtgttttttttattatttgttggacagattataattaatgttccattttggtactatgtggtacacattctaagatcaagattcttaactctcaagacaaaacagaagtttgtatttgcaagatcatcagaagttacaaagacccttctcaagtgagcaatttttatttatttatttattaatttttcttcaataatttttaatttacctaaatttaaacttgaaattttttatttcttttatttattactgttgtaataataataggtttatagcagcagagaatattccagttgagtatggtgggcttaaaagagagaacgataaagatttctctcctttagacgaagcagcagtgctaaagattaaaggaaacacaactgtttatgtaaaatttccagtctcagaggtacctaccatatattacatatataaaagaggcaataattgttcttcgaactataatttttatagaattttattattttcccaatatttatgctttacataaattttccattcgattaatctacaaaattacacatttataatagttgtacgtctccaatacctaaaatgcatggtgcaccatctaattgacacaatgtgataattaaaatgatagcaaattcttagtaaattttttaaaaaaattcaacttatgaaattttccaataataatgactacaaaataaataccattataaaaaagatgtgtctaaattaaattgtacttattttttgtgtgccccattataaaacatccttattatatatatttattaaaatcgatagtaattgaatatattttcttcttcttataaaggttggtttaacaatggtgtgggatttcactgtggttggatgggatgtatcatataaggaagagttcattcctgatgatgaaggctcttataagattcttcttcaaaatcaaaatcaccataagaagaggtttgaagatcatcatattcataattacagtgttagaaattctttttatattaatgaacctggaaaaatatgtattactattcataatcctcattacaaaaaaaagactcttctatatagatctaaagccaaccctactattcccatgtacatccttttcaaaaaataatactaatagtcctttctatttttctattcttgcattaattaaatgtattattaactcttttttggacatcatcttaatgaattgtaatttattacacctttgtatgcttatgattatgtatatctatataaaaaaatcacttgacatgaaatctaagaatgtaattttggtgattttacttttattaaaaagatatcccacattggttaaaataaaaattttatttacataaatagtgttacaagatattaggttgcttaacattgaaagacgccatttattctcatttatataataaatgaaatttataaatatgaacatatgagagtgagatataacaataataatatataattttttttgtattagtctataccccttccaaatgaaggacggttacaaaatttcatgatttattgttattgttgtta

SEQ ID NO: 16305 - DNA, 2894 bp, Cannabis sativa
ttttaatataaattaaaatttagcgtaatattatataaaaatatgatatatataattcaatttaatataatacaatacaatatacgactttgcaaacgagcccttaataaataataataataccttacaataaaaataaaaaattaacttgtaaattaaaaataaagatagattaatattacctggaaggaaggatacgttcaaacgcgtttctccccaagaaaatctgttgaatacaaataattatttaagggattcgtaatctttttatttaaagataaatattgacttaaaaagaaaaattcttttatcagatcatgatcattttttcgtcaagaacatgatctaacatcttacaaaatgcatattaaatgggtaagatatttgttattaacatgttgtttgagaaattttattcaaaatatagcataaaagtaacaacctataacaatataagcttagattttaaaaatttacaaaatctattattgatttagaaaataaacaaatgattattattaattagttacttacattgcacctcctgcagctggaccaatagctttaaaaagagacattgcagtcatagcaatgccattagcagcacctctttgatcttgatcctgttgtgttgttgcattttatacaacttaattaattaaccactcatattaataatataatttttacttaaaataagactaatcatgctttaaaaaataaaaaataaataaataaaagaaagagaaaaggaaaagaaaaaataccactgctctgttttgcagaatgaacaagccagttacaatggagatctggtcacacaaattaaaataatttgttagtccaagcaaagcaagtaatataaaaacagaaaaccaaaattcaataccttaatttcatttttgctcctttttcaaatcaaattaaaaaaatttgctataaataattacaagatgtatatattatatagagcattgttagttagcgatattcttttaaatttatttttttaagttatatgaaatccgttatttaattatataaataataacagtatgacacaagaaaagtactaggcaccaacaatattttttagcaattttttattaaagcattatataatattaacttacacttaagacattctttacgagtgatgcaatgtttatcaagatccaaacggccaaccctgatgatatcatagctatgaaggggtgacatgccaatacaggtattgatatgaactgtttataaagggcagaaaatacagtcattaatacagtattacaaatattataattaaggaaagagtaattgtcttttctaaagaatattacataatacatacccctccaatgcgtgacaccattattggaccaaatattttttccacatgtgggtagaacaacgtttggaagatcaaaagaccaaggcctagaatcaaaacgtagttaattacttagtttgtacatgtcaaattaaagtatttcaaacttaaaatatgatcagatttgcacctgagaaagaaagaatttcaccaacattctcagttgagtaacttaagcccccaaattttttgggactcacagcccataatgagaaaatcttaataacaaaaaaagaaaaagcttaattgtcactcacaagtagatatatatggtttatttatttaacatgtaataaatatgttgtacagtataatattacctctgagtatgccatatcatgaagtgcgaaaactgaataagcaataatagatgacattaatggccaattttttaaaaggcttttcttagactgagtagtttggttctctttattttggggttcatgatgatgatcagtatcagaagtgaaagattgtgctcctgtttctaacccttcaatcaggttactgctcgatgatctgttatttccactgtgatgattgtgtaatgtttcctgttataataatatttattttgtaaattataaattattattgtcaaaaataatttgcaaatatatatataaaaaaaaaaagataattaagaatatatataaaaaaaatatacttacgggaagccaaaaacaaggaatggcaactccaagtgcgaaagttgatataacaatgcaaggtaagaaatatggaaacctgcataaaatttaagtccatggattataatcaagaaaatatatattattacttatattataaatagatgtaaataacatcattcattactcattctcgttagtattgaaactaaataaatcaaataaataaacaaatagagtacctcccaagaaatgaatcttgtgaaaatatatttggatatttctctgctggctgaatcgcgaataaaatatatatattaaaaactaataatttgtgtgttcaacattagaagaaaaaaaaaactaatttatgtactcaatatattagaaataatcagatatatagagttggttctttattataacctcaaaataaaatgaaatgaacaattgattattaagattttttttagtggcacctgagctaaaaagcctcccatagccggtcctatgatcaatcctatgccccatgccgtactcacctgagatcaagtattattataattgatccaaattaattaaaattaaaaaaaacctgttaatttaataaaatatttaccattcattagttatgtatatgtaacattcatttcaaagatcatatatatatatatatatattagtatacttgtataatctcaccgttgacagtcctatagcatggtgttcttcccggaataattcagttgcataagcctgccagttactaaaattaggtaaaatgttaactataattaattaaagagtatttttattgggcaccatgttagacttttatttgggcttacattaaattt

SEQ ID NO: 16306 - DNA, 2643 bp, Cannabis sativa
aaaaaaaaagtttgattcagtggcataaagtttgcaaattaacagactacaaaattggtaccataattgagattcaatttaatagtgaaaaaactctttcagccttgcaaaatgtttcggttggatcagtaattattgtaatttttgaatgaagcctcaaaagctatgtgtgagattgtgtgtactagaacatgaatatttattgataaacaaagtaataaaaggtaagttatttttattttttatgttttacttaattaggttagtttcacacaaatcttaaatgtgtataaatttttattttattttcatataatttcttttgtcaaaaaattgagtgagttgtaattttctatttcacctaaaatattcttatattattatttttttctatttttttatattgtaaaatatcttaaatatcttttttttttcttaaatctctaatcctcaattatattaattaggttaaattaattatatgaggacaattacgttaatttatttatttaattttaagtaattaatcattgagattatggttaaaattaattgattaataattgattaaaatttttaaacttagatttcatttataacaacttgaatcaaaaatacaaaaaaaaaatacaataatacaaatattttataaaaaaaaataacaataacaaaaaaagccttatcataataaaccttaaaaagaatattttataattattttaaaaatatatttttttaattaattatctaaaaatattaaaaaaaaatagaaaaaaagaaattgtataagaaaatctagaaacaactgccgaaaagcgcaagttatttactagttaatacttggtgatttttttatcatctaataaattaactttcccggaatatatatagccaacacctagctaggtatagattatggtaaacaggaattattaattttggcatatgtagtatacatacatatatattagaagatagagacaagccatatatatgggtagaataaatatttatctttattacaagacagattaattctttcctatatttgtagtcttttgatgctagaagattcgtcttataggaaagcatatgttacacaaaataaaaaagtttggttatctggattggcattattcctcttagctggattggcgttatgtaaccgtaatatgaaaggtattggtgttgaacactattattgtacaaatataaatataaatataataatattatatatatattatactctatcctttaattagtgaattctaatgttatttacttttcttcttttactaatgttttatcaattttataatatttaaataacgtaggcttcattaatagtgccagaacctcagcctgctgctatatatataaacttggttcttgtccttgtctcctataaaacttcctcctcgtaaagatcacaactttatattagctatggcggtttctggttcattcattgtaccaaatcattcattcctttcacaacttaaatctccacagccatattacagttccaacaaacaggtatctatttttcgtatcacacaattagtagtattgcttaaacattcatttgtctttgtgggtatatgtttgaatttttgtttttgtaagaacaaaacattagactaacaatggtgataataaatgatgattgaacacagttgagtttaagggtgagaggatctctttgtagctcagatgatggggaaggaaaattcatcagcaaagaaaaagatgaatggaaaatcaagtattccagtgaaaaaccaatcactccattgcttgatacagtcaattacccagttcacatgaagaatttatccacacaggttcatcatcatcatcatcaaaaaaggattacatatgtttctgttgatcatttctttttgtgaaaaatgataattaagcttccgtgggaatgatttttcaggatcttgaacagctagcagcagagcttagagcagatgtagtccatacagtatcaaaaacaggtggtcatctgagtgcaagcttgggagttgtggagctcactgtagcactgcatcatgttttcaatacccctgatgataaaatcatatgggatgttggacatcaggtcaccacaacattaatgtctttatattaaaataattacaacccaattgagttattctgaaaaagaaatgaatttttgcagacatacccgcataagattcttacaggaaggaggtctcaaatgcataccattagaaagacttctggtctagcagggtttcccaaaagagatgagagtgtttacgatgctttcggtgcaggtcacagttctacaagcatatcagcaggccttggtatcttcatatttaactctaattattattattattattattagattaatttgtcgcataaatatttaagtttaaatgccagttgcaaataaatacttaaagttcaatttttgactaataatacttaaattattatttgagaacttttgtaggtatctatttgttaagtattaagtaaattttcacatgtcaatttttaattggtgcaagtcatcaaatttttacctttttttaaaaaaataatttaaatatactaataataaaatgacacgtggattaagtaatattaccgctaaaa

SEQ ID NO: 16307 - DNA, 6027 bp, Cannabis sativa
acacctagtaatactagagtaaatggaaaatatattaaatgtaaatttacaactaattgctagcttgatttcctacacttgtgtatattggaaagattacaatttttctttttttgtgaatgagtaagcagccattgtcttagactggccacttcccgttatttattgagaggcctcacttgtggcggtggaaaaccgtggtctcaatattttagcgacaaattacactaaaacacaccatatccaacaaaaaactaagaatatgtaataaaccataaagtttccaatctctacatcaatgatttccattcccctcaaatacaaaatggttggttttgaaaactcaagtagctgtccagaatttaattttatcctagatatccgcttcaaaacattcagatccttcaaatattctcgtgtttctttctatccaaacaacccaaaatgtagccaagatcacagtcctccaaagctttgtctttgcgttttgcaaccaaccacttactcactatcatttgtttaatagagtttgggaaaatccaaaacaactcaaattccttcggcaatttaaagcataatctacggatgaaaaaacaatccataaacaagtgttccacatcttctttactccttttgcagcaaacacaccagccaggggataacgataaaaaggggcgtctcttttgcatcctcccgtaaacattcactttgcccaaagccactaatcatccaaatactttaatttttgaaagcaaacttcttttccacaatatcttaggccattccagccctctataactcgggtttgatgtaaaccatccgaaggctgattttcaagagaaaacacttatagaatctggtctctaaattatgcaatcctccacaacactaatcttcttacatgctctagccgctgtaacaattctagaaaactaagaacttccctttccaatgagtttcttctaaacttgaaattccaactcgtaactctattgcctatttccccctcactcgcaacaaattctttaatactaccactcttatcccatcgaattctgattagatccgaaaagtcactactcgaagaattcccaatccacatatcgttccaaaaccaactactatccctttttcccactttgaaatttaccaactctatgaatgcttcatatagatttgaaatatctctctaaggcccctttggagacattcatactccagagttttagtcccacatattgtctgccttgccacatcgactcacaattactttgtgccaaagtgatttagattctaatggtaaacgctaatgccatttcataagcatttcagaagattactaattttaattgaataaggacttgacctatatgaattgtataaatccgaactaagactccaatccttgacaagatcaacacatattgtatttgtaaaatatggtgaatagattgcatatcttattcaatggatttatatacaatactagagagacaaaaaaggaaactagagaaaaaataggaaactaactaattacagttattcctaattctacaacttatatattctaacaccccccctcaagttggagggtaaatgttaatcatgcccaacttgttataaagatatttaaaccgcatccaatttaaagcgtttgtaaaaatatctcctaattgttatccagtcttcacatatcctgtggagagcagacattgttgaattttctcacgaacaaatgacaatcaatctcaatgtgcttaattcgctcgtggaatacaagatttgagataatatgaagtgcaacttgattttcacaccacaattttgctggaattgaagtcttaaacccaactttagtcaaaaactgataaatccacactatctcacacatagcctgtgccatagctatatattctaatcagattgccgctaacaaagacataatagcctgcagtaaatcttctttccaccttggagcttgcccaatttgcatccgagaaatactcaatttgggtgtgtctatgatccttgtaaacaacatctcgtcctgatgctcctttcaagtaacacaaaacttgctataatgttgttcaatgatgaattgttggtgatgacataaacttactaacaatactaactaagagtgcaatatgtggacgagtcacagttagattattcaatttttccaccaatctgcaatatttgtcaggatcttcaaatagttccccatcacgtgtaagatgcatagttggattcattggagtactacacggtttggctcccaattttccactctcagttaataaatcaagtaaatacttcctttaagatagaaaagtaccttgtttactccgagtgatttcaactttcaagaaatacttgagcacccataaatccttcataggaatgaacgatttaaggatgagatgcctctaatatcatttccagtaataacgatgtcatctacatacacaaccaacaaaatgataccaccagttgatcttttatagaacaaagaatgatcttacttatttttcaacaaaccaaatctctcaacaacttgactaaatttaccaatccaagcacgaggactttctttcaaaccatataaagacctgcgaagacgacaaactcaccctaactcccttgagccacaaattcaggaggtttgctccatatacacttcttcctcagatctccatgaagaaaagtatttttaatatcaagttgatgcagggccaatgatgagtagctgctgccgccatggaggaaatgaacagttgaacagatgttcgtttagcaacatgagaaaaagtatcacagtagtccactctataggtttgagcataatctttggcaacaagacggaccttgaaacgagcaattgttccatctagattgactttaaccgttaaggcccttttgtgccctatggcccgttctcttgaatgtaaattaaccaagtctcaagtaccattcacaattaaaccattcatctcttctatcgttgcagcaacccaaccaggataagacatgacttcatgaacatttttaagaatagtgatagaatcaagagaagttataaaagagcaagaagaagagggaaatgattataagaaacaaaagaagagacaagatatgtacattgtttaccattacgtagtgcaatgggaagatcatcattggattttggatctgatgacgaataagtaggtgcaggacatgaaacaggaggtggaagcctagagtacactataacagaagatggaggaggtgggggatgtgtaggcattgcaggagctatgactgaggcaggggaaggaacaagagattcgtcagaacatgtgtcgggcaccaaggatgtgatagaatatatcaataaatcatcatcctctcctctacaagtaggagtaggtgaggatgaaaaataaggtgtatgttctacaaaagtaacatttatagaaacaaaatatttgttgagatcaagacaataacacctatacctttttgaagacgagaataaccaagaaagacacttattaagaaacactaccaaatatctgaggagcaattggaaacaatgacttattaagaaaaaagaatttaagtggaatctcaccattaagtatagagggtgaatgatgattgataagaaagtatgttgtgaaaactgtattggcccagaaaggtttaggaacttgtattagaaacaagagggcacatacagtttcaagaaaatgtctgtttttacgtcctgttacaccgttgtggggtgcagtatcaacgcacgagatttcatgaagcattccattagaggtcatataaaattgaaattgagtagatgtgtattccttgacattatcacttcgcatagtacgaacggacacataaaattaattctgaatcttaatgcaaaaaatataaaatatagaaaataacttagaacaatttttcaataaatataaccaagttacacgagaataatcatccacaaaagtaacaaaatattatatccaaatttagacaaaataggaaaaggacaccagacatcattatgaactaactcaaaaggagcactagcacgtttattgacttgaagacttaaactaacacgactaacaatctaacgaagagaccttatcatattggggacaaagtttcttgagcaaaggaagggataaatgacccaaatgacaatgagcctcaaaagcggaagcgacactcggacaagtaatcagggttaagggtagtggatcaagaacatagatccgtcagattcatgtcctttagcaataatattcttcatcataagattctgagataaacaatgactgcgaaagaaagagatgcaacaattcaaattacgagtgaattaactaatagaaagcaaattaaaggataaattaagtaaatataagaatgatgacaaaataagcacatgtgtaggagtaatagtaccagattcaagaacagaagaagttgatacatcagctaaggtaacagaagacgtgggattataagattcaagagtggaaaagagattggaattacttgtcaaatgatatatagtaccagaatcaataatccatgttggaaagaaggcatgaattaaatttacctgaatcaacaattgtagtgacaaaaatgagatgaagacttgagtggtttctgttaccttgagaacttggcaaattcatctgcagaaatgatgtccgatttgtcagatgcatcactagtgctagcaacattagcatagtgtttttgctgatttttaaagtgtagcttattacacttgaacttggtatgacttggtttcttacaatagttgcacatagtgttcctgttcgattgtcaggcccttgtgaattgctttctttgtaaccacttggagtagagttttttcatggtgcatgattattatgactagccaaagcactattaacagaaatagatggagtagtttctatgctaagaatgggactaaaggcaacctgtaaaaaggatacatcagattcagaaagaacttgtgactttgcagagtcaaattaagatgagagtcctgctaggaagctcatgataatcatctgctcttgctggtgctgctaaatcttcacattaggactaagtggcaacaacacattaaactcttcatatgtcctcttaaatgccataaaatagttcataaatgactaatcttgtttcttcgcaagataaaaggctttgcaaacataatgcatacgacatagattgtctttttcagaatacaaaaactccaagtaattagttagttttttaacaaattcacattaattaatcaaactaattacctcattatcaatgtaattttgaatttgaagaaacaagcgatcatcttcacgtaaccacacatttcttgaattgtctttttctttgggaggatcatcagtcaagtgtttatctttgtcaatactcattagataaagttgaattgtcttactccattttaaataattcgatccaataaatttatggtccgtgattttagacatcacgagaaccacatcagaaacaatcgttggttttggattcgatctcgtctctaacataacctcaaacaaatatcggaagagacaaaacataaatgaacaacgatgaacagataaagaacaccaaaatacgaagaagggagaaataccaaactacaatttgagatagatgcgagtaggcttaagaggagccgaaaaatgaatcggagaagatttgcccttgatatctccattgcacgtgcctccacgtgccatcgtgtggggtaggtggcagtgacaacaggcggtacgtgagccataggtgcgaggaattttgcgaacggacttcaagttttggcagattagtagctgggcaatctttataagtgggcgatgagaacaaatgattactctaaacacccaggaggttgctccatatatacttcttcctcaagatctccatgaagaaaagcatttttaatatcaagttgatgcaaaagccagtgatgagtagttgccatgg

SEQ ID NO: 16308 - DNA, 4025 bp, Cannabis sativa
  modified_base (1975)..(1976): a, c, t, g, unknown or other
ttaatccaaataaattaaagacacatcaaattaatgagataaaaattcaagtgtgtttttaagtatttttctcgaacagcagtatgtccttgattatatatatatagcaatattattcaaacgaggtgcacattcagaaatatataaatataaaagttatctttcaaacttcaataaagtataaatggatctagctaaacttgattaattaatataatctacatgtaacattcttttttattattatattaaatataatattaatagtttgacacatgtttagacagtagtcatcctgatcacgtggttgatcaactttaattatttataaaatcgaatatcttgtttttgtttagacagtagtctagctaatatgaatatattctcaaccattaatattaatttaactaattactgctacatatactcaacaaacactatctgatacggtattttgatgggttaattaaccttacatattttaatttaaaagattaagcatatgacaataatactcataaaatatgataaaagtatactttttggtccacttgacaataatgtaagaacgaattgaaggctatttaagaagccaaaaataagcaagtcctatcaaattgaattcacagatcatttctataattacatatacatagtaataaatgatgtcaggatcaataatgttactggtcttgtttgtttcgattaatatttttgtagtggcaaaggtgaaaggttcagattttcctgtaatcagcaaccaaattcacttgctgaggccacagtcagggtctggtgggggccatgtgaagggagtatcgtgcctgagttggcgatacggtgtggaaacgaacagcatcatcaactggaaaaccattcctgtggcctgtgaggactacgtgggtcactacatgcttggcgatcagtataggaaagactcaaaagccataaatgatgaggcttttctttacgttaagaccctcaatctttctaagaacgccgccaacgacgtcgtatgggtctttgacatagatgagactacgctctctaatctcccttattacgcccaacatggcttcgggtataaattaattaattacttttcttgtttaattaatttatgggttctaattagaaatttgaaactatacgtgggtgcagtgtggagcggttcaatgcgacgtcgttcaatgaatgggtttttgctggaaaagctctagcattaccagagagtctcaaactgtacaaaaagttggttcgtttgaaggttaaaattgtatttctcactgggagaactgaagaccaaagaactgtgaccgagaccaatcttagaagtgttggatacaactcttgggataagcttttactcaagtaattataatacatgctccacctaataatctagctaataaaatatatatctatacattctctattcattaattataatttcaatattttaatattattagctttgaatttcgtgagatttgtttggttaataatgaagcaagcaacgaaatttcaaagacattgtatctaacactctctatactctctatgttgttaagtgtcatatccctaatagtgtaatatgtaacttgtatatttttattttgttagcacaataaatatataattaatattggacctgttgcatttacatttgcaggggaaagaattttgtagggaaaccagcagctgagtacaaatcagctcagaggaaaatattggagaaggagggatataaaattattgggaatatgggagatcaatggagtgatctgttgggtacaaacattggccttaggaccttcaaattgcctgacccaatgtactacattagttgaatatttaactttgtattgcttttctttcctttggttcacttgtcaaaaacatctccctcttaacttggattttgccacaaaataaaattgatttgttacaagtttctttatatatatatatatanntatatatagagagagagagaaaaaaaaatagtgcataattgctatataacaataattaataagtctcatcatgaggtttaatagctacaaaggtaaattatagttcaaaatttttaaaatagggataaagatgaaaaatatttttttttatccattaatcaaaaatgttctcatattatttttttattaaaatatacccacttttttaagtagattgtttaatatattctcactctctacttaagtctagcatataatttatataacctaagcgatctaatagggacatcatccataaaagtgggtatatctaaaaaaaaaatatgaaaatagaggtaaaaattaaaacaaataaagcaaaataggtatacaatgtaatttcctctttaaaataacccttccaatatgagttataatctgggtcggccctagacataagcgggctaggtccgcgcctagggcccactcattttatgagcccaaataaattggtcaaacctaaaagtgtcatagtatacaacttttaaaatcctaatttcctcaattaataaacgacattttatcaaataaataaatgtgatcaaatgaaagttatgttagatacttgataaatcaagaaaaaaaatatatatgatttaaaaatttctcagaaaaaaaaaatgatttaaaaaggagagaaaagtgatgagtacaataatgaagtagaaataataatgtggtattcatataaaaaggcaatttaaaagtggcatgtatgtataaagcttcttataagccggtatagtgagtggttaacatcaagagtatccagcactgtttggtaggtggtaagtcaaaacgctctgggcctataatcaggcccaaaactcttgctgaattgcaacagcccttgacactttatgctccacgagaataagggaaatttacatgtaaaatgaattttgtcattttcttaaaaaaattactgtcagacggtattttttatatttttactgtatttttttataaattttatactgcagtatactgtttattcttttgttttgttttatttgttttagtattattttactgttgttttccataatttatttttttaacgtcgattttactgttcttactccatcttcctggaattaatgattattttctgagtgttctcgtggtgctgtggtggttctatccgtgagtgttgaagatggaggctataaaatacatttcttcttctttctctatagttattttgtgtttttttattttggttatcttaaaaatacatttgacgagctcactagaaaaaaagttttgaggtgtgtgcttcttttatgtttttctaaggggttatatctgcctattgttctatatttgttttgtgttgttttaatagtttttttgttatgattttttaagattgggcttccaaatataattgctaatgcatttggtattgctctgcagaatattttgtagcttttttaatcatatttttttttgtttgagttgttttagtgttattttacagttgttttgccatgattatttatttgacgtcgatttcattgttttttctcaatctcaccgtaattaattttttttatcgattgttctggtgttttcgtggtggttatgtccgtggatataaaagatggaggcctttttttttttttttggtgtttacattataaaagaaaaaaaaaaactggccaagataatataaaagttatttttgccgtgtggtagtattttttgtaaagattttgccaaaagtcagtattttggtggtggtgattagtggtcttggtgcctgactaggtaggtttggagggtctgagtgatgcgaggaagagaagagatagaaagaaaggaaaaatgaaaagaatggtatttgaataaatctaattaaaaatattaatatttaattatttaaattattattattttttttaaaagaaattaattagaaattttattatggagtaattttttaagcctaaaaataaaggtggtgtttggtaatacttttttaatcaattttctatttttaaaatt

SEQ ID NO: 16309 - DNA, 4872 bp, Cannabis sativa
catcaggtatttgggtctatcccggtttcggttttacctaacaatattttgtgtaacgaccgagaggtctaacttatttgaatctatgatataaacgccttttctcaaaaagaaaggaagtgaataatgagagtcaatttagaaagaatgggtaacaataacatattttggacacatgtgaatcatggggactttttgaatgagttgtgtcattttaaacataaaaatctaaatttccctaataaaatattgtccacagtattccatcatattaactttatttattcttgttttgcaaagtatgctaagtctctgctgccatagccttatgtttctcatgttgtgggttggcttccttctctaatagactggattaaaatcaaattccatgtggcagttggtatgaattttatgatggtggctcctattgttaggaatcttgtggcagaaatagtttgggtcatgacatttaataaccttctcattggagaggttgaagcttggtttctggcagtgaattctgctattcagccagaccataattgttgaaagtgtttgtagtactgttaggaagttgtgctagttgggaactttataattatgttgctgaccttaaacacaattccaatcaacttatgggtttcagttttattaagataggatcttaattgtatggccataacattggtagatggacattgaagttgagtagtgttgagatttcctccataccagtttgctgtgttctgtaattgatatgttgtgatctgctatttttcttctattaatattacctttttattttcataaaaatgaatatatcagaatggacaaattaaatcacaactagatgacaagtaaagaacccaaattggaattttaaaaaaatgagcatggaagaattttcccttaaaataaaaaaataaaaaaagaatatgggaggattcagattcagttgaggtgtagcagatgcagctagtccatttacaggcccaccactccacagtccacatggtatatgtatatttttctatatattatatattttctaaaacaatatcagagatgagaacataaatgagtagaaaaagtgctttggttccacaactttgaggtgtgaaagtgattacaaacggcttctgtgacctgttttacttttttttttttttttttgcatggagttgttggattgcatttgccattatttatctcttttaagttaataaaagacataaaacataaatggtatttgagatatgaccccacagaagaagaaaatactttaaaacagtaaagaaataaagcaaaacaagaataagattccattgtaaacatgtattccctctctccctttatatatattatattatatataccatgtactgtgtattacatataacagtacttatatggaatatggatcacctccttccgaccccagttggattggatgtgcttttcagttacgtatttgttatgtttttatttatgcaaatttcctttaatatatttatagcttttaagtaagagcaagagctagcttaaaaaacttgattggattggattattattattatttttttttttggattagatttaactgaataattatatgagcactataatatgtttggtgtagtagaaaactaaataaaagtataaatatcttttctctaaataatgtataacttgaaaagtatattttgttaatcaataataaattctttaaaaaataataatattgggttagaatagattatactatactatgcttgatgcaacatatgactaaatgaagaatataataataaattttccttctattttatcaaactagataatgtaactggtcctgctgcggttataattattataatttattgaaaaaataaaatactttgagttatgattatttaagtatatatatattaggagagaaatttatactttgaacaattttttaatttttaaaatgagaataaaaatttaaaaattttgatctcaatctcatcttcggacctcatatgccaaccctgactcagatctcgaatccgtctttgacttcgactcaggctctcggccccaggcctcaacgccaacttagactccaaccaccgaacttgaatctggacctgaacctgagcccacctggatccccaccctaaccttgaccctaaccttacacctctagtctgaatgcagcaaccggacctcgctacctagcccagactaaagactcggtgccaaacaccgacccatagttgacctcaaatccgactttgacttattacattttgttatagagcattgttattaggtattagtggtgcttatccactatcgagatatgtaaaccctatcattggttagtgatactctctaaaagtaattaatcaaattatatgagacatgatagttaattgcgtcaatatcaatatgatacctagaaaaatactacatcaataacgcttttggcattactctattttttttattaaaatttatattatattaatacaaaattattactaatatgtttacgttttttttaaataaataataattaataaaatattataacatatataatttttatttaaataatcaaaagagtatttgtctataaaattggaaaaaagattaatgatttaatatataaatttgattagtatataaatatttttctttctatgaatttttattcattataaatacataaatgtatttaaaaaaaatacaacactagaaaaaaataacatgtagaataactcctttaagaaataattatgtattttttttatagaaaaattatttataaaaaaatacacaaagaaattgcattattagagttatcattttttttttttttgtaaattactatttgtttttttttttaaataaagaggtgctagttgagtgccacatgctcaatatgtgcttcctaaggagtctaatatctcttccattttttaaaaaatacaaaattaataaaacacttttccaatttatataatgtacatgctattccatcattgtatatgcttacaacgatgaagaggggaggaaagaattatggagagattcgcagcaggtagcaagacaagaagcttggctagtcatgggggattttaatgatattttggccaaagaagaaagagttggtaatagagtcaaataccatccttcacagaatttcattgaatgtattgccaattgccaattagaagatatcaaagcttgtggcaacttcttcacttggagcaccaagcaacaaggagaagaaagaattttttcgaagattgatggggtaatggcaaatcaggtttggatggataatttcactaatgagaggttaatttcatgaatgaagggctgatggatcatacaccacttatgttaacctttcatacaacagtacctagtggtaaaaaaccatttagatattttagaatgtggaatacacatccagagtatgcaactcgagttagagaaacttggctggaacaaacacagggaaacaagatgtttcaagtggtgacaaagcttagaatattaaagggtgtgctaaaggagctgaataagtaggccttttaagacattcagatgtctacacaacaaactaaagatgttcttgcagacagtcaggagaaattgcagcaggagcccttaaatcattcattgcagaatgaagaattagaggccaggaagaggtatgcagcattactgaaaaattatcaatcgtacctgcaacaaaaagctaagattacatagattaaaaatggggatgaaaacaaaactttattccatgcgagtatcaaggccagaaggagacaaaacaggatattgtcaattcagaaccaagagggagagagattagaagaagattcaaaaatatctgatgcttttgtgacttattatcagagtctacttggcaccaaaaggcagggaagaagagctgtattgtcaaatttggttcagctagggctattatttcaaatcaacatgctacttggcttacatagagctacacctgtgaggaaataaaggctgcagtatttgcaatacatggaattaaagtgcttggaccagatggttactcgagttttttttttccaggacagctaattcaaggggatgtgtgtgatgctgtttaaaatttcttgcattcgggatagatattaaaggagataaattccacagagctcactctcattccaaaagtcaaatgtccaaacacagtaagtgaatttagacctatagcttgttgtaatgtgatctataaaattgcaactaagttgatgtgttcaagattgaaacatgtgcttcccaaattagtggctcagaatcaaggaggttttgtcaagggaagattcatagcacataacatcatgatctatcaagacctaattaggtactatggaaggagagtcacaaagcctagttgcatgattaagttggatttacaaaaggcttatgacaccattgattgggatttcttagaggagatgttgatggcctttaagtttccttctaaattcataaagcttattatgaattgtgctaggacacctaggttttcattgatgttcaatggaacaatacatgagttttttgaatccaagagaggactaaggcagggaaatccactatctcccctcctttttgttcttggaatggagtatctctcaaggatcatgaacaagattgggcaaaaacaagactttaaatttcatgacagatgtgaaagcttacaactcaatcacttgagttttgcgaatgatgtattactcttttgtcatggtgactttaagagtgtatacctcatgaagcaaggcctaaagctttttgctatcacatcagggcttcaaccaa

SEQ ID NO: 16310 - DNA, 11928 bp, Cannabis sativa
  modified_base (440)..(446): a, c, t, g, unknown or other
aaataaaatatattcaaaatcttaaaaagactaaaatcttaaataaaactatcaatacgtggctcggcacgtatattcacctagtatatatatatatatgctgcagcaattcatattttatatatatagaaatttttataggagcatcagtttttacctttacagggtattgaggagtagtacctcttattttgacaagtgaagaaattttaatttaatttttttcccatgtacattgtagttagggtagatattcaatcaatattttatttttattttttaaaataatttaccatattaaaaatataattcaaaataagttgttccacagaattactaacacgcttacacaactagttttttttaggggattaattttttttttcaaatttacatttgggtttctaaagtagttccagcgctagttgcaataggggttnnnnnnngattttttgttgcaatttaggtttaggttgcagcgctagttgcaatagagatttctatgtagaatttcataaaaatgtaaaaaaaaactgttttaaagtataaaaataaaaaaagtccattttttaaatctaattctatttttgacactccaagttagtgggatgtctgatcttcctacaatattgtttactatatatatatatcttcctccatatataatatataattaaattatataattagtttcttacatatatataatcatgagtgatgacatactaactaatttgatcaatgttttgattgaaaataaatcaatattagcacatgtggagtgagatgtcttaagttacaattattgataagtagcatgtgttcttgcacatgcatgtttcttaatggcacacatcaaattagtgttggatatttatattactccaagatttgtacccatgtaggtcctttttctttcttagccctccattatatattctcattaattactggccccaccctatatatacatatatatatatatactttattatatatttatacaaacacatatattaatttatatttgtgttgtgtatatggttgcactcactagctagatacgttgcagtaacgaaaaaccatagaataactataattagaaagtgattaatttgtattaatgtttgattgatttaacaaataataacaacaaatatattgatatggagatacataacataatcatgatcagttaattaaacaaaattatatatttctgtaattttataaagtcatacaatctgatttaaatttagcgctacaacattatattaattaattcttttcttaaagtgtgtatattatatgtatatattctaaaataataataataacattcttcatcatcacgttattgaagtaccactgtgatatgatcatgaccatgactattatcataatcatgattatgatgaacattatcaactgtaatatctttgatcatcatcaagtctttggccttttccaattccttctcccaatttgtgttataaaccacagtcaatatggacacaacacaagcaatttgggctgctaaaagcccataacacagccccaaaaagcctaacttccacacaaaccccaaaacgacagccaccggagctcccaccaaataaaacgcatagaagtttatggctgcaccaatccctggccgagcacaccctctaagaatcccacaacttgtcgtttgtggacagttagccaattcacacacaccaattataggtagtacggccatagtaagctccaaaatctccttatcatgagtgtaaaccctcccccaagctcctctcccaaaagttgttcccaccaaccccactaaagaagttattagggctaagctgacagcaacagatgctgccagcttagccttttccggccgctctgcacctagctcgttcccaacacgtgttgagaccgaagcactgagtgcagacgggatggtgtacatgagagaagtggtttggatgacaattgcggaggttgccaaggccaccttagggttgggaaggtaaccggctagtaaagtcatgaactcataccaccaccactctaagcaaacggctaagcaactttgtatagacaatctaatcaaaacaccccaaccttcccatgttgagttggtaaaaaaagttggccatgattttggcaaaaatggtgttttcaaattagtagtaaaattagagttagagtagtaagactccttgttaaaattagtgttaaaatagagatatagtaaaagtaagaaaagggtaatgaaatttgtgatgaaattggagatagctattccttgaaccccaagtgagagtttaaaagttaagaaaatagtgattggaatgtgaagaaacatggctagtaaattagaccacattaaaggccaagtaatggatttactacgtaaaaaaatacgaagagggtgaagaagagagttggctagtaaatcaggtatggcaaacttacaatatattgttgctatttttgttatatctggattttggttaaggatcaacataaggggttgaaggttgaaccaaagtaaagagattggtagtgaagcaaagagtagtatgaagattgttctttgtagagttaagaatgcaagggcgtggttttgtgaaccaatagcttggctacaaagtgggtccatacccatggctaagccagataagagtgagtagccaatgatgttggtgaatccaatggctaaagcaccaccagcaagttcaaggcttcctaatcttcccatgcaaatcaccatagccatgtttcttagatagttcactaaactcatggtcaaaatagggaaacctatgtttgacactttttttagctcttccactacctaacaaaaacaataaaataaaatcattatatataattaaagaataataagaaatatatataagattttgaagtagtagtacctctggcattgtcgggtacttttgaaccttattattctctggctctacttgtggaaccatcttattaaatcctttatgtatgtccttacaccttaatattggtcagaaagagagagagagaaagagaaagagctagagttggaaattaataattaaaatgaaaggagaggagggtatttataacaagttttggggccataactttgctttttgataagtggtaaatttagaaaagagagaattgctatttaccaatttatttctcacaaaattcagatatgatattttataattaataattacagtattttatattatttattaaattaaatttaatattaaattacaccaataacattaaagattaatagtgtccaatactactttaggccatagtagaaaattagattacattatatcaatagccatatgagtaaactcagtaaagtatatatatatacccagaatgcaccaattttgatagcaaagctatttaacatatatgtatatgaatagatatccacttaatttgatttgtgggtttttggtcctttacatgagaagattacgatatatataataaaataattaaaaagaaaaagtttcatttaaaccgtgcgataatattgaatagggtctttgcccacacccatctgtttcttccaaattagagattttgtcatttttaaaaaatagatgggaacaaagccacttttttatattttatcttgttcaactacataatataccaaagttcttagtatatagtacctcatggaaaataatgccttattcatttcttcacgtgttggaatattatggccctgtcgttaattaagtaatataattacttaaattttaattagtgtgtgttattcaaagtccattttaattactattaggagatgattaattaatcaagagtactagtgtgtactttgggagagaaaaccaattaattaataattatttatttgatgaaaataaaggatgattacatatattagtatgagaaatgttaaaatatattagtgctacataacacttttttaatattgctattgatataaataagtatcgggtcccatatagtttaatataatattttttaaaaagtatcgttagccaatcacaaaacaacatgtctaaaaatgttagacattgctgatatccatgctctattagtatttttgtttgagtagggttaattaatacgatagtcggttgttttgtactagccttgaaatgttagtaatgtgtcactttcttcttttttatttttataggtatttatgaaggcaagaaatgagcatttttataggatagcccatgaccgccccaaatcatatttccttacaaaaaagtagagaatttagattgtaccggaagcaatttcttttctgtttttctttttctcctagctagcagcacatgcttttccgtaagacactcttcaatgtatctaaagcacattataattgaggattgttattgcacaccagtagtgctcttggcaatttacgattagttagtgatatttctaaaagctattattttaagttataagagacccgagacttaattacatcaataacagtatgacaccgaaaaagatgttagacactaatagtatcttttaggaattctcattataatttgaagagagactcatgtttaccaatccgtctttttaacacacatataaatatttaggctaattaaaatttttgccccctgaactttaacatgtaccaaatcatgccttatgaacttttaaggtcgttaaaaatactcattggaactattgagattgttggatttaaggacttttgtctaaattcatttaattttactatttcagcaattgtttatatactaaatcatgttccctagactttgatatctaccaaattatatcgctcggactttaatatgtactaaattatgtctcctaaactttcatctatattagacttttttactaaaattagaaaaaaatccttaaatccaacaattttaatagttcagaaggcatttttaacgaccttaattaaaagttcaaggggcatcatttggtacatgtcaaagttcaaagagcaaaaattctaattagccaaatatttatatatacccctaggtcaagccagtcaaatatgtacatctcttaaagctctgctatttatggctcctccctcaacctttgttttgtatttgtacaattgtacttgtactatatttttagagcactacccatgaactaaatgactaatcaacaacaaaattataaataacaacttaatcatatattgataggatagggtcaatgatcggtgttgacaactcaactataggctagtgttacagcatagacagtttacttgagtctaatgctacgacgtcatcaaaatttttacttctgatcataacgttcataataatcacaggtgtgataaacaaattaattagcatgtaatatcatacgtattcatgcagttattgatattctaacacatcctctcctgttaaaatttgataagatgcctataatttcattctaaaatcaattgacaactaaagaaaacgtactttattcatcttatatattttattatctttccacacattagcaatgtgactctctaacatcttctctcaagatgataactattttatttgttcactatcttggacaactcgatcataaacgactcttttttaactcactatcccatgatcacaagtgactctttttattctattttttagattggtatttctagatttttggtggctttattttttttttttttggctcactatctccgaatcacaagtggctttttaactttggctcttggattagttttttttttttaatagatttttagtggtttttttttggctctacttcaatcgactttttttatttatttattttttggatcagatagttattagaggggttttttttttctttgttgctctgataccatgtgttagaatttaacaaggtgcatgtggttctatctaaaaaccaattggcatatgacaatgggaggagtagctcattcatcttatatattctattatctttccacacattagcaatttgtgactctctaacctttgccaatgaatgcgtgctatgtgatgttcactttttttttttacatgagtttggaaaatacaaacaatatgaccttaagagcaatctcgttgatgcttccttgaaatctcattcacaatacaaattaattaagtttagtttaatagtttaacaatgttagaatagatagttaagtatatttttctttaaacttagttagttggttgttaatccctgcattgttagttaatttttttccaattctatcatggattgactttgtagctcagtcatgtatatagacctctattttcattgtaatgaataacaattcattcagttcaatctttcattctctttttgtctctttggttcactttatcaatctgttatcatggctagacaattcaatatgatatcagagcagttcccttctcttgtggctgacatggcgaaccttggtaacaacattgttgatccatgaatgatgaacttcaagctacaaacaaaccacacacacaattcagaccactcaagatcctgtcttactcaatcataaatattttgatccaattgaatgatcataatttcctcttgttaaagcaacatgtgctagttgctatcaaaggaaatcgattactcaagtacatcaaagagcctcttctagctaagttcttgactgatgaaaatcgaacaacaaacatggaaaatccagtctataaagaatgggaagttcgagattagctaatcgtgtcatggttattatcctctttgacaaaaagcttacttacaagagagtggttagttgtaacactgctcaacagatctgaacctccctagagaaccatttcaccttacaagtctcatcccaaattctcaaattttgcacgaagctagaaaatgtgaagaaaggatctcactctcaatgattatctcttgaagttgaaataaatagttgacctgctattatcagttggagaagttctcagtgatcgagctatgttgcagtaatctttaaaggtcttccaagggagtatgactcctttgtcatctcctcaaatactcagatagaaaattatactgttagagaaaacgagactttgcttttggcttctgaattaagaattgaaaaattgaggaaagaagttgatctcagtgccaatctcaccactcgagaaccaaatcttatatcatggaatccaatcttgcctttagaagattcaggcaacagcagtttgcaggtcgatgcaactcacgatttttcaatggaccaggcgaattcaataatccaaactcaatgcacaacaatgatttttcctcaggctcaagtcaaaatttttgaggtagaggtactctcaaagttaatcgaggtggtaaatctagtttgaatctcaacgatagaattcaaagccaactctgtttaaggtttggtcatgttgtacaagattgcttttattgttttgacaagaatttctcaagacctctcataggatctagtagcaattaagcatcttcatcatcaacatttcaacctttggtcaaccttacaacttcaaacaatactagtgatgcaaactggtatccagattcaggagccacaaatcattacacaccttaggcatggaatcttgcaaatttctttgattatgatggacaatatcaaatgtatattggagatggtgtagatttgtctaaaacatattggtcaatcatttattcttcctaattgttcctcaccatctcttgttcttagtaattcacttcatgtgctagaaataaccaagaaccttattagtgtgccaaagtttgctcaagataataatgtgttctttgaatttcatgctaacatgtgttatgtaaatgacaatttaacttatattatcttgctgctggggatgcataagaatggcgtatatacttttgatccttcacatatcaactttgtatcaccaagtcctaagggaggagtcactttttatcataaaaagcctcacacttcacaaatctgtaacagtgtttgcagttctaaatccaagagcacattcactgttactctaaacaactcagtaatcacaattgtaagatgtaataagtgtaattatagtgttgaaaatgactttactctatgtcataataaattaggacatccctcaaataaaattttacaagttgtcatcaaatcttgtaatctgccaattagtaataaaatttctcaatattccatatgtttagcttgttgtcttggaaaaatccataagtttcttttttctaaagcattcaccacatttatttctgaaccattacaattaattatatttgatctttggggaccatctcatacaattttatataatggttatgtgtattcaagatttacttggttgtatcttataaagaacaaatttgatactttcaagatcttcattaattttaaatttgaggcggagttacaacatacgaaatccctcaaaactcttcaaacttattgggggggggggggggagtttaggtctttcaccaattaccttactaaaaatggcatccatcacagacactctttcccaactacacatcaacaaaatgatttggcttagcgcaagcacagacatattgtggagtatggtctggatttgttagctcaagcttccccacctctcaaattttgggatgagacttttaggactgttgtatacataaacaatagacttaccacccttatgcttcataacatgtcacctttagaagttttattctataagcagcctaactatacaccatcttcaaaacctttgggtgcaagtgtttcctaaatatcaagccatatagtaagcacaaattagaatttaggtctgcaccttgcactttctttgattatagcctcaaccataatagatacaagtgtcttgatgctaatggaagactttatatttcaagggatgtagtttttgatggattttcattccattgtgaaaaaatgtgtagaattctccacacgagtcaccacttgctacttaattttctcttttaattaattccaaaatatcctcagtataaaaaaaccttattctatgtctgatatgttgaatcccaacacttggcataccaccgcatatgtcttaactcaagaattgatcaaaatatttttatagataacaatacacctaatcatgctcagtacgttcatgttgctaacacttggtgctatagccaaccatctgtgtttgctataagagaatcatcaagtcaagttgatgttcctgcaaactagaatattcctaaatatggtctcactcattacaactcaccagatcatgccccaacacctagtgttcctgatctcagtcttagattccatttggtcctattgatggtccaactgcagaaaatggagttgctctatcaactgctcttcaatttgttataccacttcaactcctcaacttgcaaggtgtcctaatgctccttgaaagacaaataaccatctaatgagaactatatcaaaatttagaattcttagaccaaaatttttcttggtttccaaagaaccagctagtgttcaggaagctcttcttcatgagcatcagaataaggctatgaatgatgaggttttagccttggtaagaaaaaaaaacttatacacttgtatatcttcctgcagggagaacaaccattggatgcaaatgggtttacaagatcaaagaaagccttggtagaacagttcacaagtacaagaaaagatttgttgccaagggtttccatcagtagcctggtttgacttgaatgagacattcagtctagtggttgaaacattaactatttgagtggtattagttcttgccttatcaaaagggtggataatgaggcaacatgatatcaataatgtatttctcaatggaaaattgtaggaggaagtgtatatgacacaaccactaggttttgaagttcctggacaaaactcatcttgtatgcaagttaaacaagactctctatgggcttaaccaatctcctagggcattatttgaagggctacaacacaatttattttctgttggattcatattatcaaaatctatcactcactgtttattaatcactctcctaaatctacaatacttgtcttagtttatgtagacgacataataataacagggagtgatcttaactctcattcttgacctcaactgtcaattctctcttaaagatttgggacctctcaactattttttgggaattaaagttaagaaaatagatgatcttcatctgtgtcaagccaaatatatggtagagacctacttgaaaaaacacagatgactggagctaaacctgtcccaattcctatgacaagtgagcttcgtttgtcagctcgttaagaggatatgtcgctagaagatgtttagatgtatcaagtaatttttggagcattacaatacctcaccatcacaagaccagatttgtccttcactgtgaacaaggtctaccagtttatgtaaataccactacgtactcattggatggctatcaaaacgaatcctcatgtacataagtggcacttgagtttggtcttcatctcacaaaaccttcttcacatgatatggtcacttactgtgatgctgattgggcatccgatccaaatgacagaaaaataccactggttttgttatattctttggcttaaatctaatagcttggaaaggtaagaaacaacatctcgttcaagtactgaagccgagtatagaagtgttgctaatgttactattgaattaacttggctgcattatttgttctctaaggtaaaaattcaattgcctcaatctccaacaatttgatgtgataacttgagtactgtgattctcacttggaatcccattttgcatgctcgaacaaaacagatagagcttaacttgtactttgtgagagaaaaggtgatgaataagatggtatagatcaaacatgtgacatgttatgatcaaatagctaatggattaactaaaaccatttccagccaacagtttttagacttcagacacaaactcaaaattgatgatcattcaattatgagtttgagggaagatgttacaatagacagttaaggttgtttgtctttaagcttagttagttgggtttttgtccttgtcatcattgttagccactttctcccaattctgtgatggattggttttgaagctcagtcatgtatatagacctctattttcaatgtaatatggataacaattcattatgttcaatatttcattctctttctggctctctggttctatatctggttctctctatctttctattattatggataaatgattcaataaacaaaaacctaccaacactctaatctcgactcctactatacattctaaaatcatttaggcatcaattataatccttaaagttctaggatcaaacttggtgaaaatggtcttgaaaagttaaacttatgcaagttgggcttaaaaaatggctctcttgaaaaatgtgaagttgaccgaccaaaggcacaactacaaaatcatgaaattgcgtctattttgacatacattagaaatattataaaaccgatgcaattaattaatgggcaaagtttgcatgggttgtgtaatgacatagctttcacgtcggctatgacatcttttgcttttgttgtgcactgacgccagggccagtcctaggcataggcgggcaaggcccgtgcctaggacccacatttttcgagaatccaaaataaaaaataaaaaatatcattaggattttatttaagtaaaattaagtgtattataaacaacaaatattcataatttagttggttgaggtgtacgacatattatacaatatcatgagtttgaatcctataatactctttttttaatatatatatatata

SEQ ID NO: 16311 - DNA, 3291 bp, Cannabis sativa
tatgaacgagctgcatctgagtcacatgaaagagagaaatctcgtgatgcagaccgcgattatcagcgtactgataggtccgtttcacgagagtactaggattgaaagtggtccctaaagtacgagtaccaagactggaagtgaaggtacccctcccagatttccagtctgcatgcttttcagtttatgtaaacttcaaattgcatgtttctggaagtggagattatattttgtgttctaataattttgtgacggagcttcttatggatactagcttatatttttaagattggtagacttgtgtaattgacttttgttggcttatgtgggatattgtgtttagggtgtaagcagggggaccaaattattttattggtttgaactttcaaggtcttactagttttgtgcttgaattacatctttcttttgttcattcatgtctagcacaaagaaaaaaaatctagtttataaaacacacacatatatatatatatatccatctaatgaggtatatttgtgtgctacctactactacaaggacaacaaggttaattttctttcacagtgatcttggttgctataggaaaaaccaggggttttgctctgttttggtaactccaacaggtagagagtagaggattctttgctttctttctttcttttttttttcccctctttaatgaaaggggcttccattataagacaacacaaattacaaaggaaaaggttagtctgcaaaaacagcaggactcaacaatagaggggtacatccctattccacatagcacaagctttagattctaaagcagttttggctaaaatgtgaacatcagcataattgacttctcgcaatagaatgacaaacagcttgtagaataaggtggtgtatatcattaataacaaccttagctcatgaggaagaagaagaccagctttaatagcatgaagttcagcatccacgtttattttaaaagtcccttggttgtggtgactctcacctccctattagatagattttagagaagagcaagactagttagtattttggtaatcatgcaagaacttgtgacatttaatgcttggttttgttatttattttcgatttaaaaattaagtcaataaatgtaaaaaattaataagatggcgaaatataataaattaactgataaaaattataatacatttactacatattaattttttaaaataatatatattaaattaagttatataatttttttaatatcgcatattaatatattatataacaaaaacgaataaatattatatcattaaatatatacaataatatttgatatattgtatcattgaaaattaatatactatagtaataaaattaaatactacaaaaaaaaattataacaatattaaattaatactcaatatatacatcatactaacaaaattatatataacgctattaaaatatatatacataccaaaaaatttatatataatcattgtataaacaaaatagaaattaaatatcatcttaaataaatgatatactatacacaaaaaaaaaccatataccatataacaaaacatatacatacctacaataaaaataaaacaaaataatataatattattaaaaaaaaattgtatataccatattaacaaaaattatatataaccataaaataattataccatacttacaaaattatgtatcacatttatatataataaaataaaaattaaatatgcattatctaaaataatatactatacaataaaaaacttatatatcatataacaaaacacatatatcttacaatagaaatatatataataataacaaataaaaataaaaatatatagtatgctaataaaattatatgtcatgtcaacaaaaattcaatagaaaatagaaattaaatattattaggctatttttagcctacgtttcgggtcactttttatatttatttttcttctttgttattatttttggaatgaaattacacttgtttttttttttttttggtttcaggcttcacatttggaatatataaattgatcaaatttcgaaaaataatgatatataaaatagagaagattttgcaagaaaataaaactgaaattttaagcttaaattcaactatgttttgatcatattttggaaaaagccaaagcacaaaagttttagatctcttttttctctttccaacgcctcttgaatcaactcatttggagttcgtatgtgaaagttatgtacattttactgagagatactaaagctgacaatttgcttcagtagtcgcgactaccattttccacaatcacgacctcttttcatggtcgcgactatggagtttaggcagaaaacttattttttaagactagcctatggtcgcgactagactttaggtagtcgcgactatgggctaaagacgagatttttggccaattttgtaatttcaccatttgaagatatttgtattattttttatgtctttatgttaatttttgtttcaatttttatggatttgaacatgagttttttgaactaaattcccaatttagggatatgatgaatgttatatgatgtttctttaatttagttagtgtgattattagtttctctttcctatattgtgttatttattcttatttgttttaattacatattttagagtggccatcttaaatatgatttatgatcctaatatgaaatctaagaagtgaatattagaaatgctctaataggaaaaacataagttttgatgtaaaacgagagtatttacatagcttatgtaatttttagattctgaatttaatgcaagttatatgttaatttacttcagaaatacaagtagataatatcataatatatgatttaggaccttaatgatctaagaagggttaggattaatttgataatctgtcatcaccaaaagggagagaattaataattaacattaacaattggtaaactgaactaacaagatcatattcctaaaattacatttttttttttattttcttcattttcaatttttagttatttagttattcaactttattatcgattctaccaaataaaaataagaattcaattgtttggtacttagctacagtcctcgtgggaacgatctcacttacatgagtattacttgttaaaactttacgtatacttgcatgttggatttaccacaataagttttttaaaaaaatgatataccgtataacaaaaaatacatatatcatttaccaaaacatatttactaacaataataataaaatatatattagtaatatatatat

SEQ ID NO: 16312 - DNA, 4732 bp, Cannabis sativa
catataatccaatcttgtccagtctccaagtccaatctagtccaatcctgcgtatctaacgggcccgaaagatttttgttttataggagtttaatattaatttggtagtcactaactaatggcgttacctttggttagtatggtctattttgtcagttcctttttttaatagtataataggaaattttctttattttaatttaagggttactcaagtgggtggaagattttttttttttcttctagttttctaatttagtgcttagtaaatcctttaacatgttttaatgttgttctgattttatggtgtttgatcttgttagatggtaattctgtttttcaagctaaagtatttgctctatgggtaggattaaattgggctcatttgttcatactttctataaaagttgttaattctgactctctttttagtattgtctatcaacaagatgaaggtgtttgtatgtgagctgagtgtctaaatgtgctgttaaactataaacaatgaagttattgaaaaaaagtttaagagagtatcattttaattttcttttcgctcaaaatctaccaaacgcaagtttagtgtggttgatttcccgttttgtaagctgtatttaataatagaaaaagcagtatttttgcaaaggaatggagttcccaaaaaccaggagcgaaaacaaaaaaaaaaaaaaacggtagcgtttcgtgcgggctatgtggcagttgcacaaaatgctgacacatctgagagtgtgccacgtgtactgctcacaatttgcatgacttttggagccttctgcatgtcatttcaactactttttctaattctctgccacttgtcctcgttttctcagaaccatcacaactttctcacattaaataaaaggaagttaacttatcaaaaaataaaaaaataaaaggaagttaattaagaaaaaaaatttatataagttaggaactggaaggaaacaacagtactgtctctctatatatttttgactgattactcaatttgattaggtataatttatcttggcaagaaatcataattactatttttttttttgagaaaataaattataattattattgacttgcgagatttcgtatttatttattattggggacattatatttagtgttattattaaaaaaataatatgtatagtgtattgtattattttaaaacaactcaacagcgttaacaaaagagtgaaatttaatattttatttcaatataagtatgtatctatcattttttttttaaagatggacatattttcatttattataattatgtaaatctaaataaattaagtacgtaaatgtaaatacaaaaaaaaaagtgttgaatgtataaatttgttattatgataaaaaaatttataacaagtcctattaaaagaaatacattgatatatctttatataatttagtatttaaaataattatttatttaattttttttataataattatgtaaattataattatttaaaatattttataatatttttaaaaaatttaaaaatatttaacatgctaaaaattgtgttcaaatggtattacacgtaattaactaatttattaataaactggttaaatattatattttataatacaaattattacgaatttctcaccaaaatttaaaaaatttgtaaatgttccaaaataactaaaacttataagttgaaaagactaagataaaaagctctactaaattaaagtagtggttaaaagttcctatacagtaagttcaagaatcaaagttcagttcagttcagttattaagttacacacgtgtgagggtatcggaccattttagtttctacccctgagtaggaaataggaatagctctataacaataattaacaatataataataaaaatataacataaaaatatataaaaaattatattttatgaaaataaaatttaaaaaccgtaaaaatattaaaaaatttctatacattgtatttttataatttttatattttcttaaaattataaaattgaacaatcatagttgccaatcaaaattttaaagatcttcttattttagtggtaataaatttaaatatggtgaagctaaacaaaatgtatttggttcaaattcaaatttacatcaaatttattcttataaatatagtattattacaattttttttttttttacagatgaaaaagaagttaaaagtgatgtaaatgggagtgttcgagagtagaagaattaaaccaaggtgataatcctattttactggataagcatgagcgacacagaaaaagcatgcttgcgcgtgcgtgcgcgtgacagagtcagagataagagaaaaacaaaaaaaaaaaaaaaaaaaattaaaattcagaaaaaaaataattctcttaaaaccgttggctaataggtcttgtagtgcgcccacagttccgtactaaatccggaaaccagtcattgttttaagactaggtggtttttctttaaactagtacgacttcccgaaaaccaggagctcttatgaaaccataattttttttattttttatttttcttcttccacttaatattaatttggatttatttatgattaaaatttttatgcaccgccagcaaccccagtgggacccacatccacgatatgtggcgattcgaccgcactctgacacctcaccgtggctgccacgcgccgctcacttcccgtctcaatttttgtaccctcttgcatgtcctctcccaaccccatcccacccatcacgcccagttgtcaactggaccccacttagcccccaacttgcatttcctccgccattcgcaatttccagttttacccttgtgttcttagtatgaattcactgggcaaaattaagggcagtttcgtaacttgactaaaaatacgagagaaggtaccagggcgaatctaatgtatccgtttctttgaaaacgggtcttctcctgttttaaatagctttcggattttgcttaaatccgtaaattatatgatacgccccaataagattgagtagggagtcccaaacgattgggtgtgggtaccacgcgcattagttggagagtgttttataaagagtacgacttttatattttataaatcaaataataagaaaactcaaagctaaataaaataggaaatgagaaaaaaagagggtacaaatacccttagcctccttgaatgtggaaaccggtgtcttggagacaaaataatttaaaaaaaggaaaaaaatggaaaaaacagcagcggcttcctaacccagcggctccatgcctctataggttgttcttccctctaaatatatatataaatgttttaccaatcaacctgaaaaatactcctaaatcttttcctatctctattctctccttcgaaaaaaagaatacaaataaaacttccctcttttcaaaaatccttttgttttccaaaaatgcggatgagttgtaatggttgtcgaatattaagaaaagggtgtagcgaaaattgtagtattaggccttgtcttcagtggatcaagagtcctgagtctcaagccaacgccactgttttcctagccaagttttatggccgcgctggacttatgaacctcatcaacgccggtcccgaacaccatcgtcctggtaagtttcattattaataaagaaaggtataaacttagggaatgtttgaatgtcactcatggctaataatggtggcttcgctttttaattttctttttcagcgatttttcggtcattattgtacgaagcatgtggccggattgtaaacccgatatatggttcggttgggttgctatggtccgggagttggcatctctgtcaagccgccgtggaagccgttcttaagggctctccgattacgccgatcacttctgaagccgccgtcagtagccacggacctcctctgaaggcatacgatattcgccacgtgtcgaaagatgagaactccgctgcctcgaacgatcccaccaaccaacaacgatcgacgaagacgcgttgccggtttaagagaaacgttgttaagccaaaggcaaggaaggcgaccgagttcgaagtcgagggaactcgctgcgacacgactcaatccaagtgggcgacttactgcgcagatgatcaggtaaatcgttccacgagtcatgactcgtcggtgagtcaccagtctgaccccgcacccaacgtcgacggtgacagtaaagagaccgagacaagcatggtttcagtcgagacagccgaggtttctctgttgttcagagctgacactgagtcagctaccaagcccggtaatgacgcaacgcgggataatgagccggcgcttgagctgacactgggctttgagccggcttcgcatgcacggcgccatgtggttcctgtgaagaagagaagaatcgagaccaccggtagtgacggatgtaccacctctgatgacggcgcgtgtaagatagagttagggttggaatatccggcttgagtggagcccaagtaaaatatatttgaagaaaagaaaactcacagtccaattttgacggctccgatcggctttcttttgtttagaagagatcttgaccctttctttttatttagtttttttctcctactgtacttttttttccttctctttttacccttttgtcgataagtgaactctgtacaaatgtgcttgaaaaatttgcatataaaggagtggtaaatttaactgaggggcaaaaaaatatttccgtaatgtttgc

SEQ ID NO: 16313 - DNA, 3295 bp, Cannabis sativa
ttttttttttttttttccaatttattttcataatttgatgcttatatgtatatatttatatatgggttgtagatgaggtctcggctattgtaattgatctgggttctcatacttgcaaagctggttatgctggtgaagatgcacccaaggctgtttttccatctgtaagtgttgttcttaaacttattatcagttaaattgttgacttcaaatttgtttagcttagttgaaattgaaacatagttagcattataattagacttcattcacaattttgacttctgatactttttccttagtatgtcttgctgtttttatggttagacatttaggttgttgtgtttggttggaagcaataaaaacacaggaattgaaatgagaatatgaataggaataggaatgtaatgaaatgaactttttttgtaatgaaataaaatttaaactacataatatgtatagttagtaatttttttctcatcttgtgtaaatggtggaaaaccattcaattagaatggcattgcggaatttaaaatgcaatcaaacataaaaataaaatgaaaattgattctttttcattccattcaatttcattacctcctgtcaaaaggaacctttgtggtgatcatagatgttagaacccttttgcaagattgttatagtggtgatcaaattggccatggaatgaaatctagtttgctgcattaggtgtgaaacaaatactatataataatacaagttccatgttttgtttcatatttataagatgttttcggataagatattgaaatgggatccctttttcttgtttctaaattgctaaggttgttggatcaattgatcaagtggatgttgatgactctgcaaatgctgaaatgaactctggatctgctcttgaacctaaacccaatgcgaattctgacaaagccaaggcaaagcgaaaattatatgtaggatctcaagctttaggatttcgccgggacaatatggaggtcggttttgtattctttttccttctctcgatctctctatatctttacagttaaggataccatgttttgagattgtcacttgttatgaggtctttataaatttttctgctatttacaggtgctgtcacctactaaggatggaattgttgctgattgggatctagttgacagcatatgggaccatgcttttaggtaagtactgattttcaattaatgtcatttagtgtcataattaaggatactttacatgtagaaatgtttggttttgtgattaacttatccaggcagtaaccgttgtctctatgtggttgcttttctttttagggagtgtctactgattgatccgaaagagcacccaatgctacttgcagagccatcatcaaacacccaacttcaaagagaaaggtgattagcgactgtttaaattttcttagctgatttgtctttcatccctttttctctttttaagaggaaagccaaatagtcttttaactttgagctcatgagatatagtatcgggcatgtagtgagtcagtgacttattagattatttagtttctatgttaaggtatatgttgtgtatttgacaggacagcagagctaatgtttgaaaagtacaaagttccggccttgtttttggcaaagaatgctgtatgtctttactccagccatcctttgtctccaattttaaagtactttggtttctttgaaccaatgctttttcattctttggaactaggagtttatgggcactaattggaatttctttttgtgatctaggttttgacatcctttgcgtcaggacgagctacttcattagttgttgataggtaggatatttacatgattttgaccagcattttctcaaagattgaaatcctaatattttgagtcaatcacaatacaattttttctagtggcggtggatcaactacagtcgctccagttcatgatggttatgttcttcaaaaggtatatcctcctacttatggtgtgtgtgtgtgtgtgtgtgtgtgcaatattggagatttactccacggggtttcttttaaatgaataaattagttatgtgtagtaacaatgatgcttcccaatgatttatgcatttttttttggtttctgaataaatttccttttgttttaacaccaggctgtgttatcttctcctattggtggggaatttcttactgattgcttggtgaaaagtttggagagcaaaggtatatcggtaagtgaatacttgaacattttccatgggaagtctgttgtttcttctattgtgcctcataatatattttgtatcatctttttcttgtagattaaacctagatattctttcaagagaaaggaaacacgacctggagaatttcaggtacccctttccttattagaaattaatctttgtcctcagattatgcattgttactctccttcatcttttaatgctcgttttatgtcagctctatttatgtcgaactagcatcccttaatgcattcacgaaacagttttttgtatgtattacctcattgctctttgaattggatattcatgtatcaaaatgttacagatcgttgacctcgatgtaccaaatacaacagaaagctacaggctttattcacaggtctgtggttgatcataatacttcttactatgtcattttactgtcttttttccgtttttttttttgctgagtattctcttttgacagagggtgattgctagtgacatcaaggaatgcgtgtgtcgagcccctgatactccatatgatggtttgtattgttccctactcatttccaatttatctgttggtgatttcctttaatatgattctcattctaaaatcttatattaatatgaaaattaaaacacattgtacatacccattaggcctaagattcatttttctttgcacccaaattgccaaaatagcctgaactcaatattgccgacagtaaaacgacatagttagaagtaattttaaaagatagatatttatatttatatgaaaagtaatttgatagaagtaaagctcttctcccaattattcttgttttctttgtttgaacatttttacaattgcctgcatatatttgttgcttatatgttttacattttccatgtatgaaatattttcatttgaagcttaagaaaatcttaatcatattactgatatcgatatttctgttgccacagaaagtgcatattcaaatattccaatgactccttatgaacttcctgatggccagtgagtattatttaccctcatttgtttatcgaactggtttcgtttcttcttcttcttctt

SEQ ID NO: 16314 - DNA, 1936 bp, Cannabis sativa
cacattacagaatatggtctcccctggtgcaactttagcagaaagaaccatcttaacttttgtgacgcatttaattatcagtggttacatttggtttagatcacaaggacttttaagagaatacgtgtctaaagttagtagaaaggctcttgcacttaatagcagcaggttgtgccactagtgtaaagctcttggaaataaccctgccctccatatccattaaactttgaggaggtggagaggcttagcagggttactgtctccatctagccggtgaagactattgacattttcaagctgacagcataactaatcctgtcgaggtacaaagtcatcttgatttgagggaacagaaccaagtgtaaagcaccacaagaagttgtgagttacaaggaatataaacaatggaaggaacaaggtcagaagctcaagtttttagataaagtaggagcagcagctgcttctcaagtcgcccacaggctcactctggcctagcagacagtaacgtaatgtactgtcgtaacaacaatttgcagttgcgtttcatgaatgtgaatccatcacatccttaaataccaacaagaaatattcaaatagctgattgctaatgttctaaagagttccaaaggttgatcttgcaactcactctactcagccccaatgcatgaaatgactaaaatgagacaatactgaccttttgcatcaaagagaaaagcttcaagtcacttctagggactccataggccaaatatgcctgccaaaatcaattagaaagaactaatatatagtttaattcttcaatccttattatctacattgtgctgcaaaggaatttaaaaataaatcaaatgaagaaacttacatgcattatcagtgcattatataagttaatccagaaagccagcctctgattgcagttcagatgtatagggttcacttttgcaagttgctcaacaagtattctgttctcccaatacaaaacaaaaacaaaaacagtaatcatcacatgattcatgtctacagtctacaactctcataagaaaataagtttccgagtttgcaaagaagccacgaacaagaaatgaccaagtagagttttacctgaatttccgcagtgcccctgcagcatactctaattgctttttcccaactgacatccaagaaacttcagtggccaacccatagtttccaatgtcggcccaacttaattttccacgaactctatagggatcacacacattctcaaaggccagcacttcagagttactttgtacgtcaacctgagggctgtgcacccatgatgaaatcatagaccgttcagacgaccaccacgaagaattggaaagatgcccacgtggagacaaagatgatgagttgttctctagtgcatctgatggtggtgttatagcagaatctgccaaagacatgaatatattcttcatacatttaaccatctcttccgaaagtcgattaggattatcccagaggcccttgggaggcatccccttgggaagcttaatgaaatctgtagatctacaagattcagaagatctacaagattcttggtccatcttaatggatgtttctgtgtcattgcaagtttcaaccgagtcctctgcattctgacacaattattatacaaccgattgtcaactctaagacacaaactcatactaatatctaatgattaagagatgggaaggagagaaaacggcagaagataagcaaaacatgtacaagaaaacttttacatcttcaacagccagaagaaagaagaaaaaatagatatattgcaatatcgttcagaagaacttttgccaccaaatattttcttttaagagcaaagcgaagattaacatctaaaaacacaaaagaatttaatctctagaaaagaaacacatttccatatttaactatacagtacaaaagaacaaca

SEQ ID NO: 16315 - DNA, 2203 bp, Cannabis sativa
aaaaaaaaaaaaatagctaaagtgtaaaaatgggactccaattgatgatgtataatttaactataatagctaagttcttggttcaaaaaaaattgtagctacatttagctaaggagagagagagtaacctaaacactatttaactatttttgtagggtaaattgcggcataaatacttaatgtttcaaattttatacacttaaatatcttatctttatttttggaggtaaaaatacctaatgttacgattctcttacatctgttactaccacatccgttaactcataaatacagacacgtgaagggcctatatgcattttatttatttattttattttaaaatttagttttcgatattaagaatattatgttttaaaataaaaaaaaatgtaatgcgtctggatcctccacatatccatatttatgagttaacagaagtggtaataacaggtgtaagagaattgtaacatagggtatttttttgcctccaaaaataaaaataaagtatttaagtgtataaaacctgaaacattagatatttatgctgcaatttactctttttttatattttttatttgttttctctttcttttttcttaaagttattatttttgcattccttattatttttgtattatttaatatatatcatttaaatgatgttcaagaaatatataaaagctaatatgtatgatcatgtaatgtagatgtatgaggtaaaatgaaaaaagtagagttatcatgaaatattttaaataataaagtaaaaaaattattgagagttagagtactcttaacacttttttgtttctttccatttttcaattatgggattccatgttttatctattttattattttagtgaacaattaacgtgcatttcatgaaaatatctctatgagtcaacgtacgttaatactataatttttattatatttcacaaatcatataaaaacaattttaagtacaatttttattaaatttgttttcaataaaaccgaaaattaatattttagttgcatgatatatattacaacaatcaaattttaagattaattttctaacaattaaatttcttaaaaaaaaaacttaaaaaaaaataattttgatgaattattattctaaattaaaaattattatttcaatcaactaaaatttaagaacagaaaacaaaacaaattgtactttttataaatacaactaaatgatagaaatataaactgggtaatgtataaaatttttagaactatatttgtcacggcttatgtatctatttatgtttatgaaattttaatattttataaaaagtaaaataattttataaaaaaaggtaaataccattttggatcctgtattttgtaaaaattattaatttgaccatatattttgttaaatgacaaaataaactctgtattttctaaaatgttacaaataggatcctaaattatttttttgtcaaaataaaatttaataataatttgatctaaatgtgttatgacaaactgtttatatttttttatatcggttcgtgttaagaattatattcaagttagttatattaagaaaaaaaattgtctaaaattaagttcagtgtctttttaccattttagaaaatacaagatttattttgtcatcattttacaaaatagaaaattcaatcgataacttttgtaaaaatacaaaatctaaaatggtatttaccttaaataaaaaaaaatgaatgattgattgattaatatattaattaaaaatagattagctagtgtcacataacacgtgattaatatcaaagtcaatgttaaaatgtaaagccaaaccaacgtgttttagtcgtgtcccttctttttctcctctcaagtctcaccattaattaaccattttttttatctttaagataatctcaatactcaatagacgagtaatcattactcattattatttgtgaaatttcatgattttaaagacttgtaggctgagattttaagtaaatattaacgagggtaagagtatgaaaaattttattaaaatttactttgaaaaagaagaatatttttcagtttttagtagtacgaatttattgtgactagtaggaaaaaatattccaagataggttcgggacaaacaacatccaatccgcactaagtgcggatttcatattttggatccaatccgatccgcataagagtttaaatccaatccaat

SEQ ID NO: 16316 - DNA, 8385 bp, Cannabis sativa
  modified_base (1390)..(1390): a, c, t, g, unknown or other
  modified_base (8321)..(8324): a, c, t, g, unknown or other
aaaagacaaaaattgattgaataaaaaaaaagtttggccacaaaagcgcctcaggaaagtaatactaataaggagacattataacagacaaaggaagagtgatgatgtggatttctagtcttagtcctatatgtcaaaagaaaacaaagtatcaatgacttctgcatcaattatttctatccaaacaaaaagaagagtttcctcattcaatggattccctatttctttattaatttttatattttcattaccaaatgatattaaatatcccttgtcatgcaattgcagggaatctgacttaatttctctctctcttttaaaatacgacaagtttcacttattgaaactgacccagtgtttttaatgattacaatatccttcaaactaaaacttaacgtgagcagttggtcaacaaagaaaagactgtgaaagatcgagcgataattcatcacagtttttccatttggtgtaaatggacctgtctagtttataaaaccctttaaagattctttctcctctctccaaattagccaagctttggttatgagtaatgatcatgtatctataatagtgatcagttaaaaaattgtgatttaatttaattttgtgtatactttaagagtggccattgatacgatgcagtacatgcaaaagagataaaagctttttattatttggagaaaagaaattaaaattataatgattttctttggtaattaatatacttttcttttcagtcgcactttatctctttatattgtttacaatttgtaagggtaattttgtttgtgctcaattcgtacgtacgtagtcagttgcagggatatatgtttcataaagtgaaacgacaaaaaccaaagatagaaacgttgaacaagagaattgttgtaagtgacactcaaaaaagtgagcaagttcattctttatctctttagaaaatatgggtacgtgcctcttacgtgtttttggactgataatatatatatagagttgcccataacttcatccataaaggaggaacagtactaagctagattttgataaggagtataattgtagtataaaactgcattgtattacatagttcatagaatttttccaatatagtccaacaagtcttttttttttaattattttatattgaaggagaagatagtcattcaacaaagactaattattacagagaggaaggcaagtccaagacaaggactcccaacatagggtacaataagctttaatatctacaacatacttagcgatacaaagagtgaaggttcacatctctacgctccaaacaaaaataatgagttcctaagctcgaaacaagcctttgtttaattaattcccaagtttgacttatattaaaactataaaaaaagaaaaaaaaaanaaaaaaaaaaaaaaaaagatcagtttgaaattgaaaccccagccccccaaaaattctaaagaaactaataaaagaggtgcaaacttggtacaatatccctgaaacagtgaaacttaaagtaagaatgtgttgttggtcaataaagaaaagattacagttttcttttttcgctgcagaatctaaatctctaaaaagacgacagctataacaaaaaaaaaaattactatgatcgagtagacagtattactctgtcccaaactatttcacttcacatcatataattatgttatggtgctatgtactacactactacctactctcttgggtctttctcttctactatctaggacaacaccatctcctgaaactaaaggaaacaaacttgtaatttttgttgttttaacaacgtatttgtcaaacctgacacaatattaaattgttttgtattatattggattgggttgagttatattatattgttacgtattactttaatataatagtatgttaattggtattgggttgtattaacatggggtcttttcgtacaatgtgttatattgtattttattgaatagtatttgcattagtattagtattttttaatataataatatgtttggtattgatttgtattaataaattgtgtaaaattatgctaactttaccataaactcgaccccaaccttagaatggacccatcttcggcctcaggctacaaacctcaacctcgaccctgacccagacccgaacccagacccctttcccatacttgggccttgacccaaacttgggtctagggtctaagtcggggtttgggctttgggcttcgggcctggaactgaggttgggtttgggttcgagatttgtgggtcgaggcagggtttaggtttagtttggaggcaggtctgagtttggggtgtgcattcgggcctaaggccgggtcagggtccgggatctaggtccagggtccggctcggggtttgggttgaggtctagggttgggttcgagtccccaacactggatattttttaaatattataatacaagctaatacaaatcatttgtcatgcatcaaataataaggttcgcattgtattaaaatttatggtcgtaataattactacaatacaaagttctatcaaaacatagtgttacttgttatttaatacaatacgacctttatacgacctaccaaactagcccacaggggcggagctatatacaagctcacaggggcagtggccccccctgatttttttttaaatatatatgtattgtatatgtttagtaaattgtgtttagtaaggcttttcataagtaataattgtaggtattaacttattaatcaacatcatattcatatctatatttatatttaaatatatatttagagtaattttataaattaaaataaattattaaatgtataattatattatactatctttatttatagtatttatttaatatataagttagcttaacatatcttaatttattattaagagttcaaaaataagaatattcataaattactactagtggatatatatatatatatggaacactttttaatgagtatatctatatattagttacttaattaaaaaaagtgtcaaaatgtaggggcttttttatttttacatttcaaaacagtttttttttttcattttttttacagaattatacatagaaattcctattgcagctagcgaatcaacctaaaatattaatatatataaatatgatatttttttttcaattgaggcaccacttaaaaaaaattaccaaaaattcacattgttgcatacaacatttaatattggcccccctacaattttattctgtctccgcccctgccagcccttattgtgttaaattatacaatatttagttcacaataatgttgtattgtattgtattgtattaattaagtttccttaaaaaaaaatttaaaaaaataaaatatatctgcattcaaattatgtcatatgtgatttccatcccaacctcaatttcaaaccgatttcaatctcaaccttactacaatatttatctatcagttgttgaaatattaaatttgatttaatataaataatttctaaatttttcttgttgttatactagagttttcttacaattgctaaagtttttagagtcttcaaatatttagtaaaattcctttaaaaatcttgaatttctagaaatatttctttctagttagtaatagggatgacctagattacactagtagttagtcttttagttatgtttttaaaataatccataagtcctataaatagaggtgtctccccaccattttataccaagttaaaaattacacaagttgagttataaaatatagcctcttccaatgtagtattctctcctacccttttatttcctaacaaagtggtactagagtcaagtttgtgaagaaaaataagaaatggaggaataatcccctttcaagttccaatgctcaccaaaagcaactatggcaattagagtgttacgatgaaaatgctctagtagaagcataagatgagtgggatattgttgaaaaggctcataaggagcaagatgatgtgctcttttcatgccttgagggattcaagaaatagagacaagaaagctctctatctcatctatcaagtgttggatgaagatgcatacgagaagatcttattaggactttattagtactatatttgggtaggtttttaaagtgtttttttttaatagttttaaatgtgttttgtgcaattttacaatttttgttgataatattttgcagctttagtattgaagaaaaatatagcaatatcgagaaaaatgtgtaaacaggtcattgaaataaagtcttgctgctagagcaccatgaaatccatctaagaaagaaatccaaaagatttggtgcatttggagctttttatgcaaaggcattgaaaaatatagagtagcgcctcaacacaagaattcaatatcatggtgttaaaaggatgaaattcggcagcaaggtcagtttttaacaagtctataggcgcgcctcaacattggggttcaatgttgaggcgttgaaaccttaatcgctctctacctgaaaaacagcttcaagggccgcaacactggcttgtattttcgcgacccgtatgggaaaaattgcaaagggaatgcttgcctagaagacatgggccgccacactacatttgtagtgtcgcggcccgcctatcagaattttgaaaaatagatattttctatcttttttttagctatataaagaggtcttcttcaatattttttggcaagtaattagagaggacgaaattaaagaacagaagcaacctagagactttctaataacgttttttcgatggtttcttttcttctactttctgcttatgttcttatttaatttgtgtcaatcgcttacaataaacatgagtagctagacttttatttagggtattaatagagattatttgacatcttattatggttttaatataatttaatttttctcctaattttttatgtgcatctattttattccttcttaattttttttaattgtctgtctattaattaattatttataatttcgatacaaaatttgaaaagtgggtgtcaattatgttatagtgaaatagggacaaattttgacataggacgagagtatctatgtggtttggatagaatttaaagtttctttacttaatgcctcttatatgtttaaatttatcacgagagtagaaaattttcatataggttgagacttatatatcctagtccaaatataagttattttagtaaacccgctattgcatagaaattaatatttgagaataaagtatattaagccatataagatagatacaattgaagttaatcaccctaaactctaattattgttaattttcattctaaattaattgtttttatttgctttagattataatattcttccttaaatttttattgccaaatagtataaagaatttcattattagtacttaattataatcttcgagggaatgatagtactctacttaacattatattacttgaaattgatatgtatacttgcataaaaaaattcataacatattttcggcgccggtgtcggggattgttttagttaatattaaaataattaaattttattctaatttggtattctatgcaactttttactaactctattcgtgtcattttttctcttttctcaagaatacatagtttgtgtgacgtcaaggaccaaccgtaagagtgcttgttgatcttgaaatacagaaaacttgtcgacaaaatagacaaaacaagaggttagaaaaaactgctactaaagaggttcagttaaaaaaaagatatggctcaaaacggtaatgggggcaattgactaggctaatattcaaaatttgcctaatagaagccttcgggagtatgtgctacgtaccaacaatgacaagggtccagtcttgtatcaaacaacccgttgtcgatgctaaaatttttgaaattaagccagctattctttagatggttcaatcttacatcgcctggggaaggtcaattttataattaatgtatattttatagtttcatttatatttatataattttttaacaatattttacagatgatgaataaaaaaattattaacatcattaaaactaatatttacttataatactcaaatttctatatcacatcctatacataaattaatatataatcttaattttttataatatataatcttaacttattataataattttaattataatatcttaacttctatgtaatttttatcttattattattaataataaattataagattttttaatatgtcgtttcgtatttttcgagcttattgcgtgtcgtgccttttaggttagtttatttgtacttacgtgtcgtatctttcatgttttttgtgtcgtgtcgtgcttaaagatatatttttcgtaccatgtcatgctaatttgtagcatcataccatatcatgctcaaatcgtacttttttgtgcctaatcgtactcgtaccttccggactcgtgtcaaaaaatcggcctataattacaacactaagtaaaagactaaccccaaaatagtaaaaaataataataaataataaagatatgagtgcttatatttacaccccaataaattataaatacactccattttatttatttgactaatattttttataatcacacctctttgtatttactataggacttctcttaaaaggaaaattaatacaccccatctaataactgtacaattaacttccttgtaatttttttttttttcagttgcgattttttttttttttttttgatctcttcttctttatttttattctttttaataaccattattttttaggagatcaaaatatgcaggcatatacatctaagaaagttttcttttataattattattaacaatcaatcaatatttccatatacataacaataaccaaaaattaaatgattaaaataatgaaatcttacatacattaattaattaaacatataattttttatgcgtatattaaatgttcttgattgatgaaacttcaattatttttttctattaatgaatttttcttagaacttgaagaagttaattttaattttataagcaaatggggtgtaaatattattataaagttaaaataggctcataatttaaaattgtatatattggtaattttgtacaaggataaaaatataattaaaatttttatttaaaatggggtgtatttataatttattagggtgcaaatataatttccctaaatatatatacctatagcctacacacacgattttaatagcaattttcaatgcaaaaaataaatctttttttttttcattcaacaagataaaaatattgcccttccaaaagcacaaaacccaatatatggcattttaaaaacacttttactttaatatggcatatctactaatcatataaacagcccaaaaacaaaaaaagataccataaaaataaaaaatagcccaagtaaaaattgctatatttaagtaaaatattttgaaaaagtcatattaagtgtaaattctactataaacttgttgtgttatcaggcaatttagtgactaattttgtgaaagtctcattcacataaaaaaaattttaacttttttttttttttaagttttcaataaataggatttctttttgaatgaatagaattttcaccctagctatgcctcttaaagagttttacctcataaactttttttgttttaattagaaaaaaaaaaaatattgcaaatagcatttttttattgactaaataatttagggatatttacatgaaaaaaataaagctagtttacatggtgagaaaacttaataaaaaaagtatagcatttaaaataaaaatttaacatgtatgagatatactattttgaattaccataaaaaatattaaaattctcttcatatatcttttttttttgcaaaaataaaataaatgaaactacagtgattgctagagttgtcattagggctagaaagtcgccggagtttgctatcgatagaattaataacagcgccggcagctactccggcgacttttccgacaccgacagaaaactccagcgactttttgaccccagtgacaactccgacgatcactgtaatttcatttgctttatttttttacaaaaaaaaaaatataaagagaattttaatattttttatggtaattcaaagtggcatattctatatatgttaagtttttattttaaatgtcatatttttcctattaagttttctcaccatatttatgtaaattagctttattttttgggataattacattactcaccttaaattgaatcttaatatcaaaaataacttaggtggcgtttggttggagnnnntgaaatagaatggaatggaaatgaaacaatttttattccattcctttatttggttgcattt

SEQ ID NO: 16317 - DNA, 8003 bp, Cannabis sativa
tgtaaatgaatatttaaaaccaagagggatgaaaatggtaatgtggtgagatataagacacgtcttctatattctattttcatcttaaaacttggcagtaacttttatctcgaaaccaattggctatgacaggaataactcatagatcttatatattttatttttttttccacgcattaacaatgggagactctgtaacactaaaagttaaaaaccaaccttcccaaaagtgaaagctccttgtgttgcactagctacatgttccatactatgggtctttaactccaacctgcctaaaagtgaaagctctatagctatagcaataatttggctatttatttgcctatctcagcaataaaaatggattgtaaaattttcaaagataggttgtagagtgggttattaaataattacccttaagtgatgtttttgctataagagaggaggtaaacaccttgtacctctcaaaaaattaaatttttttagctaaagtgtaaaaatgggacatcaatagatgatggataatttagctaagctcttggttcaaaaaaaaaaaaaaaatgtagctacatttagctcagagcactcacaacaagtgagtcataatagctaaaagctaaaaacttagaattaagctcgagcctcccaacagtttctctactctatactttaaaatatctcatcaaaatactattttctttattttacctcacacatttactgtacacaatacataagctttttttttttaattttttttttaatatttttctctatatcatttaaatattatatatttatatatgttttattaattaaaacaaaaaaattgaaaaatgagtaaaaaaaataataaaatattaattaactgaatgaagagagaaagaaaaaaatataaaatatgttttaccttttcactattcatgagctaaatgtagggaaatttttcttgaagtttgggatgaggcataatttaaagcatttgttggagctcaattttaagcttttagctattataactcatttgttgtgaggctctaacaaatgctttaaactcttagctattatacctcatcctaaattggaagaaatttttctctacatttagttcatgaatagtgaagaggtaaaacatgttttatattttttttctttctctctttgatccaattaattaatttttttattattctttttactcatttttatatatatatttttttgtttaaattaataaaatatatgtaaaaatataatacttaaatgatatagagagaaatattgagaagttgatgtatggtgtaatgtaaatgtatgaggtaaaataaaaaataaaatagagttttggtgaggaattttaaagaatagagtaaaaaagttgttgggagtgctctatgaagtgagagagtgaactaaacactgtttagctattctttttatatttatttaattgttttctctttccttttcttaaagttattatttttgtattctttattatatttttattgttatttaattgataaaattatttcaaaatatattatttaaatgatgtggatgaattatagagaatttagtatatgatataaaataaatgtgtgaggtgaaataaaaagaaataaaattttaataaggtattttaaaaaatagaataaagaaactgttgggatttctgttagtagttcacattattttacagtcctaatgtttgcctttcttatatacctaaggaagcaaataaacttgctcataatatcgccaaagagctttacctagaaaataaattatcatggaatgaaatggttctttacgttgtctttaatttgtaatgaagtttatgcaatcaatgtttcaataagaatccatgagcatcctcacttcaatatttgaattatcactaaaatctaatatttgaattttatcacttaaatatgttatttatttagtaaaagatgtattaactaatattagcccaacaaaaatagtagtacttacagtgactgtgatggttcattttttgaagtaagaaatgaaacccaataacgaccaatgctatttccgtttacccaagcttcaccttttcccattgaactaaggtttaaagcaagtggatcatttccctttggtgaatcaaatacaacctgcccaaattatcatttttagtttaatgagttttttacaacaagataattaattctcgagtattaaattatcttgtactttaacttaaactaccttataccaagtgagtgtggtatgattggaggggtcttcatatttattccattcaacattattcaaattttgttctttatatatttccaacttctccccaagtaatccgacctataatgagttggaaagatttatgtcagtttttccatcacattatatttaaaaagataacaaaacaaacattagatgtttgtaaagtgcatgtttcaaaaataaaatacttaaatggttgtaattgtaagaatagttgtggctacctgatatccccattcgtaatttgtaaagttgtaagattcatttccaaatttgctataaatttctacattagttaatccagcaaatctcttctctaggaaagccccagaatccttagcaaaaaaaaaaaacaagagtaagaattttttttttttttcatataaaaatatcatgaaatgattagataaataatatatttaaagtttaaatccacattataaagactattaccggaagtccaaccataacactgaggaaagaaatattatttattccaccattaagaataagaggagtctccaagatgaaattattgtaacttttatttccgtgtgcatttcctgtgaatggaaaaaagaattcttatttttttatatccaatagataatttttattttagaaaaattacataaattgttatttttgaattttttttagtttaaaattttttttatttatatttttactgtattctataaaaatataaaaaaaacaagaaaattatatgaaagtaaaaataaaacaacaacaaaataacatcataaacataaacataaaaaataaaatataaataacaaaaaatcaacaacaaaataacataagtataacataaaaatatatcaataagtcgtattttatgtaattaaaatcttaaaaacatttaatattttatacgatcgtatttgtatttttttttgttgtttttatatttttatgaaactatctcttttattattttctaatcatgtgaaaaatgaaataaataataatggcataaaaagaggatttaggttattacaatattaatagtactagaagtgaaacaaggttctatcaaaattattatatgtatatgctgcttgtgaatatagaactatttttagtagaatataacaattaaacttagaaaaaatatcataaatatgtgatgctcccgtattgtgataatttgaatattgtgtttacaaaatggatcaaattaacattttagggctcaattctagtcaaacaattttcattttaataaattagtatcgtttggtcaattctttagttttgactttagatctaggccaataataattttatctttaatcatccctcctttacttcaactacactgattgtcgtggatacattagaagcaggggcggccctaggcataggcgggctaggcccgtgcctagggcccactcattttgggagcccaaaataaaaatataaaaaagtttattagacttttattaaaataaaattaagtgtattgtaaacaacaaatagttatagtttagttagttgaagtgtatgatacattatataatgtcatgggtttgaattttataatactctttttaatttttttcttatataaatttctggggaccccaaaatttaattcgccttaggcccatatattcttaaggccggccttgactagaagttattttgacatgagaaattgagtgggccctcaagggtttggagtggacccatcgaccatccccctgctggtggtcccaccaccggctgcaacaagagacaaacccaagaaggttccaaaaaattgtgatgatcgctcaacaaaaaaaaaaatatattatataaagtgtgggactcacaagagttcttaaaatttaattttcttttattcctctctctctctctgcttctttctttctttctatctcatccaagaatccaccataaccaccaacggcggagcttcaatgaccattgaattctctaactagcagcaaatctactcctcaagcggcataacctcactcgccaccattggcaagagatcgtgagctaaagtttcaaactttaaatgtattttctagccaactctattatccatttgacgagccatcttcactactaaactcatctcactgagggggaaaaatctccactaagccattccatctagttcactacgttttctagtgaaatttttggtagctccacccttttaaaagtattttttggcaaggctagtgtttgtttgaaaaaaaaagttgtacattcgtgatctactcgagaggatggttgttttgatatatgctatgtcaatatttgtcaccgttcttgaaacactatttttggttactggaaagcaccactgtgcatgactaaggtaagatctttgctcatgtttgaatagcatcatgttttatatcgttggactcagtttgaagagtgcattacactaattattattatttattcaattgaagagtgtagaaaaaagtgacttttatagtgacttagctatttagagcttaagaattgaaggtttaccaacgtctcttttgaagaaagtttgatgatcctaaggaggtagagactcaacaagattattgagctctattttatatgtgatgaataacagtatacatattctaatatttatgatttataaaatatgtagacttgaaaactcatagagtgccaaatatatttttgtaaaattatttataaaagttatgctgtcagattttctaaaacaaaagaaaatatgttcttttattattcttgtttgcctgattttggttataatattgagagccatgctgatcttgatttatgcatattgtgttcacggtctagtctctatgtcatcataagcagattaggtgtgcacttacttgtagatgtaagacctaggacctatacatgaagtgaattatttgagtccttatattatggtagttattaggtgcaactatgtatgtggttttggatgtcattttctatgatgagtattgggagctaaggatctagtggatgatgtgatatgcacgagtaacttgtctcttgtgattatttgtggtctttttatatattttttttttatattgatgatatgttttaatttaaaagctaactacgtagatatttttatcaaacttttggtcctttaatattagttatttttctacttggctttataagctcaatcccttatattttcccttctagaaactcaatttggtacttgtggatgtgaggaaatcgttgatggagaatgatgagattaacttagtcttatatatcttagttattggactcttcatttaaagattgttaatgtatctaactttgaatggatgcatgtattatttaaataactatgtaatagttagaaataaggagtatgataaatgctaagtattttttaatttattaaatctaactatttagtaactacatatctgaagatattatagttctatatataatgatgaatgatcctactttaccactaatattttctattagtttatataagttattctattattttaaatttgtattttatataattttataatatacattaaatgattattttgtaagcattatttttcaacaaggaccaacgtatgtatattacatatttgccacaatctagggctcgagttgtaacgcaaatagtgggaattgtcgattttctttgagagaacctccataggggatccctcttgggattttatgccttaaataaactcatttcactataatcttatttactaattaataaaagatcaaaaatcgtgttatgttatttggttcacatgttacttttatgattatatgtttaatatataaattctgttaaatcccaaacatattgtgattatagtgttacctacacggtggaaaataatcatgattatatgcttcaaaatcatttagttcaatgatttatcagtatattagatttacactgacgtgataatcaacgatgtggtttacttacactttataagtggaatgtcctttctaggatattatcaaagtaaacttgtatcaggtgtacatcggattgtaccgacattgacaatagaaaattaagatattataaacttatcgtcatgtcttttctaagtcgatgtcacttagttgatcttaggtcaattgatttcaatcttgagatgattaggttctagcttaattgtgctgtacaggttctttgacttgtttgttaccagcttacccataggactagcccatacttatatcttgggaattcgatagtgcaattgagataaagcattaatcatagatatagaatctataatttttataactacttagaattgaagtaattgtttccttaaagcttaaataaaatggtattaatggaatagatcttatttcggtaagtatattactttactaaaatatcatttataagtagacaaatgttttaaggaaaaaatacatcgaagggttaaacaataaatttgtccatactcgatataaaccgtctatagatgattattaattatttagattgaaataatagataattcataagcgtatctatatttagtatatagagcgtatatgtaatcaagagtgcaattctaaatctatagtggagtcaagatgaattaacaagtcaaaaatttattcataaatttcgaaaattgtttattgggagcttagttacataggtccatggtccccacagtatttgggataatatttccttgtacacctaattaactgatttattaaatcaattagaattctaaagaagattatgtcttatttatgaatttcactaagcaagggcatatttgataagaaaagagttgtaagagtttatttattaattaaggcactttgtgggtctaattaataaatatatttaaatagtaattttgtttgataatcatttataattattaaatagataaaattaacatttaaataaataaaacagaaaaaatagtattttttattttttttctctcctagtttcttgcagctctcgcgagctggtgccatggcaaaaacaagatcacgagttcagggaaaactgaaagtttctgcgaaaaagaagaaaaaaggccctaattctacagctgatgtgaaaaaaaactaaatctatggaggaaattctcggtgttgatcctcttgagttcacagatgatgatggatattttgagcatggtgaggcatctggcttacgaggtgtgctctaggaatctctatcaccaaagtcctcactagaaatagcaacaagaaggtatcaggtctgattttaatttctttctggtagctaatcaaaattgctctaatttgttgtgaaagggtctgcaaactactcctccagttcttaaatctggaaatgtggtgaggaacctgtaatcttcttttggaaactcaaaaaaggataacaaaatcaaaatcatcgtggaggatattaaagaggaaatctccttttggaattcttctttagtggctatgttcttggggctaatccccctctctgtgtgctcgaaggctttgtaaggtgtttatgaaaagagaaggtggataaagtaggtatgttttcctatggaatcttcttgatttgattcaatagtattgaggatagagatgaaatactcaatggtggattcatctgttggggatattttaccaggatctagatttattaacaagtatgttgaattagcatcctaaatatgaatatctctaaaacaatgaaa

SEQ ID NO: 16318 - DNA, 3868 bp, Cannabis sativa
  modified_base (39)..(46): a, c, t, g, unknown or other
attaggtatttttgtctccaaaaataaacattaggtatnnnnnnnnataaaatctgaaacattaggtatttatgccgcaatttacctaaaaaaagacaatataaataataaatagtgtaaagaagttatttctctaccatttttaaaatgagaacatttaattatataatgctataatttaaggacatttgttataattttcctttcatttttgacataaatacaagtatgaaatatcaagtttcccttttctaatctcacaactttgtataaagactatcaatttgttatttgacttgtgcttgagagagttggcctcatcccatgcactaaacaatactgaatgaaatatcaaatggagtagtatattaccaaacatatggagctaaacaattataaaatttttgtatgcacttaattttattgctctttactaatttataacatctcgacggtttcgtggttggccgaattggtggcgaacatcatacactatattaaatatgttattattattattattattattacttttcagaaaaaatacatataatcatgaatttttcatataatattaatatttgattgatgattattttgcctttcaatctcactttaaaatttaaatgtctttttattttgtccgctttcctcaccaaattcaatatcatttgttgtaattgaaattgttgtagtgaataatatagggtggtgttttgggggttttcttctaaaaaaaaaaaaattaaaaagagaagaagaagaaattgttgtaatgaacaaatcgtcaaactcgaaatattgaattttatataaataattctcaccacatctacatgttatttgctaattaaataatatggtcatacccatatggccatatacatacaatatacagggagagaatacataggaataagtttctttagagcttaagtggtcagaacttagaaatggcaaaaagacatgataacgagcttatcaaagaacaagtattatgccaaattaatttagacatgaacgtgactaggcatcttttggcatgtccaatatggattctgaattccagatttcttggctatcaagtgaatcctcattcccttgtgaaaaatcaaggtttgtgtaagtacgaatcccaccgagcccatgtcctccgcaatctctttccctgccttgttgtgcccttcttacctccttctgatgctcagttaactctaatctcttccttttcaaatttaaagatggcatgttcttctcattatttttcttagggtccacattaccctgtaatagttctatcctcttggaatacatgttatgagtggcaatcgccctgtatttttctggagcagtgtctactgctccaactcgagaatcacattgctcaacaaatgcttgacttttcttgtggagatttacttttccgtttcgggatagtttgtctaggacatggagcaagttttgagggtaatgcaacttaatttgatcaccatatgttgaattccaaaagccgattgttggatccgatatggatggattagaatgatcaagagttttttcaaggagaggtgattggagtttaaggaatgcagaatcaaaaattagtggtggctgactcctctgtaggcatttcagggtttctgaccataagacttgaaattgatcattggtgctttcatcttgcatctctatttctgccagccattggagcaatggaacggagattatctgaaagaaataaatttgaaacaaaatcataaaaagataaaagtcttaaattggaaagatttatgaatgaaaaagaaaaatagttatcaaaattgtgtgaagtgatattagcatagtttcttctatcaaaaagacttgtggggagcatcatacatagcatacgacgaaaactaacctcaaccaatgaaagaacatcttgtttcaagtgaatacaactaataaagtgcgccaatgcagagtatatcctgtaaatttccaccgtaagggggttgtcaatgtgagattagaatgaattattacaaaaaaatgatggtaacaaaaagctaatctagcttacctcgagatcataacaggaataattggtggggcttttcctacctttgtctgcaaaaacatcataaatctgtacaacagtatatgaaccatgataagtgacaatacaaagaaatttaagaaataaaatatgcagaacactatactattactagctctcataatgaatgaatcaagagaacagttacgtaatgtaactgtcactaacagcagtaattcaggtaaaatcaaaaaataataaataaattaattatatttatgttcactgtaacgattaatgaggtctgagtctagtagtccacaattataaataggaaccaaattaataacattaattcggtggaaacaatttactgataatctttagagtaacaattaaaatgagacataaaactacaaaaggaaaaataaataatttaggcagactagcaatttcagtaatacacgagacttgagacttcccgtgcctttatacttgtttaaaaaatgaactaatcatgtattcctacatcagaatttcatgaaacctaaaaaatttatagaggtaaactactcatgattaggcaagagaaaatattagagcttgatgcagaccattacagccaagctcagcagcctaaccaaatgttgcaaaatatacttgaattttacaatattgtaggactaaaacctacattcagcacagctgcaatcctcaaataataatttaaaaatgaaaaaagacttgaacttacctaatagccattgtcaacaaactgtttatgccacttaatttcttgtgatgcctgctacatccatctttttcatttggaatcaattctgaaggttggaaactttcaagaatacaagtcatggcaccagcatagaaggagaccaggtcaatatccaaatccatgtggcacgattcaacatcattaccagactcaaatatgctattgtaattgttaagcatctcctctattgtgtcacaaagatcctcaggaaatttgttagctttgaaacactccaattgcgaggtacgaagagagccatagagtgacttccaaactccaacagcttgttccaactctagcttattctgtggtgcaacaagagactcttccagtgagccactaatctttgctgacataaaatctttctggtagcaatagcatatgatgaatgggtaggataacagactacatgtggaaaagtatgcattgttgtactccacgttaaataaggatggattttccacatcacatatgcagtctttaagactttccgctattgctgtccacatccttaggcagcttgggcctttgtgcttgtacaataagtcaatagtaatgacaaaattgtcctgtggttcgtaagatgataaaataattttaaaatacttctgcattgcctgctgaaaaaatttggcattggaagtgtttaaatctgatttagccacgacacagaagtacagtacagttaaataaactgccggtgaaaccatatccatataagttagagagcacatccctgaagcttttgcatgtctacttttatcaacatcagcaatgctctggctttcaatatacttgagatctaatggtaccttgtaaagaggagaacccaacacagacggctttatttcttcaagaacaatctctatgagctgaagggaaataatttgaaagtcatttttgtcactgccatcagaattttcgtcatataagtacttcataaaccttaatattgtgttcaaagacagcaaaatatcatcataagtagtggatgcttttttgaaatctatttggactcctttcacaacagatct

SEQ ID NO: 16319 - DNA, 7328 bp, Cannabis sativa
gattgtcatgattttaatatgtggataccataaggacaatttatagtttaatgaggggccaaattagaaatagtcaaaaagaattaattgttgttttttcagttattaataaacaggtattggtccccatttttgcatcgcttcatatcgtattattttctcttgtatccctatcaccaggagactaaggtttcagagaaaaaaaatctttgatgcaaaaattaaaagatcatactattcaaaagacgattcaatggactccggtacgctttcgctattccttaattctattgttgattctcatgaattaattagggctaaattcaaatttttagttgtaacagaacgtcgataaaatttgataattgttgggattcaattgataagagcaaactccaaagtagtcagcaattgatatgaaccaagggtgaaaaggtaagaatgcacttgcattcatataaaatctcagccaagcactacaacaagggtttcgaaaagtagtgggacatccaattctcggtttcttcccccctttttcaagcaaggagtactcgtatctgatcaactgaacttggtgttcagtaatagtgctgaaaataagaggcttaagaacaaagccatggtctcttgggttctcactattggtggcagcagtcggtaagtcaattgttatcacttttccactgcatgccttgtctaagttcttggacatggcatcgtaagctgtacacggatatattgggcaatatgagggtcatactattactcatcatgatttcttatagttctcttcatatgaggcatttttgttctcaacttaagtcgctcaacttggactagctgaatcaatttagctcaaaactgctcccttcatctcagttgaagatatgctaagacaaaactagttggactgcaccttatcggaaagttagtccttagcttaacgactcacatgaaaatcgtatttttggttttcggaggtcttaacaatggagttcaaggattcccaaccagatttaatggaatttttacaaaaatactagattttaagtaaaagtttataattttactagcacacaaaatcttttataaaaatagtattttttttataaaacaaccgtaaaatactaaatagaacaattaaaaataatactgaaacaaccaaaaataataatggaaacaacatatgaaacttaacacagtacatattataataaatatataatatttttgaaaaaaattagaaaaaaaaaaattgatgaagtaaaaatctcttacttaatttaagtacaaaaggccaatgggccacaacatttgatgggcttgattaaggatgataatggggtcggcccagttcagttcctttactcagtagtcattacccctttcggttctttcagttctgttcatttcatcctttgccaatggcacacacccaaagagattctttcatggattctttcgctgctgcctctgctaatctactggtacgattctttccttcttccgctacttcgattctcttatatgaatatgtatcagtatgcataatatatatatgtataaaatatatacaaattgcacatgcaaattgcaattgtttgagccaaaatgggcatattcttttataaagttgtgtaatttgtattgaatctgtattttatgattgcatttgatgaactgatgatgcaaattgtaatgcggtttctatatatattaggggatttgattgatgaaatctggaaagtggttcttgtatgcatcaggttggagaacagctttaacttctatagttgacaccagcataatacttatttatatatttatattaagatatggctgagagtacagctgcaagtattactgaccagaaggcaaaagggaaactgactgtatatatttgggatatggatgagacacttatacttcttaagtctttgttgaatggaacctatgctgaggctttcaatggtgtaaagaatgtacaagagggtgtggagataggaaagatgtgggagaaacatatccttgacttgtgtgataactatttcttttatgaacaggtaagcttagcttcaacttctatgacatttatcagtcagctaatatcagatattactcttgtctgcaaaggatttcaattcttccttttttctgtattggtgatgcagattgaagactacaataagccatttcttagtttgttgagtgaatatgacgatggacgggatcttttaggctatgattttaaccaagatggttttggttctctagatgatgatgcaaacaaaagaaaactagcttatcggcatcgaatcattgccgaaaactataaaaaggtgagagcttaataaccatataccttaatattccattgattttgtgtagcaaaagcctacattattgctataaaggatccaaatatgcagtacgatttatacctatcctgcgtaaaagctataagattttcatttcagggtttgaatggtgttcttgatcaagagttgacgaaacagtgggatgaattgtacaatatgactgacaaatatacagatggatggctgtcttcaggtattatatcctattatggacatggtttatttctttttctttttcattcacataaatacatcaagtaagtgttttcaatcctacacaatcttttaacatgaaattgaaaaaattaaggctttgccatctctctctctccaacgtccaatataatatatattcaaaacatattaccagctcaaaacccaaatattatgcatgatgtaatttttgtgccattatatggtatttactaaattgtgcccctgctggaatgatatcctggctcaacatctgattgtgattcatcaataggagatcatctaagtcacattctataatgccattataaaactccataatgaagaaacttatattacagtactattaaatataatacagcaacaaagcagccccattaaagccacaatgtcaatcacatgttaacatagaaaaggagaattctttaaatttcaattaaagtaatttatggtggccaggcactcgttactaatcacacataaggtctacgattctcttcctcatggggatttttatagcaatatgcttgagtttcttgagtcccaaaagttatagggttcaagaaaataacccagtttcaaacttaagtttccaaagcttggagagtttagggatatgcagtttgaatgcacatattcgaccacatgcatgtgataattaagatccttccaaattctaatttatgagttaaataactgatgtaagacttttaactatgctgcaaaaagattttgtttatgatgtaactaccaaaagatagaatttcctgttaagggaaatgagtctctatttaatctaattttatttgatcatggttctaacaatgcactcatgaaacaataaactgtatgcttactcaaaaatatagaaaagggatatttcttcttacaccccccgtttctcttatgtttatatttcaaaggacctgattaaacatcttgagtcttgacccctaatggtttgtgcggagaaaattttgagtaggaagaagataagcacagtggggttctaattcattgacataatggttttactgtatttgttgcttaatgatttttttcttcttaacctttactgtgcaatgtcttaatgtaagctcgtaccttcttggaggagtgctctgctgggaaggaagaaacatctgttgcgactgctgatgggataactgactctgctgcttcaaagtctcagcatgttaatgttttagtgacatctggatcattgatccccagccttgtaaaatgcttgctctttcggttcgacaatatcataacacatgaaaatggtacattcctttccatctaatactaactttttgttgtttgggctcatattaatcctgttctgcttttttgttaaaatggtcaaaatttgtctgcaattttggaatttgaaataggttaacagaacctaaattttatgccaattgaagtggcaatgtggtactatctcagataccagtaattgatactatgtggctcaactttaactaactggaatctaaataatctggggtgattattactgcgttttcagtgaagatatctgtgcttttcattttgttatgtcattttatgtgttcttgttaagcattgattttgcatatgcctattagcgtatgaaagttagcaataaccttgagatgatatgttagcagtaaccttgagatgatatgttgcatgatggtctgatattgttgaatgattgtgaagttactgcctatgctatttattttctgggatacttattgtagacagtcaattttgaactaccaaatttctcaaattaacaatgcttagatatctgtggaactataatgaagatacacaagaacaacgaatagtttagcttgatctattgtacttgacaacttgtagcttaattcataccatccaataaccaatgtacagtacccagtttgtggcagaccttccgagaattatactgattgtgcacttgaactgtcgagtcctattgttttttctggagtgttgatgctcatactactggtgcatcattcaataaaaattaaacaaccaacaaggaaaaatattttatctttcagtggcaatcttagtaatttgtggaattcttagtttaatttgtcatgaataagtatatatgtaagattattaactgctatcatgaaattttgcattcacctagtgaaggaattagattactagttttacgagaatgttaatgtggctaacaacttagcctattcttttcttagtttgtaaagaagctattttgtgtgaaagtagttgaagaggatgaacctaatggtgcatgttggatatttatatgcaccacaattgtcattctactctaataggttagagagatttgataagttccttgtacatgtcctgacaaattctaaacttttcagtctatagttcatgggatgtggggaaacctcaatgttttcaatggatcaaagaacgttttaacagctcaagtgtccgtttttgtgtaattggtgatgggtgggaagagtgtgaagctgcagaaattatgcaatggccatttattaaaattgatccacggccaggttgcaccgaaaggtttcctggcctcacactgaagacaatcggattctatctttctgttgtgtatggaaattctgaccccgaagatgattaagagtaatttgagtaagcaagatttattttcttttgctaaccaagagaaacattacaaactattaaccaagattgatgacgataaggaattttcaccctgcatgagaattcaattgttactataggaaggtaaattattccttccaagtactcttttgattttatgtgtactactgtttgggcttagatggcattttttcttgtatatcagctgattggttatggttcaaggtaaaccccttatgactgaactcttgtatatatgatcaaaagtccattttgatctgtgatatgatatcaagttcttatatcattaccataagctaaccaatacatattggtcccattaccatacactgttagctgttcttgtcatcttatttccttttagaacaggatttcatagaatgttcatcaaaacagaagattttcttgattcttttgtcttttttcttgttttgcattattaaataaagtgtgtatatgcattaatggaagtctgcccctttctagcctcttctttttattaacactcattttaagaaagtgactctcttgacactttttttatttaaaataagaaaaaattgcctagatactcttctttgtcttatcaccacatccacaaatttgagtgctaaacaattcagttgccatttgatctctggggtagtccaaagtatgagattgtcagtatctgtatgaaaattaatgcctgaattttatctttatttatttttgtttgaaattgaatttatcttttgttgaaatagtaaaattttgcttttcttttcttcaataaatgatacttattttggcacattgagggtaggggattgaaaatgcttggatcaggctaatttcaaagcaagattttatcatttgactgtttatatttgattaaaactttccaaattctaacaaggtcaaatcttacggctccaaaatgatgaactttctcttatcttctaggactatttttggcaaagttggtttcatttcattctataactttttagaagggtgattctaaatctagtgccacatattgtcaaacccttatcttttactattagtttatcattaaatgagttgataaattgtttattatattattgatttgaaagaaaaaggattacaattttgttggtgttggtatgaaaataagtggtggtggttttgacacattccaatactgtaatgcaatgttctttcccagaagaaagtatttactatagagacctttcattggattattttgtactcattgaatcatccaaaaataccatactacccaaatcccataaaagtatcaacaatattctcagttacagtatgggaaattcacagtgttgtgggactaggaagtaatttttgattcccccatttttcacatgtagatgagttttgtttggaagtggaataattccctctgtagtattatagcccaactgaaaaatgtcagcaaggctatggaggacccccatatggcattatagtgttctttctttttgataatgagttctcttatctcttatggctttgaaaaactgttcaaaaaaccctgtaacgcactaatatttttggctttttaattattattatttttttctctgggggtatgggtagtaaaaatctactaactatatgaaatggtggtattgtaatgtgtgatttgtttctttttttttgggattagtagtagaagaccaagatgggagtcttattaaatgcaagtgatatcacttgcaattatagtacatattcacttgtgaaacatgcatttatttggtaccaaaattatccactgaatatatatattttaacaataaattatccactgaattaaaataaataaaatacattattgagatagaagagagggagagttcccagcacgtgccaactgccacatgcgtgagctttggtgagatggtgatggtggttggtttcattggttcttgtaatgatggtggttgcttgcttgagctcatacaattttattggtttttattcaagtcattaaaataaatttgaaattaaaagttatgaataaaatacttaaatattgttaatgaaatacttaaa

SEQ ID NO: 16320 - DNA, 3388 bp, Cannabis sativa
agtttttataatttttgctcggtgacactggaaaatgcgacggatggtcgtttagtcacatgggttagcttagaaactttttatttagcagggtattcataagttgatatttcgtaaatcgaagttaggtggggatatagtttttgaccattttaccatttaagcttttaagtgagggcattttggatattttaattaggggtttaggtggctcatttattagttgacagctggccactaagtgttacttcagcctaatctagttattgattaattatattaatcaattagaagaaaaaaaagaaagaaaactaaaatttttcttctcttccctcacctttttcgaacccagcagaaccaacagcagcttggaatttttttttagttatattgaggagttctaactaaaatcaagtagagtaatccaaggtaagagccctagaacttacttccttaagtttttgttgattttctttttagttttgagcatgcaattgtaaaatttgttgttttcagaattagggtttgttcttgattgctttttgctgtttagtcaagttgttttaagatggattcttatggttttgaatgattaaccttgtgttgagcaagtttgagttcaagaactcaaacttagtccattaatggtggattgtgtattttttttttttttgtaatacttcgttttaccacttggaaatagttcattatgttgttattaggtattttggagcttaaattcatgtttgggttggttttaggccaaattggaggttctttatttttctgcagtgaaaaacggcagaccatttctacaaaaatggactaccatttttattgggaaagactcagaaaaatggcttgccattttcacaaaacagtctattgttttccaggcaatttctccatttagttgattttctcatgcttcctcgatatttaggatttttccatgctaattatcgataggaaaatttttacttttgtgtttagatccccgaaaaggtttagaaagttgtttacccattttacgtgattgtgacatggggcctccgttcagtgcgtgattttccattcaggttgtattttatatatgctaccaacactagtacggtatatgtatatgtgtatgtattttatatgcattctattatatgattcatatgctaccaacactagtacggtagaggtattatgtgcatgtgctacagcttatgatgtttaatagtataatccaatgttaccaacattagtatagttgggtacgtagtacatgtggtacaacacttagtggtacttggagtacagttcaaccctaccaacactattacagtagcagtacatagtgcatgtggtacaaaggtcatacctttattgagaacgttcttaatcatctattaagccttgtggataggtgtatgggtacctagatacaagtcagtagtatattatatgttatatgttcttcttactgagtgtcgactcatagttattacttgcatgtgtaggtaaaggaaaggctaaagatgagcagcaatgagtccagagctcagggatgattgtacatgtttggacgaaacgacctgcagagtttgatctcgggacgacttgggcttccttttgtattcaatgtgcaacatgtttataaagttcattttggttgtataaatatgttaaaaaatgggatcctgattcttttataaaagtttatatataattataaatataaaagtataatgttttcgaatgtttaaatttatcatgattttcgatacaacattttgattagcaaaggttagaccgtagcgtgcctaatcattaggacgttacagagatagtgtaagataatgaataaatcctataagttgacagtatgaagaaggattgtctagcaatctccttgttgatcatcactactacaaaattaacttttcccaacagttaataaggggtcaattataaaaactgttggaaaaagttagtgaagattcttcccaacagtttaaaaccgaagtaaagaaaccgttgggaaaactattgccaacggtggaaaacagtgggcaatcccaaataaatctttttttaaaaaaataataaatgccaacagtttataacagttgggaataataagtattccccacagctgtaaaatgttgggaacactaatattcccaacgttttacaactgtggggaatacttattattcccaactgttataaaccgttggaaaaagttcttttgagtatgttattttaagtcaaactttattttattttaaataaataattaatttaggataaatttaaataggataataataaaataattaattagaggtaaaatcaaaatatggtaaataataaaataagatgagttgtatttgaaccccataaaatataagtaccccctattattaaaaaaatgaaacttaaaatatttttaaaaaattactcttaatacttttaatttttttctcacattattttatattatttttaattcttattttaattttatttttatatttttttaaattatgtataattttttttgtcgtaatattaaatatattgtttatttttgtttgacaggtatattttttaagaatataaattgaaagaaaaaagttaaaaaaatataattaaagatatatattttttataaaataaaaattattaaaatagggtatttttataaatttttaaaatgtaaattaattttttttaaaataattaattggggataaaattaaataaggaataattaataaaataatcacatttaacttaattatttttttttttgaaaaagataattattttagtaaataaatttaacttagagtataaaaaaaattatagaaaaccctaacccaaacccttttcctcttcatcttcttccttccgcctcctcttcatcctctctctctggtttcttttttgaacatctctgttcgctggatgaagcgctctggccaccccaagtcccaatggacctcaccacgatgtccccaccctcagaaacccccaaacccaaacccaatccctttcctccaactcgatcccacctctctctctattcactgtctcaaccggacggctaggccacgatggccatcctctggtagacagtggtggaaaaggaccacaccacagtgctcgcaaccatggcgaaacctaaaccccaaagattttcgatttttctctcctgccggaaccatttctaaatttttctctcttaccaatgctgaagcttttcagcttctacctggtcatctctaggaaaccaaacaagaccttatcagactccaattctatcacagtgccaaggaaaaagacagacaaaggtgatttatcttcaccctgtaatggtttttttttttttttt

SEQ ID NO: 16321 - DNA, 7496 bp, Cannabis sativa
  modified_base (341)..(343): a, c, t, g, unknown or other
  modified_base (414)..(423): a, c, t, g, unknown or other
  modified_base (1350)..(1372): a, c, t, g, unknown or other
  modified_base (1454)..(1459): a, c, t, g, unknown or other
  modified_base (3033)..(3038): a, c, t, g, unknown or other
  modified_base (5564)..(5570): a, c, t, g, unknown or other
  modified_base (5792)..(5799): a, c, t, g, unknown or other
  modified_base (5850)..(5860): a, c, t, g, unknown or other
aatcccttccaaaaaattccaaccctatgacgtcggttctttaatatttgctgaaaaaaagtgcctctaaaagcttggtttgtagtagtgatatgacaatttttctttatacattagcaatgtggaactaactctaatacaccttctttacatttggacctaaaaagtgtgggtataacgaatggcctttgaagagaccacaggaccgaacgtgacacttgaaagaatcccacaaggccaaatatcggaaaatttatgggtgtacagggccacaaacggcggtggcatgggctcataacggatcataagtggctagtgactctaataccatgttagaattnnngataagataaataaggttccatctcaaaaccaatttgcaatgggaggagtagtccattcatcttatatatnnnnnnnnnnttccacacattagcaatgtggggactaactctaatacacttttctcacgtttgggtctgaaaagtgtgggtataacgaacgacctttaagaaaccacaagaccgaacgtgacatttgaaagaatctcacaaggccaaatatcgaaaaatttgtaggtgtacacgttgagaaatttgtatattttaaaacaaattgaagaccctaacattaaaaattagcacacattggccgaaagatcttaaaatctttactaaaataaaataattgaaactcagtattaaattacaaaattatatttgtcatataacatgtatgcaaaattatttgtcggtcctagttttgaccaaagtatgaatatagttttgtttgattttttatctcacaatgctatatctttttattttaccgaaaaatgtaattatcaaaatagagtttttgtgtgttttatccttaatataatatcaaattttaaccttttaatagtatactggtaattattaaatgttctgttaagtgtgtaattaaaaatctatcaaagttatatgaacgaataattacactttattaattcatgttttcttttttatttatggaaaagtactttatttattttgttcattttttagatattacattctctctaatcataaattttgtagagaaatactaaaaatagcgggtgcctatcactatttaaaggtgtcatttcactactaacataattaaatattaaattttatataattttatttaatgactattataaaatattactaatcatttacacaagactatacctttaagtgatcatatatataagtacctatttattgattggtggactacaaataaaattagtgataattagtgattaagattcactataaaaaaatcttacttttagttacaacaaaacttgtgactaannnnnnnnnnnnnnnnnnnnnnnataaattatcattcttatgttatgttgtgactaaaaagtccgtggttaaaagtatttgtcacaaaaattacaatttgttgtnnnnnnatgtatttttagtcacaatacttgctgtgactaaaactaaattagtaacaactcgtaactaaagactatatttagtcacaagtaatatattttgttgtgactaaaagtcacatttagtcacaaaaaaatatatgttgtgactaaaaacttatcactaaaaataacattttttttttgtagtgattgttaacacaaaatataatagaaaaataaaaatagaaagaaactgttattaaaagtaatatttaattaaaaataaatgatgcataactagtagaaacaatggtgttttgatagatatttatgtagtagtatatattggttagaaaatttaccatttattaactatcaaatatatatatacagtgtatggacatattttaagtgcacaatggcttgggcatctattaaatgcaagctatttatatatatatatatataatatatatataaattaaaaaaaaaaacaactaatgaaaagctgttttatatacatatactcgaggtataaagttcattagtaaaggggtgcagtgccttttcttttctttgttgtgttgttaggagaataaaatgatcatcttatctacaaaaataaaaataataagtagagtaatattgcaatgatcagaatcaggtaaaggtgttaaatactacatgaagtgcgaaaatgagtagtttgcgccccgcccttgttgtccttgctgttatagacttatcaatttgtgtaatcttttcttctactttgcatatatagattatatatcatcaatatacatatataaacgcaaataaatttttttaaaaaatagttttaaattaaatgtcacactttgatcaattgatataatatatcaattttcagagctaaaattctcaaacagtgaaaaagtactatatacataaatatataacatgcatgacattcattgtattaattatatataatatgtaggatattgccatgtataatatatatatatatatgtatatatgatggagactttatatagattactacagtctgcatcatgttaacatgtatcgaacaaaaataaaagaaggaaaacctaagtaattaataatgttatatattaataaaatataaatatatatatatatataattatatatatataagcatttcaaagaaaccgcgcagaagtacccgccatgcatttacataatgtacttttatttggatgggacagaatcataaacttgcatcctttattataattgcaactatttttagattggacaactccaaaataacaccattaatttgcacaccgatttatatttcttcaaatataaagtgcgcagaagaagatcatgtcgagatcaaatcagaaggcttgatgttaagaacacgaaaagaaaacgatcgagccatggagttgatgaagaagaaaaaataggaaagaaaaattactaattaagaaatttatatcgatcatgtatattcatgaaccttcagcaaaatttccaatacacaacgtacgcgggattaaatatatattttaagcaaattaaacatttggcagttaacagttatatacatatatatatannnnnntatatatatatatacataaatagaggtcagcttatgtacaactcatgggtgtagacatagatcgatatacggtcagcttaaaatatatattagatgcactatttggtgtacacgtggaaaacttataaatttcaaaacatttgcaaaagttgttggtgttaagtaatcaatatttgcatatatttacgtggcgtataatccttgttctttttttctttgtagatatatcaaccactagacactatacatatataaaaaattaaaaaaaaaatattgaaccaaaataaaactatataaacaggtagttgttaggttgtaaactgataaactgcctgtttccctttattcaaaactttctaacccataaaacccttgttctcccttctctcttctctccaaacaaaccaaacacattgcatatattcctacaaacctaaaaacccacatagacaaaaactaaaccctaataatggattcatctccatcatcagttgtttctgagctagaaggagctcttcttaaagacccggatccctttgcttacttcatgttagtagcgtttgaagcctcaggtttggtccggttcgccttgttgctgctactatggccgttgattcggttgatggagatgacggggatgggcgaagcgggacttaagctaatgatattcgtggcggttgctggagttagggagtcggagattgagtcggttgctagagccgttttgcccaagttttacatggatgacttggacatggaagcttggaaagtgttcagctcttacgacaagagggttgttgtgaccaagacgccgaggatttttgtagaacggtttgtgaaggaacatctaagagcggatgaggtcgttggcactgagttggccgtcaaccgatttggcctcgccactggtttcgtcaaatctcaaaacatcaccaccgatatacatgaacgagtttctaacatgtttgaggatgaacctccttctgccggactaggaagcccatcttctgtttttgcatcggttctatctgtatgcacggttagtcgtcaccattacaatcttttacttattaagagagtgcatggtccatatccctggtttagaataactatatattagtaatctatatagaattttttttaggggctttttctaatttttattcaatttcataacatgtccaagactctcttatatatatattatactattaggagtcttactaaatccactatatctagtagcaatatattattatattattattagtgtaatatgatattaaatataataatcaattttactaaccattttgtgaacgtacacgaaacacaggaacaaatttatccaccattcatcacaaaccaaaggcaagacaactccgtcgtcctccggccacttcccgtgatcttccacgatggacgactcgtaaagcttccaactccatcgacagctctgctaatcatcctatggatgcccttaggcatcctcctcgctgttattcgcatttccatcggcttaatactaccaatgtgggccattccctacgtctcccggcttttcggaggaaaagtcttggtcaaaggcaagccaccacgccctgccgccccagcaaacgccggcgtgctttttgtatgcactcaccgaacactgatggaccccgtcgtcctctccactgtcctcggccgtcgcatcccagccgttacctactccatctcacgcctctccgaaatcctctctccaatccctaccgtccgtttaaccagaatccgccacgttgacgccgagaaaatcaagagagagttgtcccacggtgacttagtcgtttgccccgaaggaacgacatgtcgtgagccttttttgctgagattcagcggtctttttgccgagttgacagaccgaatcgtccctgtggcgatgaattaccgggtcgggttcttccatgccacaaccgctcggggttggaaaggcctcgacccgatcttcttcttcatgaatcctaggcccgtttacgaagtcacgtttttgaaccagttaccgaccgaggccacgtgttcgtcgggaaagagcccgcatgatgtggcaaactacgttcagagaattttggccgccacgctagggtttgaatgcacaaactttacgaggaaagacaaatacagagttcttgctggtaatgacggcactgtttcgtacacttctttggttgatcagctcaagatggtggtcagtacctttaagccattttttcattagtagattggccacaaataaatatggacccctatttattatgttctttgatttttttttttctttttttgtttttgttatgtatatttttgggtttgattttttgtttttggtttgatttcaattatttattttgtggaactgttaaataacttatgtaccaaaggtgtacttattgttgatgttacttatcattagtgttaatattttgttatcctttggacttatattaatttataggttaattagcaatttttttccctgaactttgacannnnnnnaatcatgccccctgaattttttttgccgttaaaaattcctcctgaactattaagattgttaaatttaagaacttttatctaattttagtaaaaaaattctaacatggataaaagttcaggggacatgatttaatacatataaaagtttgaggggcatgatttggtagataccaaagtctggggagcaggatttagtacctgaaacagtaaaattgaatgaannnnnnnnaaagtccttaaatttaataatctcaatagttcaggggaatttttaacggcnnnnnnnnnnnagggggtatgatttggtatatgtcaaagttcgagggaaaaaattgctaattagcctaatttatataagcaagtaatatacattagttttgtaaaaaaaaaaaatattattttatttttggataactacattagttgactttaaaatcgattaattagttaatttattactactattatatatttatagattttactttactatgtaaatcaagtatctaattttgtttgacactactacaaaacaagcttttagaggtagtttttccagctgattaataataataagaaaaaagaagctaatcgacgccatagaaggagatgggaaataataagacacatggcatcaattattttgtaataaccgacaccctagagtgttgaattttaatgaaaaacacatatgtagtcagttattttgtagtaaccaatgaaagacacatggcattggctgatgtgtgtcccatatggtgtcggttattaccaaataatcgacgacaattatataaccctaatcaactcttcctcctcctcacttcgtcttccccctaaacaaaataaccaggagccccttcacaaaactctcgccaaccacctcattccatcccccatttctttattttcatccgtttttatctttttttaatagatttttttttttttttttttttgcattttttatatccaaaaacatatcctgagagtttaataatcttttctttaattttttagtgtaaactgatcttagaggtagtgattgtggtggttgtagctccaactcacgatattggtagagaaatcgttgaatctcaatgtccattaaggtataaatctaatctctaataattttagtaatatacattgctttattttttattttgtaataacttgagtgcccacgttgtgggaggcgtcatatgggcaaatgttgccccagggcctatttccaatgtggagtgataggccatttgaagataagctaaaggattgaagctaggaaagaagaccctatagttcctgcttaggtgtttgccatgacctaagtagatgcagaggttggtccttcgactgttacagatgagatttctattaatggttttatgtttactattctgattaattctggtggtacactttcgtacatttcaaggaaagtcattaaaaatttgagtagaccaagtgatgttagtggattttgtacttaatttgtttcctactggagaaataataatctttaggaggtgggtagatctcttccagcattaatggaagggagagaattgttaatggatctgattgaactagacttacaagactttaatgtgattctgggaatgaactggttggccaagtataatgctaccgtagattgtaagagaaagatggtgatattttaaccaaagggtgaaaccccatttgtctttatggggaaggtttagggattttacattcctatgatatcagcaatcaaggccaatgatttgttacgagggggatgtatgggatacttggccaatgtattggataccaagaaggatatactaatgggactaaagaaagttcgagtggtgtatgattccttgatgtgtttttggaatagttactaggatttccatcgaagagagagagagagagaga

SEQ ID NO: 16322 - DNA, 3302 bp, Cannabis sativa
ttttgaaaactaataatatatgtaaaataaataagtgaataaaaaaatttgatatttattaagtttaaaataattaaaaaattaatactttacaatatcaaaattatttctaatgccaaaaaattagtagaatagttactaaaaatttaaaaatttaaaaatagcaaaaaaatatgtatttgcagcccaggtaatctttctagggtttcatatataacaccgagactagcgacttatcaatattgtttgagttatatatctcacttttcaatctctccggccgactctctcaaatatttctcagccagacagtgcaccattccgtcgaaactcttccacattaatcttattattaattgtatgcaattaatcaatttcttatatgccttatatattatgatttcagattgtatatcttacactcttataattgttggttgtatattgtactaaattaatatttacatttaatcggtattcccaatatgttttgtggtatattattgtttgttttagtcactaatgtgtataatttgttatttgttaacactgtatataactattctagttttctcaaattattatttatttgatcaaaaacatactctagtttctatcatcatcatgtttggcataaaatttttcacggttacatgctacgttcttttttttcttttacgcttcctttttggtagtacctaataaggtctatttatttatttgattgttgtatgattgtgtaggtttaaaatgaattctaatatagtaccaccaaaacccaagtttagagcattgaaggctcaagaaatgtcgaatggaaaagttgaatttcggatgatttacgttcctcgccatagatatgcgccacttaaaaaatcatggatggacatctatgcaccaatctatgaagagatgaagatcgacatacgcatgaatttgagggctcaaaaggtggaattgaagacaagaaaagacacacccgacattacaaatctacaaaaatgtgcagatttcgttcaagctttcatgctaggtttcgaggtgattgacgccattgctctattgcgtttggatgaactgtatgttgagtcttttgagataaaagatgtaaggagactaagtggaaaggcgcagttgtctcgtacaattggtagagttgctggcaaaggaggtaagaacaagtttgagattgagaatggtagcaccacaaggattgtggttgcggatcataagattcacattctgggttcgtttgctaatatcaagattgctaggtctgcaatttgtctctctattttgggttctccccaacccaagataagggctaagttaagagctcttactgctagactggctgagaggtaatgctccacgctagggtttttcagagctatcttttcttgccttggattttatttttctgtatctctttctcaagttaattattatctctggaattattatatggaattggatgcatgtgtatatgtatgtactttcagcatattaacttaattaagtcttaaattattgagatttatggggatgttaaattgattaaacttcatggtgagggtgatggtacattgggttggcctatataaccttgtttatatagtcatctcagttcatttatattttctttttacaaatttaattctcatgtttagagaagggagagaaagagtggtaaaagaaagaaaaaagatatataaaaaaaagaattatattttagttcattgttaaaaaaaaaagagaattatattttagtaaaagtaaaaagaaattaattattattattattattatttttttttatataaaatatgactagttagattaaaatatagtttgagtgtgaatagtaagataatgtaaaagtgaaaaataaaataaaataataaaataaaattttatgaaagattaaacaagtgttaaatatatatatatatatatatttatatttatatatataaagataaaaaaaatagtgtgatcagcaaaaaaaaaaaagataaattgaaaaaaaaaatgaaaaagagaaatagagggaggagaaagaaaaaaaaatgattttttattttatttttacactttaaaatatatatatatatatatttttgtatttttaattacttaattctatatagtaaaaactagcaaaaatagtatataaagtaattttttaaaaaaacccagccactgacaaaaaaaaaaaaaagaagtcaacgtgaaaaaagtcaaccattgaaagaaaaaacaaagatgatgaaaaaaaaactcttttaaagctttaataaacagagatgaagaaaaaaaaaactcttttaaagctttaataaacaaaaaaaagcaaaagaaaaaaattaagcaggtaagagcatgtttggtattattttttattttttgttttcaaaaaaatattttttgaaatgagaacaaaaaatagtttttggagtttttaaaacacaagtcacgtttggttagtgttttttaaattggtttttaaaacagaaaataacattttgttgtttttaaaattcttgtttttgtaactttgttttctgaaaactgttttaaaaaaacaaggtcaaacaagccaaattgtttttagaaaagtaattttctgtttttaaaaacaaaaaacaattttttagttatgataccaaacatgcactaattttttattttttttattttttagttagtattatttaaacacatcttcatgatttttaataacacaacattttttattgtttcaaaaaagtataatgataaaaatttataatattctttttgtattatggaaagaattttttttatagtgtacgtactacagagatttaaagtaattaattatattaaataataaaacctaatttattcaagaactcaattttgaattatttcataataattacaataatattgtgaaaacaaaataacccaaataagttaagaaaaattaaaattaaaacaaaatatcaagatttcaatttctctctaataataaattttcgattctaatcattttttacgattcagagcactctcaataacttttctactttatcatttaaaataaattactaaaactttattttttctattttctacccctactaaaataatattttttaaacatatataaataaacaattatttatatattattaaaataaatttagagaatgcactgtgtattctctacatgtaaagcaagttgcattggtttgagtgaatctctattatacatatgtgatttaaaggagctgattgaaggtttttttttttttttt

SEQ ID NO: 16323 - DNA, 6809 bp, Cannabis sativa
  modified_base (439)..(444): a, c, t, g, unknown or other
attggatttatgccgcttacaaacataaaactttaggtacttataccactatttacccaaataagtattatggattataatactatgcattcaaaactaattttttagaaattaatttctaaacttttattttaatactctcctttctcattctctttcacaatatttaacaaaactattagtataaaatatatatacatatacaatatataaaatactctcctatatcacatttctcattcacaatatatatacacaatgcatattgaatacaacacaaaatacatacatatatactctcctatatcacatttctcattcacaatatacatacacacaatacatattcaatacaacacaatacatatttaataatatagaaaaatcctaaaaaaaattataaaataaaaaataaagcaatgtacattactaaaattannnnnnattagatttataccttaatagacattgagatacaacattttctccagtaaaaacagtggttggaggtataaccaccacaaccactacctctaccttcggtttaccctaaaaaatgaggaaaatgtgatctttttgggcatatagtttaaggtatgaaaaatagaagatttagaaacaaaaatgagctaaaatggtgaaaaaatagtgaaatgggacggcagtgcgctttgggatgcggaggagctattatcgcccagctccctaaccaaatgcagaccacagggaaccgtagcatggggcgaacgtctaatccttgattttctgtggtggttggcgagagggtttgggatttctctagtttgggggtttttgggttgactgatcgatagagaaagacgaaaggctgggctagggttataaactcttttgtcatcggctatttagaaataaccgatgccacacccctatggcgtcgattatttccaaataactgacaccataagtggcataaaatttccttctggaaacttctaatcctatgtcgttggttatttattattatgttgaaaaaagcgcctcccaatacttgctttgtagtagtgataattatagcttaacaaaatatacacgtatattttgtaaatttatttatgtaaaattaataattttattccgagttgtaatacatgtttaaatattatatttactaaaaaataattttattatgatatagtattaaagattgtttattgttattgttattgcattgatattttttggtagtttgatttttttttttttctagtgtaaatctatttagttataacctctcaattataatataatttgtctggtcctttatgtattcttaaatagagattctactatataaagaaaaaaaaaattagtaattccaaaaaaattggtatacatataaaagaaatataacatattgtaaaacgaacaagagcaaagctgcctatcctattgatctcattaaaagcttttcctatcactaaaaaatgatattgatagggatattttatattatttataatagaaatagtttaatacttgatggtgttaaacttttttctcatccctatagaaaaagttcaagttcccgtcacattttatatcctagcactccccaaagtacttttaagtactatacttttgttattgtggattacccaacagcttataataccattttaggacggtcagcattagtaaattttagaatcataattttgatcgggcacctatgcctcaaattcccaactcaatctatgagggtggaaattgtcgaggagaccaaaaagaggctaggggtgctgcaatgtggtcactaagcaatttgtcctagtagtcaaccaagaaaggaatggggatcaataatgtgaggaaaatgagttagaccctcgagtggagacaataaaggcaatggagcctttagaagaaacataagaaatccaaatttcttgaccaggatcaatttaaattcatctgtgtcggaaagagccttgatcccaaagtcagagaaggaatcataaacaccatcaaggagtcaccagatgtcttcgcatggtgccacggagatgtgactcggatcaatccgaaggaaatttgtcatgtgctaaatgtgacaaaagatatgttcattttatggtactaaagtaggtacgtagtggaagaatttcgtattacctaattattattgtaccatagcccctagaatctccgtatgtgtgtacataaaatcaaaataataaaaacaataagtttagagtatacctcttgaagcctatcacggtgtcctcgatacttcttgtatgttgtatctcttaatccagttgatgaagaatatacaattcggactcacaccagtgtctttcaaatcgatccaccacacataaggaatagtgtgggctattaagaaaaagtgtataaccttgtacttgttgagttctcaatacatgagcaaaaacaatagagagaataaatagttttctttttctctctatggaatttgaaattttagtgtaaaaaattattctgatttctcaaatctggttcctatttatagtagttaaatctcttcaattaaatcattacttaattgtttaaataaataattatctataatcgaattcagttactgatatttatgagagaatatcttaacaactataaaatatctataattacttttcaaattagatatttacctaattgaattaattaaataattaattaacacaaaaataaaaatttaatagggacatgaacaagctaggtgcttgccatttgtctttaggacatggatggtgccttttgtcctgacaacttttgtcctaacaaatcttgctcaacaaattttgtcttaacaatttttatcttttttcctatttaattaatatgaaaaaattatttatttatcacaaaaataaataatttatattttcccaattcaaaatagattttcttcaaacatcgtaatacaactttttgtccctacccttgacagtatttcaaggtgaaaattcgaggaccatggacctataattctaagctccaataaactagattatttattgaatctcatcaaccaaataatcactggtttattaattctatgattactccactataatatgaaattacactcttagtaattatagaattgtgtttactgagtttaactgcattgttcattttacctccagtcgtctcttcacttttgggggaaccttttttacctccaggacaaaccatcttgtcctttccttcagagtactaatatagaatctcttgatcaaaggagtaaaattatgtgcatggagctcctggagggccttgttcatttgggaacaggagagaagcccagtagttagcacccctcactaaattcaaaaataaagattgaatagggtcccttaactgctgagaagaggctccctccgaatacaacgatgcatagattgattgggttgagtatcgggcaccaaatgcaccgtatttgagataaaaggcaatgaaatgtgtgaagaaagtaaaaagaaggaaatgtgcaaattttcacaaaagggaagcccaaaacaatcggtatgcgcaagcaaaatgggcaataaaaggtttaattatgaaacaacactcttgccttcgaatatattcacagagctaatattcataaagaaagtatacacatataatcaaagtgcactagatagcagttacagaactgggtgaacacttacaaaggtgggatcgagatgagggtgatggcactaacaagcaatggcagtaatacaaagcttggtagagtctaaggaaaagtatgagaaaatctaacttgattgggaattcttctagtttgaaactataaagaaatgaagcaaaaaaagagaagtatgaaaagtgaggagggaatcactatttatagctcttaggtcacgatcttggcatcttgatgatcctacggctcccttcaaattccaagaaacacacgcaagtccaatggttggaaagaagcctaaagaaacacatttataagggaacatttgggtactcaaatatttgactgacactacatttcatgacctgcttgaggattaaggttagggaagcaaatcgacatcatcaaaattgaggaacaaaaggcatggtaatgcaaaggccattcgcaataaagcatgtggcgcgtccgtacaagtaggagtatttcgcctgcacatggcgtgacgcttcaaaccctctgagagagaactaaagagtcaagaataaatacaagtcccaactcaaaaattgttagctagaactttgaggtaaatgttatacatattttttttaccaagatacatggaaagcaaataagaagccacattgtcacaaggtccacatatgcatggagatgatagctattggcattagaaattctttgcactcccctctaagatatgaaatgtgtctgagaggatacgaccaaatgtagaagaataattgtagagcatatgacgctggcctctagaagatacgagcctcccagatcacatatcatcaaggagctgcctaagtgatcaatataattcccaagacaaaatattgtaggtgactgattcaacgcatgcaataaagctaacttaatgccactgtgaaccatactcatgacatcccattttcctatacatgctaagtgacaactagaccttgtgttgtcccatcagatgcatacaagaaaaatcttgtcttaccaaactcctattacgaagactagaacaaacctagtagaaaaaaagagatgtattcttttctctgaagatcccatttctctcctataagtacccaaagaatgtaaaagttaaggggattcgattcaagagcaaaaaagagaacaaatatcataaagagaatatcatctgaaattgagaacaatttcaccataaataaaagtgactcattgattaaggttaattaacactagaattacgtaaaaatatatttgtctacgcttaattaatttttgtaatacaagattaagtagttaccgaaaaatttggtcaacaataagatattaaaattatgtatataaattaattgttttgtatattttcaatgagcattaatgatagtattgacttttatagctaatttgcactttgtgtattcgggcacaagtataaaaactcggccaaatatagcattatgatatattttgggtcaaatttaacccaaaatatataccatctattggagttgatcttagcatctctaatggagtgctaaaatagtagtttaatgctaaatttttatacttttaaaaaaattatttctccaatggtgtgctaaatcttgtatcaaatttgacacgtgctaaaaattgtagtaaattttgcacaagatataatattgggtcaaatttaacacgataaatgcatatttttaattacgtttttgctattgattattagtgataagctttaatatgagtaatttgggggcataaatacttaagtttcactttgggctgtaaataaatacttaagtttaatctttagcggtaataatatctgagttataaatcaagaacttctttaagtacttgactgttaagtgttaagtaaattgtcgtgtggaaattcataattggtccaagttattattttttattttatttaaaaaaataatttagctatactaattagaaaatgacacgtggataataacttaacatttaacgggttagtacctacgagagtaccaaaaatataacttaggtatttataaccatcaaaaattaagtttagatatttatttgcaatcaaaattaaacttaaatatttatgctacaaattaatcttttaatatatattttttaattatgatattgacattaattatttttttaacatttaatttattgataaccatgaatgatatgttaattgttattataatttgtattataaatattattgtgcagtacaatagcaaatattataaaattatagtatttgttagtttttttttttttttgttctaattcataaatacttgcattggaagatggtgttagggtatagatctctgcccaaaccaaatgctattgcaaaccacaatttgcagcccacaatatgcagtagaaacaattaaaataggactacatccattcccggaggcacatatagactacatccattcccataataaataaataaataaaaattattatgcacataacatacacaatcatcgtagggctaaaaaagtgtaacatacacaattggtgacacacctaactacctttatgatgtcattattcacctaataaattcctaacttccaatctaatacttaccaacaaacgtagccgacccttttaaatgtactatcaaaaaccacacctaatctactcatatcctcaatgcttcccccatcaaaaataaataataaaatccctaattgcaaaaactaaattcattgaaaaccttaccgaccatgccaactaatctactcaatccttaatgtgtaaaactctttccaactaacttacttacttatccctatacttcccattaaaaaattaataattattattacaaagaagtgattggcaaaatcttcattgaagactcataccgaacccaaacgaatctaataattcattctttttgacttatagataataaaaattggaaaagtgcgtttaagatgagcttacaacggctatcacacttgattgttggctctccagctccaacacttgaatagttaccaaatgatttcattgattatcgtaagtcactattgaccaactctgttttttatgtcaccattagttagcttctctcatcaaaataaagaac

SEQ ID NO: 16324 - DNA, 4490 bp, Cannabis sativa
  modified_base (3407)..(3418): a, c, t, g, unknown or other
ttaaatcatcaaaccaagttcaaacccataatttgtattacatacttgttttatttatttttttacaataattattcattttttaaataatttttttttacttttaataaatttataatacataaataacaataaaaaattattatcattacatatcaatattctattaaagttgttcctaaatatcaacactttgcctaaaataacatatatatatatatatatataaaatttggttcaaattaattagagtttggaaccacaaattatgaattatataaacacttctattaatttctattatgttgttttgttttgttagaatgccaattgaatagttttgtgaacattttatttgtattaaaaaatgttcttttctctaattttattaccaaatttactttctgtttttgttattcccaaccaaaagtgaacttaatatttgttaaaaaaaaaaagtggtcttaatatcttcttcaatttacacatcacactatcaaatttgctcgagaccttatcaaatttacttgatagttgacttgacttacaaaaaaattactcaaaaaaattatttaatgtattttttttctttgaagaaacggaagcaatttaaaaattagaaaatactaatttagattgataaagttccatttaaatatatatttatagaagtttttaaacttttagccttcaaagtgcataatagtgggcttttttgaacaatgccaacctttacaaagacgtattttttgtaacaaagtaataagtacacatttcaatatagagaaaccacatacctatttacattttatttgtagaacactagaacatcaattcataaatgcaacaacaaaacaaagttaaaaaacctggtggtggtggtggaggtgagtttcttgctaccgtgcgcactatggcggtgcggttttttgtcgggtctatcaacggtgaaaatgataattcgaacgagagtttttgttgcgaatcctagggtgaaagatgtgaggtgcaagggtgaagagacaaattagttttggatgtagtgagattcgcccgagttgattcaactcgggcgagttttgagttttgaaaaggcgggtggggtgggttttacccgtcgggccgttaaatgggcctttcgggtaggtcttatgcgtcgggctggaaaatgggcttttcgggtaggttttacacgttgggccgggtaatgggctttttgtgtaagcctatttacagatcctttcaagaatgtaggaagccataaagcagattgtttgggataacgtctacaattatcactataatcaacaaagtataatccatatctcactttatacccacttccccattcaaagttgtctaatagtgcccaatagaagtaacctttcacatttacaccattcctaaaccaaattaaaagaagaaaaaaaaccattaataccaataacaaagcctaattgattaactatagattaaactcaaaataacatttacttacttcattgcttgattagtgtagtacaaatgctgaagaatatagttgatccgagctgggtctttaagtgattctttcagaggtctttctgggatatttccatctggatatcctgcatatttaagtattaaaatacattatattaaataaataaaaaaaaaacttatttaaaaaaaaacaaatgaaaactaacgagtttttttacggctaaatattcttaactatcacttgatttgcacttaactttctaaatttaaattttgacggtaaaactctccaaactactaaactgcttgcaaatttaagatgttatttatttttcacaattaattattaatataaattacttatgtgtacttttttttttacatgtgtcaaatttatatcggtatacctaatattattatttaagaaatataatatttttattttttttaaatatttatttttttatttttataattttattaaattttaaaaataatttttaaataataatattaggtgtactaatataaacgtgtcatgtgtataaaagtgtacacataagtagcctatatgggtgacaccttaaatttggtactaatttaatagtttggagggttttaccgtcaaaatttaaacttaaagaattaagtacaagtaaaataacaattgagatgatttagccgtcaaaaacttaaaattaattaattaaattgtaaccattctctgtgatgtaaataatgggattttggtattttatcttcatgtactccaaaactttctgtagccctcgtggataactgtacacatatccactcccttcagactgtacaaatcattaaataattaacaaattcagcaaaaatcatatggagaaattaatttttgtttaatatattaaaatacttgccttgggacctattagaactccatttttatcaactgaaacaatataacacaaaactattgagatcaataaacaatatatattataaaaatatgtgatatttatttatgtataaatattattgtaagtactatacctgctagtgttactaaggaatctccaatatagtgtttattttggtctggtttatcagttttaaaggcatatctagatgtatagtaattgacaccaataaaatccaatgatccctttaccaaattcttctcttccaaagtaaaacttggtagcctctcaccaacatattctctcatcacttttggataatctccatatatcagtggttccaaatgcctaaacattacttaaattaatcatttgtaaaacaaaatttataattgaccaaaattaattaacatggtaattaattaaagaaaagtaatttgattagaagctctattattattataccatccaaaaagaaatttcaagtatctttctgcagctgctatgtcatctggtgtgttgtttaaaggctccatatactctccaacaacaacaattccaatttctcctccttgttgtgcctggaattagtaataaatatttttacaaataggcataacaaaattgcagattcattttagcattaattattacttggccctcttaatgccaagcactaatatagatgagaaatgcataaagggtaccagtggtgcctagcacgtgtcaatattgttattggtccaactaaatattgggtcttatataatttaatataatagtttttagggagtatcgctagctaatcgcaacgcgacatattgcaaaggtgctaagcaccactggtgcctaatagcaatgctctaatatagatagccaacattttttatatttattatttaattaggtggcgttttgtaacatttttgtttttaaattttttaatcgaaaaataaaaataaaatttttgttttgaagaataaaaatgcgttttataaccacttttgtttttcaatnnnnnnnnnnnnaaataaaagtgtgttctgtaaattttatttttatttgttgattttatttaagttgaattcggatccaaaaccaggtctaggatctgaggttggggccaggtccgtttgggttccaagttctaagttggagctagagtctaaattattgattaagaaaaaaattgtttaaaaaaatttagaaagtaatttttgttttcaaaattttgattctcaactaaaaaattaaaaaacaaaaacagttttataaaatataattttagaaaatattttcaatttttactgttcgttagtattttttttttttttttgttaatttataagaaactagttgtacgtatatgtagctatcttacttggtacttttgtttatagagctttgcagctgcagcatgagaaaggacaaagtggtggcctacaatgtaaggttcaatggatgagttaccggccggacatggaccggcgggcggcggcaatgaacatcttcccggtgcacctttccctaagtcatatccaagtgccaccacaaatggttcattaattgtaatccaatgttttactctgtctccatatgttttgaacaaaagttcactatagtccttgaagtcatttctgtcaaaaattaaaaaaaaaatagtacccatttttattaggagactaaattcaatataaaagtgatgtgttgaaattaatataattattattagtgaggttgcttacacaatttggggactcaaaaagctaccatacttgtcttcaagagcttgaggtgtgtcaaaatgtaatattgtcacaaatggtttcaaccctacgtgacaatcaaaccatattatatatcagtaaaatttattaattattaaaattatataagataaaaataatgattaatttggtattaattaccatttgctattagttcattgatcaaattgttgtagtaatcaataccctcttggtttattccaccgtttaatgaaccctctgaagaattacaagttttccaaaaactcaatacaaataaaattattatatatcttattattattacaaattaatttattattatttttttaaa

SEQ ID NO: 16325 - DNA, 2812 bp, Cannabis sativa
tctctagcgtcaactcttcaataattgcaattcaacccctccaaaacccttttatcacaaaacctctcacttttcactcccaaaatcttcatccaggtacttcttcttcctctcctcactctcatttcttctccctccttcgattttcgcttccattttctcgattctctcggaaattctcttcgcttcgtctacaactgcagttttttccgattccaggtctgttttggttctatcgatcgaaacctagggtttcattttgacggaaagtagttatactatagcggaagaagagttgaagctgtgacacagctttttctcttcgatggaggccacagcagccgcacgtggtgctccgatgccgatttcgtctcaacagtctcggaaagagtggcgcgctgtctcagaccatcattcggttcgaaacgtcggcgatgaggtacttgttttttctgtcttgattgcctagtggcattgactttgtttgattgccaaatgagccaagggatttaatggttgtattgctgttttttggtttcgtgtatttgattttgttttaggtctaaataatcagcacactttatttgcggaattcttgacattaaaatttaacgattgttttattttgataaattttaacgatttggtgtacaaagtgtttgatatatatatacacacatatttatacttacatgttgtatcctatgtcgtgtaagatttattggttgtatagtttgttggttctttcagtactaattaaacagagaaaaagaaagcttagatttttgctgtggcgttttcttggctaataagaacattactgtttagtgcttagctgttaaagtgtgaaattttgttttatattacgttgatgggcactatgatgcaagtaatgcaatgtgttctttcactttatatgcatcaactgatcatattttggaatataggaattggaacggtcaaagttaggacaatcagatgagagaaccatttatgaggtaaggattcggattgtataaataatgcttgtgttttagtgaaaccacgttgacatggtttataattatcaaggtgcagcggggaagagagccgcttgatgtggatttctgttctattacaatcaatggtagctcgaaccatgatctcttgcagcagcggcttcatgatgtgtcaagacaaagagaggaattgcaacacatggagactgagcttcgagctcaaataattgctagatctgaaatgatcgaaatgcaaaatagctttgacgcccaaattaaggagcattctagtgctgctgccaatcttcaggttttgttctatctacttcccttaggttgcaattataatgaaatctatttgaaaaaggtttttactgagagcaattgttctgtggatggtttgattttgtcgaaccattccaaattttagtagtttagcttgctgcgcacactagttttttttaatataatgtgctgtttttcagattagatacatattccaatgtttggaactattttgggattagatacataccaaacatcattgttgacaagttgatatagatatatagtcattcttaaaggtggatttatctgctaatataggaacaactgcgtgaaagggatcagaccatacacgagctggaactgaaactggaagataaagaaagagagctacatgctatcaaaagagacaatgaagcggtttgtcaaatactcacttattttgataagaagctattgtacttgtacatttttacattataataacttttctgatattattttggtttgctaggcttgggctaaagaagaccttctcagagaacaaaaccaagaactagcgagcttcaggttaatttatattaatttccacttttttattgctagacttgaaatttaccattttgtgcttttaagtattttttttacattgttctgtgtttatgctggtttataacattggaaataaaatttacattgtttcttttgaatattttctgctggcagaagagagcgcgatcattccgaagctgaaagagcacaacacattaaaaagctacatgagcttcaagagcacattcaagaaaaagataggcagcttatggagttgcaggaacaggtctgtttcatacgtacgcttatgatgtacttatattgctcttggattatgaagctaatttgttatgccaaaaagcgccattggaaattaaaaaatattgaattccacatatttgagtttaaattaattgctactaaattgcaccaatagtgatatgccatgtcctagggtaccatatagcaatgctctctatttaataattttggatatccccaattgtaactctaaaattataaaatcattattcattttgtagtggacttagtattatgactaagtacattgcctaatattttattatcattcagcataggattgctcaagaaaacaatctttataaggatgatcgactgagagaagcccaagcatggataacccgtgtccaggaagtggatgccctgcagcaagctgagcgtgcagaacaatataatcagctctggcttagttgtcaaagacaggtaggtttcatgtttttcccttttccacttaattctgtactatttatttggttatccctttttcattcgttatagcagatttgtgtcacacaatgagtttatgttaagctcaaattttctccctaatgtttgtgtgaaacttgacttttccattttatgtctggaaccgcacctttaaattttgtttcagttgctggtacagcgggtcgctatttgcttgattatagaatggg

SEQ ID NO: 16326 - DNA, 2482 bp, Cannabis sativa
tatatatatatatatttcaaatatgcacaaaatattatgagtgacatcttaaaatagcatatttttgttgtttttcctaattggatagtctgatctaggtggcaccacgtgagtgattaaaaaatttgtataaaactattgtttttaggtactgatcacttacgtaatatcacttgattcggatacatatctaatttcattagaaaacatttttcaaatgtttattattatttgttaagaatatagattcatgcaaggttgactctaaaattaattgggtctaaaataacaataaaattattatgatatttttaaaaattatttaaaaatatatttatttattttttttgtttttgggccctatattagcacctagcctactttaatctagtgtcgaccatatcctaaattcacgtgagtaaattattaaagtaatgtatgttatttaaatagtacttccgagttagatggcaccacgtgagtagttaaaaatatgttactcacctgttaagcatcgctctaatcactcacatagtaccatatgtctcaagttacccaatttctttcaaacacaaatcatttttactattaatgttatcatggataattgaaaagggtagaacttaacttgatgattgatggtgatgaaattcagcttacaaacacaattcaaaagagattgaatgtatcatcaacacaattgctataccaatcagcaccattccaagcagcaattctatttgtatcagggccagtggtagaccaatttttgaccaaaaagaatgtgtttgctcaccaatacagtcccattgttttggcctttataatcctttcttgcataatctcagtatcagtgaatttcagtacttttttggtaattggaaaaacatcaccagtgacataccaagttttgggtcatctcaaaacttgccttgttcttggctttggctacacattgcttcatgacccttttactcatagaaacattcttggaattttggttgccatttttggtatgggattgtactcttatttttgtactcaagagaacaaaaagaaacaatctggagacactatctccttgccctctcaggtaattaattcattaattatataaatatttagctatacaaataataataatataggaaaattcttttatgtagagatatatatatatagtgtacattttataagtttttgtgataatttactatgttaaaaatatgatgcaaatagtatgttgcatgcgcgtataccaaattagtttattttatacgtatgtgtaaataagttgtttgaatcttaatttagtcataattaagttatcgatagtataaaacagcaaaatacaatatacactacttgttattaaaattttttaaatgtttaatattgcattataagtggttataatttttcatgtttattaaattaaatttattttatattaaattacactagtatgccaatattttcagaaaaaaaaaaattacacattttatggcttttaataatatagttttttttttcctttataaaaatttgttttataagaaaaatttaaaagaaaattaaaaaatatatatgaaaaaaatagttaagggtaatcaattactttattaaggtaactagttactttacactattctttccatgtttttaaacatttaaaaaaaaatctcatcaaataattttcttgaaaaaaaaaccacatttttataaacttgaatatagtattgggtattgtttgtggcttttctcaataattcactttgaaatgaaagttacctaagtcttaattataaatattgaatttttatttattttaatttttcagatcaaagataaagatgggaatccactactattgggagggattaagaacatggttcaccaagaaaaagatagtcatgaagtcaagaaatctgcaaaggactctcttgtttgattatacataaatagctaggctttgggattaaaggctctttttcttcttaatttctttctttctttcttccaatttgtatcactctcttctattttcttcaatttgaagatatgataaattgagtgtaaatgaattttgattctttaaaataaaatataatcttatacctccatttttctctttgcaaatacaactatgggattcatctattttcaatatggacatatatattcaatatatgcatggataattaattaccaactttataaatgttacttaaaaatcaatttcttaacttggaacctttttcccctttcccttttggccatatatacatgctataatatgcccctctcattttttatatttttttaaaaaaaattatattgaatttttttatattttctcttaattttttaaaaattatgttttggccccttaatgtaacgtcctcgctttaagcatccattgagtccttacacccacagaatgaatggctctcatacacaggtacgtcactttggctgcttc

SEQ ID NO: 16327 - DNA, 7721 bp, Cannabis sativa
gcgaaattactatcttactaataatagaaccgctaatacaattttgagtcacgattcacatgtaaaatactatggcatgcaaatataggaagaagaagagaattgaaaaaggtattattaggattcatcaatcaatttgaattattattattcttcgtctgaaaatcctccaataagcatctttttctttctttcaaaacaaaattgaacatctggttttgctcaatttgatatttttacagctgtgacctaccaaaaagaaaaacgtaatttttatagaatgttataatcatttcatttccgtacaatattaattggtatagtattgtttggcaccttaaaatacctaatagcgatactcattattggaaaaatattattcaaattctcatttttcatgtctagatatttttttttctacaattctattctaagtaaggccaaaaggagtagattttaaatattctcctcactcataatacatagaaatacatataattaaattttatatttattattaaaaattaatgtttttgtaattaatattttattttatgcctattatttttaattgttaatttttccatttcaaatcaatattcaatggtttttaaaaattaaaaaaaaaaatcaatattcaacaataaaaaattatacttttcatattcaaccaaataatataagttctacaaaaattaatttaaaaatttctacatacacaactaaatatagtttacaaatttatgaacaactatatacattatattttttttgcattaactagatttttttttttaaaaaaaaaaaacaaggatttgtttcttaaaaattgagactcttataatgagtagaaaactaaattcactaattttatttttgttctcaaattttggtagcacatagcacgtgaacatttattgttataaaattaaaagtaaaattaagttttcaaaataagtattggaactagtctcttatttttggcatggtatcgttatccactagcttaactaattttattatgtttttcttttttcaacaaaataataacaataatatcaataataaaactttcttaaacttcaatgtatttaagttagagtggattcacatgcaattcaattataaaaataaataaaaaatcttaacacaaaaaaaaaatctaacaaacataaattactcaggattcaattataatgaaaacttttattgaatatctatcccatgaggaacattttcatttggaaaacaaacaagctaattaagtgggtagttgctggtaaatgggctatgccaatacaattgaagagtgaaaattaaacgttataatgtctataacttgtgtgtgttgatcatgattgagtgttctaaataacaagactagttccattgattagatttattccaaagagaagaaaatataaggtactgtaggttgggcctaatcatccaacaatgaagctggcaaattgggtagcggcggcagcaattgagatttggtgcgtttcgggacgaacttcctcatccaaacgtgcttcccattaatggtaaacttggctttattatgtccatcgagtatgacatcaatggtggcagccgagtaaaacacaatccgagcaaacagagactgctcagtaggctgaacttcttgcatatgcagtgactcaatgcaatccccataagtccttgtgaaaaactcccttacttcccactcataaacatggtatcctttagaaaaagtcacaaacatggttcgatcatctgggggtactactactgctggtactgaggacgaggacgaggatgaggatgataatgatgacccatttagctcagtggtaccaccactactgccactgctgctaccgccgccgaagtgtagcccagcacgacgaaaattggagtgaaacgacatggtgggcagcaccatgttatggttctgactacttgtttcgagaagtattgcctggtgcattaagtcactgaaagctctataacagacgtcttctacgatgttggtgaactcttgagctgagttttggcgattattggccttgaagaattggaacgtgatgtcgtttttcatgaggcattgtatgagtggggagtcgttgaggctggtgatgttgaggtcgagtgaggccaaaaggttatcgggtgtggtgagaagcgtgaagcaagtcacagcctcgtcagccagctcgtttatgagaaaatggggtaaggttaacattcttttgattatgctgtggaaccccttttgctctagccatagccacagacccaacactcgcattgactcggctgggtccctaaagaggacgaacaccaaaagactgtacaggtcacggtctatggtgtggaacctcctgaactcctcttgggacacaggaacagtgggcatcctattaaaacaaaaaaacaagagaaaatgggtgactttcaaaatcatagaatattcaaacaaccgaagcaaaatcacaatagtattatatgtatgtatagtagtactgagtgagcatggactaagcagagaccacctgtacattttatggtttttgaccaattgataaaaggttatttctcggaatcaatggctgattctctgcaaccatatatatataatcttgagagtgacccagagagagactactcttcttgagtcttgtgtagtagaagtaccagattctattacatatatatagtcaaattttgcttggagtcaaattttgcttacttagtatgagttggtgtaataatgttgtttctatcattttgtaatctactttagaatggatttgttagctttacaaatgtcattaatgaatattaatccattatggtatttatataataaatgtgtctaaaatccttttaaatttccattttctttttattttttaatttttgaatggatttttatatttcctttttctgataattttattttggcaatgagaaaataactgaagcaatgctgacctgtcaaaaaagaaggcctctcctaatctcctctatatactcttatcaagaatccttttcacaatacattaattccatcaaaccttggcttgctatgaatagaaaatcattccttgaagagtttcagtcttaattgtttggtttttcagtttacataatagtacactacatcctctgtttcaatggctgacaatggtggagtttgtttttaagatagtttggtcctcagaagagagatacatgataacaaaaagtaaaatgtaataatagtttagtaaaaattatcagtttataactcgttgatttgtctcttttatattgtaataaatgaaaggagagaaaaataaaagataaaacagctttgtgttaagtctctttctacgagttacgtctactcatgtgcatgaatgacacgttcttcgtgtgtatctttgaaaacttttcccattaatacgtagtcaaaataaaaaaggtattaaggaaaaggaaaaggcaaagacagtacgaagtaagtagaccattgtttttcctggtattgttttatgttattgtttgctataaaattgttatgagacaacacaaaattattataaattccatttttcaacttacattatatctctaatacacaagatttatataaaatacctatgtatatatatttatctaaatgcttcttttacaagtcataacaaattgtccaatgcataaacccgttgaccaatcaatgataatgataaaaacttaaaacgcatcttggcttatatattgaattaactttgttacatataattctgacaaaccaaaaaaattagcatataatactcgcattttcttcaaattcaactaaagatatacttgactatgtttcagattatttaatgtgagtaaccgttgtatatcaaagaaataacacaagaaaatgcctaataatccgagaaatatatatatatacaaagagcaaagaaagtaacatttagtacttgtagttatatctgtagaagtatgagcattaatacataacctctgaagtgagtaataaatattaaatcataaaaaagtacataactaagtagactctgatgagttagagcgtaataatgaagatcttcaacacaaaagacaatctccaagcatgccaaaaactgaactttcagatgagtctcgaccctttaatgtaattattcgtcattgcctccactagagatagccaagcctcttaagttagctgtggaagcagcagcagcggcagcaacagactgcagatccgacaaagagaaagagcgccatgaagattttctttggggaggtgatgatgattcatttgttggtgatcgcttaacatgtggatgcagaggtggatgcaatggtggacgactgcaagatggcgaagttgaaattgagctcgagtcctcgttactaatgttgttgcctgagctattcaaagcttcaccatgtaggaacgagcttcgacttgagctggttgttctctttgaagttccacttcgaaggtccttcaatgagtaggtcctgtttttgtctaagaggctagagcgagctattaaattcttgcgcttcctggtgtagggattttctggctttgcaaactctttaatagatgagacagatgtagcatctgataagcttgtgaaggacttggatttgccgttgtagaacttggatatgcctctcctgaaatataacaaagattgttcgttaaatccattaaatcaaataaattcatgcaactagtgaaacagttcataaatggggttttctgccttcaattgcatgcatattaatacgaattaaagaaaaaaaaaatggttttcatggataaggggatcgtattcgtgttcccttttatgttgttcactctttaatttcaacactacttctcagttcaattcattaatttgaaattgaatatcttatcagtaaataaaaaactcaatactaatctcaaaggacaaattggcaagataagtacaatggacagccgtagttgcctgtaccagtccaaaaataacaacaatatctattttgaatcatcaaacattgaagaacaaaagaggtatactatgccccccatttttcttaccaaaggatttttttcgaaatcttttaaagctgaaccgattgggaacttcaaatcttaatcttagtgttctgtcttacctagtgctctgtttgtcgtctataagaaaatcctaaagatatggaatatcacagctgctctcaataactccatattaagaaaccttaaaagtcacaatgttagatttgtcactagcttatctttctcatgccttgttccctattttgagccatttggccagctctacatgctcttcttgtttgctggcaaagtataacagatggcaaaaataaatttgaactcttctgatcattagagatcaaaatgaccaaagacaaaaaaacaaaagttccagtgaagaaaccaaaagaatccaatgaagtataaccgaaaagcaacacctctctctctctctctctctctctcttgtttgattagcctttctcaatgtcaagaagatcagtcacaacaaacaaggctcaaacgttaattaacacataaatgtagccaaagaaaagccttaaacccactcataagagtcctaaaactccaagtaaattaaagcccattttgtaaaaaatagattttataaaaacatttagtagggaaccataaaacgaccttctaaatttacactaaccgaacatatgaaaaatcaaagtggctattttggcaacttttacactttctcatgttgttaatttggcaacttccccatatttaaagcactcccagatcaaataaatatgataaagagttaccgaagctaaatttccaaactcccaaggtctaattagttgaaagtgaaacaacaatcaacttaaacaagaacaaaaatagtaacccaaagggtactcaaaaaactgaagcaagagccgagagaagtaatcaaaagggtatcaaaaagaaacatacttgatgggaagaacttcctcaagcccctccatggtgtctaagggtcctttaaacgagctctgagcctcatcatcggctgaatcttcgccgttggaagactcatcagacacgtcggaattcctcccaagagaagatgagctacaagattccatatccggctctaatcgccgatccccggagaagtttttggggtccgatgagtcgtagatcgagagacagggcataccgtggatgaatctcgaccgtcggatcgtgtctcctctattgctctgcagagcaagcgacatgattcaaagttggaacactgaatcagaaggaagagtctgttgagtgtgtgtgtgagagagagatagaaattagggaaaagaaaatcagatagagatatagagaggattgaagagcacatgggggaggcgatatttacgccattgttgtgatattcttttgctcaggagagaaagaaagaaagaaatacctttttgtggaggattgaataatttatatctataaggataataataaaaaaatatatttatattatatataaaaagggaagagagagaataaataaggtgaaatgaaaccttatcctgattagaatgaaccaggtctgaattgagacgatgctccattggaatgagtaaaataaattatctgcctatttatccacttatttaatttaaaattatttaaataaaaatctagtgttctgagatgttgtagaatggaatacgatgttttaactctgtacaatgatgtgtttgactatattgctttgacccccgttcatcctacctatttatatacttgattatcgtatcgcgtgaaacatagctagtgacatgggtcccatctctggctttctctatgtccattgaatttaagttggtgttttcttcttatcgatttatttttcatatattaatataaataattaaataagaaattacactacattatataattatttactaggttatggatacaataccctgttttgacctgataaatatttggaaaaaaaattaaaatttcccgttcttaattctatggttagtatgggcttaatcagcttaatgacactttcaacctcactgtttgtaactgtcctaacaaatttattgtttggtagtttgttaccagctaatacttcaagtctgtaacatgtttggttgaatggaatcaaagtcactattacaatgtttagtttgtctttctaactttcgtagtggaattttattgtaatgggcattacactaatgttatgaattctcattacactcttacacctcatgaatgaagtattacaataacaactaaataataaaaagacactgcccgggataggtgaaatttgcccgtttgaggatacagccaatctggtggtgaaaaaactgcctgcaaatttgcccattccagcgtcaacagctgtggaacctgaaaatgactcctcctccggcgtgccttcggttacggtacaggcagcagacaaaggagagggacaggaacctgggtcggatgcagtaattcagaatgataccagctacaacggtcagtttatttcctcttctgctcaagaccaacctggaaagaatgcttcaaagggtaacggcacccccaatttatcaaaggagtcaaacgagaaggattctaagtcaactttgggcctgggctcctcatcttcgggcccaagtaaattcaacccgtacacaactcttctgggcag

SEQ ID NO: 16328 - DNA, 9849 bp, Cannabis sativa
tctccagacttacacagggaatattttgattgctgtgaaccctttctgtagactgcctcacctctatgacagccatatgatggcacaatataaaggtgcagcctttggtgagcttagtccgcatccttttgctgttgcagatgcagcttataggtaaattttagcttttgggccttgaattctttgtgttttttcttttttgtttatcgaatattggtttttggttgcagactaatgattaacgacaaagtaagtcagtcaatattggttagtggtgaaagtggtgcgggtaaaacggaaagcacaaaattgcttatgcgttatcttgcttacatgggagggagagctgctgttgagggcagtaggactgttgaacagcaagttctggaggtactgaggtttagattcttatttgtgcagtgagtggcaatgagatttcattgtaattgtaactgtttgtactgtgaatttggaatattttgctcttttatttatttctgtatgttttgcagtctaatcctgttctagaagcatttggtaatgcaaagactgtgagaaataacaactcaaggtgagaacattgatctatctgttccttttgcatttattacaaattggtgttagtttatatgcttgtgtacattttgtttctcatttgcatgttatattgcagtcgatttggtaagtttgtggagattcaatttgatcagaatggaagaatctcaggagccgccataagaacttatttgcttgaaagatcacgtgtttgtcagttgtctgatcctgagagaaactatcattgtttctacatgctttgtgctgcaccaccagaggtaaaggatctttgactgattcatctctcagcttcattataagaaacggttgggcatgataagcatttcatccttatgtgtaaatgtttatttgtttttgagttggaaggaatttggtaattttaacctgccatctaatattgataaactagatttcttctaatttttataggatggttaaacatatttgtttaactaagtttcctgttatttcatatcaatttttacaggaaattgcaaaatacaaattgggacatcctagaacatttcattatttgaatcagtcaaactgctatgaattggatggtcttgacgagtctaaggagtactttgcaacaaggaaggcaatggatgttgttggaattaattctgatcagcaggtaacttgttggagctggcagcagtgatagttactatttgtaaacacgatgtctacttgaaatcttgtctcaattggctttcttctttttaggatgcaatatttcgagttgtggctgctgttcttcaccttggaaacattgaatttgcaaaagggaaggaaatggactcatctacgccaaaagatgaaaaatctcggttccatcttaacactgctgctgagcttctaatgtatgcatatattaacatgattacagtctttgcctcatgcaattcgattgtattttgcatatattttctgtatttaaaaaatttagctattgaattatatgttttgtcaggtgtgatgctaaggcactggaagattcactttgcaaacgtatcattgtaactcgtgatgaaacaatcactaagtggcttgatccagattctgcagctgttagtagagatgctttggctaaagttgtttattcaagattgtttgactggtaagcttttgtatggttaagtataacagtaagttttacccattcctcttcctacttatattttgatttaaatttagctttagcaaagataaaaaaatcattgaatttggtaatgggttttgttttcatctttcgatgtaattttttgcccctgtttctgcaggcttgtggatacgattaatacttcaattggtcaagatcctgagtccaagtatttaattggggttctggatatttatggatttgagagtttcaagacaaacaggtgcttaactggtatgccttttgttttcataattgacataaaacataaagtgaacaaaataaaacgcgtcaacgttggtaaatgctttgaaggcttttagcgctctttttgagcagttagtagtactggggggaaccattttcttcttgtacctctcctctttaggattaaaactatctagaaaggcatcactcttaaaaagtaagtagtatgagtacaattggtttggaacataaattcttagtgttgtgtgctggttttcttgtggtgtcttctatttttctggcctttagatagtccaatgatcaacctatgtctttcaagtcttctgtacatgattttaacatttgatcaaaattcatgtacctatcacctgtgagagttaggatgaatggttaggtttgtcgtttgctatcctaaggtctaggatttgattcctcataagtaatttgtgtacctacaatttatgtagaattttctgtctccctgtaagataaaagggttcattgagagaaatggtttaaaaaaaagggggaaatgtggctggcagtttactttgtgtttcatggaatgttttcttatgtacagtttttgtggtagataatgccatttacaagttcaaattgctcaatagaatattttgagttaggttattttgtagttggtctaaaataaaaatatgtgttgaagctggacactaggtgcagtgagctgaatgttgagattctaggtatctcgaggggaagcaatatatgcgtgcatccctattactctcgggtgatggcctatatttgttgcagtaagtagaaattggtggcagtaacatctgagaaacaataagatcaagtcaactaattgaaagaacagattgtctaaagtgacttttatccttttggaagtttgattttcatctgacacttacatgttgcagtttcgagcaattttgcattaacttgacaaatgagaagcttcagcagcatttcaatcaggtttgtttgtgcacacttctcatttctttagtgttctagtcgttctcttgtatatcacggtaaccttgttatatgtattatattcttgggcagcacgtcttcaaaatggagcaagaagaatatacaaaagaagaaatcaattggagctacattgagtttgttgataatcaagatatccttgatcttattgaaaaggtttgagttgtctctgtgattttttattttattcttatttaatccattcatttaaaatttaaggtatagagaacttcttttgtacaactcttgtatgatttttcacttgtcattgagttactgctagtactcatgggttctatttttattttatgatttttactccacgtatgtacatatgtacttgatttttctcaaccacttgcatatattatatatttaatatttttatccttttaaaactcagaaacccggtggcattattgctcttctagatgaagcttggtaagtaaactattttagagttcgacttttaatataatttttgttgacatgtgacattaggtctattattcagttgttccataccatttctatgaactagatttgtatgtcatattgatgaaatatctgtatttttgttttgtagtatgttcccaagatcaacacatgagacatttgcccaaaagttgtaccagacgtttaaaaatcacaagcgctttaccaaaccaaaattgtcacgtagtgacttcacaatttgccattatgctggggatgtaagctatagaatttagatttagtaagtgatgataaatattttagttggatgatatttatgtgtggctatttataatataactttcaggtcacttatcaaacagaactgttcctggacaaaaacaaagactatgtggttgctgaacatcaagcacttctaagtgcttcaaagtgttcttttgtgacatcattgtttcctcttttggctgaggattcatccaaatcatcaaagttctcgtcgataggttctcggtttaaggtccgagtgttcttttttttctttttctaatggtaacaaattataaatttctgaagtattttggcttatgaatcatttatttatactccatacagtcacaattgcaacaattgcttgaaactttaagttccacggagccacattacattcgttgtgtaaaacccaataaccttcttaagccatcaatttttgagagcaagaacgttttacaacagttgcggtgtggggtaaggatgctgataccgatatcttggtcattgcatatattgttttggtttagtaattaaggctgcctacttttattcaataaatatttttcagggtgttatggaggcaattaggattagctgtgctggatatcctactagaaaaacatttgatgaatttgtagaccgatttggtctccttgcacctgaagttttggatgggaggtagacctttctcttttctgtttcattatttgctgtactgtcatttctaattttctcatttgtcatttgtagtactgactaatttatttattctgtatttttcaaagtagtactgatgaagttgcagtttgcaagaatctcttggaaagggtgggacttgaaggctatcaggtaatgtttgacaccaactaaaaatcctttttaagttgcagttctactactgttcctgattgctgtaaactcttgtggccgtagcatggatttcaaatgatatagaaaatacatgtaccttgttcttttgttcattgatcatgtgaaatcattgttgtaattggattttaggaactttttttttgtaagtttgtagtaaggttttaatgcattccttgcaatgttttggtgcttttgagtcaacagcatcaacacaagtgtaatgtatactgtatgctttgtgacttgaatgtctgttcatgtatcttcatacctgaaaacttggctgcggcataattttatcaccgattgttcagtcacaattgtactttattgcctccaactcatacagttgaatcaaattaactctcttgatttcattgattgattcattgataacgttgttcaagtcttgcttcaatagctgtatattttgtcactgatttgtctgtgctattatatatgctttatgtttctgtgatatgtggttttctgaactgaacacatcctattgtcattttcagattggtaagacaaaggtttttctgagggctggtcaaatggcagatctcgatgcccgtaggagcgaggtcttagggaagtcagctagtataattcaaaggaagatccgttcctacttgtcacggagaagtttcatttctcttcgtcgatctgcaattcaaattcaagctatttgtagaggtaagttgcatatttctttagcatccgaagacttatgtattatagtctcttaatctaacgaggccgtaggaatttattgcaatgcttataaggttttatattctacaactgcaggacaacttactcggcaaatttatgagggattgcggagagaagcttcttctttgaagatccagaggaattggcacatgcatgttgcgagaacagcatacaaaaaactgtgtttctctgctgtctccatccagacaggcatgcgtggtatggctgctcgtaatgtgttacgattcagaaggcagaccaaagcagcaattattattcaggtgaggcaaattatttataatgcgaagaagtaattttaaagtgtagaggtggttagagataatttcacgcctttctgttgctatacatattccaatctttatttatttgatgtatttctctacccaaattttgaccatttttctcttctattgcagagtcaatgccgcaaattcttggcacgtaatcatttcatgaatttgaagaaagcagcaattactacacagtgcgcatggagaggaaaagttgctcgtaaagaacttaaggcgctcaagatggtgattattttattctttatttgaaattaccatatgtttcaatcctagtcaacatgtgcatcatatatattaattatcagaattcaataaaaataaaaatatattgcatgaagcatactcaatattcttttgttgttgtctcttaaagcaccctactgttaatgatatttgtttgattgattttaggatttcttaaatcttgaatgtttcatatgcaggctgcaagagaaactggagcacttcaggcagccaaaaataaacttgaaaagcaagttgaagatttgacattgagattacaactggagaaacgcataagggtaattatatatttttctttacttgtgtgaatccttcctcatgacttccattgtgccatactctgaatgtgtagctttcaatagaaatgtggtctttctctaaattatatatgctacttcagttaagcttacacagttcaggatgagctttgtagttgcatagaatgtagtatatattgttctagaaaacaggcgagagaccaaagaggttgatggaaatttgtattttaatgcacattttttaagaatgttttgcagcgaacgtttatatttgttgttgacttctctttgcccttctattgtaatcttgcaggctgacctggaacactctaaaacacaagaaaatgaaaaactacattctgctttgcaagaaatgcagaatcaattcaaggaaactaaagcaatgcttgataaagaacgcgaggctgcaaaaagagaagctgtaaaagttccagttatacaggaggttccagttattgaccatgcaatgttggagaaacttaatggtgaaaatgaaaaactcaaggtgaggtggtcgcatttgtaattccaaatattttgaatgcggtatcatttttaatttatttcttgtaatgttaatttattgaaatccatgtaggctctggtcagctcattggaaaagaaaattgatgaaacagagaagaaatatgaagagtcgaacaaaattagtgaagaaaggttgaagcaagctttagatgctgaatctaaaatcattcatttgaagactgtgatgcagaggtacaattaaacttcttttatgagatttgaacgaatttaataattaatgttgtttccatattttcaaactcgacctctctccctgtgtgtatgtatatacacacactgatatgatagttttttcaaccaatcacatttatctaaactgagaccattgatcactgttttctaaaacagtgccacgttacattttgtaatgtttgggtacatattttaggtgtacatatcattacatatattataatgcatataaatgtaaattgaatagttaatttcttgccttggtgattgaaactgacattgaaactgaaaacaggcttgaagaaaagttttctgacattgaaactgaaaacaaaattcttcggcagcagaccttgttaaaaacacctgttaagagtacagcaggacttccaccaactccggcaactccagctactccggtaatgattagctactatgttctaagaaatagatcctcatcttctgtcaatttatctctcatgtgaattatttcacctcttatctcagattgcaaatggtcatcatgctaatgaggagagcagagcagatgtaattgatttatttatatatgtttctgttatattcttatgatcttaaaaggtccacattatcctctcaattttgtgataattttgaagagttttctttgcaggaaccacaaagtactactccagttaagaagtttggtacagaagctgatagcaagttgaggagatctcttattgaacgtcaacatgtatgtggtttgagtgtctgtttattttgttttatttttcagtaacgaagtgcttgtttatgagttttaacattataaattctgacatttctatgcaggagaatgtcgatgctctaatcaactgtgttgttaaaaacattgggtacagtcagggaaagcctattgcagcttttaccatttacaaatgtcttctccactggaaatcttttgaggctgaaaggacaagtgtttttgatcgtctcattcaaatgattggttcacaaattgaggtaaaaagaaatgcgtacttgggtgaattttgtttatggtcagatcaatctagatttgaaataaaataacgagagatttttgatgttttttgtttggttaatttgttttggacgtcagaatcaagaaaacaacgatcatatggcttattggctatcaaatacatctgcactattgtttttactccaacgaagtatgaagggtgctgggagtggtgcaactcaacaacgaaaattgcctcctgcaacatctctctttggaaggatgaccttggtatttaaaaattcttcatttggttcacttctatccatttattttggctcacccgatttttttgtgttgctaagttatcattttacttacgatgttcttgcattacatttcagggtttccgttcatctccctcttctgcaaaccttcctgcccctgcagtagatgtaatacgccaagtagaagcaaaatatcctgctttgctattcaagcagcagctgacagcatatgttgaaaaaatatatggaatagttcgagataacctgaaaaaggagttatcttcgttaatttcattatgtattcaggtaatccaaatttcgtataataggttactgattcttgccattttattacctttacgtaagctccaactctggtcttctggtctgatttatgcaatataacccttgaaattttgctgagtttcatttggatggcataatatttaggcgccaagagcatcaaagggagcactaagatctgggagatcctttgggaaagactctcccaccagtcactggcaaaccattattgaaagccttaacactctccttagcacattgaaagaaaactttgtaagaatcaattgtgcttaattatagcatcacttacttttctgcacttagaagtagtatttaatcattcttatgggaatctctactttcaggtgcctccaattcttgtacagaagatattcactcagacattttcatttatcaatgtgcaacttttcaataggtaacaataatacatacgtgaattgtataaacactaaaatggagagtttaatgaaaaaataaataataattaacctttattcttttcagtcttcttctacgtcgtgagtgttgtacattcagcaacggggagtatgtgaaatctggattagctgagttggaattatggtgttgccaggcaaaagatgaagtaaatgattttctcttcttagctaatttaaatttcaaccttttcaatgcattatgtgataatttgcataattggcccatccatatgcacaacacggattttattttgtcttaaataatgttcggattttcacgagctacccttggtttgcagtatgctggttcatcttgggatgaactgaaacacatcagacaggctgttggattcctggtatgtttcccatccttaatgtcaaagcagtattttacatttctgcagctacttagcttactcctttatctccacaaatccttatctgcaggttatacatcagaaatataggatctcctacgatgaaatcacgaatgatttgtgtcctgtgagtttctcaatctcacattctgtagtttctattgttggacattaatgatgatagactaccaaatttatttaaaaagaggatttttgcaacatgtttcaaaattatacagccaaaaccaatagctatctcttggaaatattttcaatggatgttgtgttcttaacataaagtaatttcatgtgcttaattccaagcacatattttttggttttcacttctttggtacatctttataaaacacagaaaatcattacaccagttcttgtctaatcataacttattttgca

SEQ ID NO: 16329 - DNA, 3696 bp, Cannabis sativa
  modified_base (2763)..(2766): a, c, t, g, unknown or other
tatcttaaatagttataacgtacatgaatatgaaaaaaaattagactaaattttttttcttaataccgaaacaaatagagaatgtatgagtacattccttttaagtttttaaaaaattaaattgtagaatcacccaatagaccatcatataacaaaacttcgctactccgataagtagccaaagtttcattttctttaagtaaaaaaaacatgagaaataagcggccagtctaaattataagaatagaaccgcctctttcagtttatggttacactaattaaagtctcaccagaccaattatttcactatcttttcacactctcttcacgtggacatctcgtgatcctaagtggagtgggtactcaatacacgtatatatagatgtatgtatagcgaaagtttttttatattcattgactttttttttcatatatatattgtatataaaaatatctgtacaaattataaatattaaagattccccatcttagaaaagtatatgatgagagaacatttagattcttcatctctattttttttttaattaaaaaaaaaaaactcacactcacactcatccacggatatggaacttgtgcccttaatcacaccctatgagcatccatgtgccctcatatttaatacccctaattgggccctacaatattactagattctatacacacacaaacacctatattatcattatcataattatatcatttcctcttatattcttttatatatatatatatatattaagacaatttcttatgatatcactaccatagcttgtctttttctgtctgatcctctctctctctccccttgacatctctataaataccctcatcctcctttcatttcttcccaaccacaccaaacaaacatacaacatacatatatatcataacccaataacaagcttgctatatatattcatatatagtaaccctagctatctaggtctatatatagaaagagagagagagattaattatgtctggggtttgggttttcaagaatggtgtaataaggctagtggagaaccaaggagagtcttcttcatcatcttctgaagcaggtgggaatactagacaagggtctcgtagtagaaaatctcttgtacacttgccaagtggacaagtagttcaatcatattcttttctggagcaaattttgaccggtttaggttgggaaaggtattacgggggtgaccctgacctcttccaattccataagacttcctccattgatttgatatctcttcccagagacttttccaggttcaactcagtttacatgtacgacatcgtcatcaaaaaccctaatatcttccatgtgagagatatgtaattaattaattatttgtttcatctttaatttctcttgtacgtcgatgatcgatatcgaccttttattggcagtttggtacgtttgtttgtttggttttcatatatgttattatcattgtagaaaaatggagtgtttaatttatgattggttttcataatcagttcatcaatttagtgttttttttttttggtttggaagtttgtgatcatcaccatcagctctgtcatatataaatatatatatatatatatatatgatgacttttgtaaacatatatatataattcaataaatcatcaatatcaactattattatcattctccgtgtctctttatatttttgttgtttttaaacaaaatctaattctaatgataaatatatatataccatacttaccaatgattgttagtttaattggggtgatggttcttgcgaaaacaaaccaaggaaaattcgttcgaatagctgctgtatgccatgtcatcatgatgaagtggggttaattagggcaatgagtagtgtgtttcaagcgaagagacaatacaaatttaatatatttcttatagaatttttctagggtaggacatttactttatagtccctacgtgtgaggcattcagctgagtaatgttattggtcaagtgtataacattataatagtactaggtgcaccttattattattttcattatggattttataatggacgcatattttattttttttttctgtcttttctaaagggaggcataaaattcttttgataacaatcaatggagaaattacggtggagatgatgtatggtttacttgacatataattagaacagattagaaatttctacttcttcctttttttttttaagtgtactaaaaataggcgaccattttttacagtcagtcagttcataagactgacacgcaaaataagatggtatagacatcagttataaacggtcagtaaccgttaacacttacttataccatcctatgtttacagaagtcgatgatcagataaattttgtacatttgagctccctggtgagaccgagaatgtcggagcatctcttttaccttttccatcttctgctatggaaatcggcaccggcaaggcggtctcatggtcgccggcggtgaattgaagcccttcgctttcttgctgaaaatgaaataatattctcaatcaaagattttttattttttatattaagaataaaaaagttagaaattttaatctcatgtatcaatgaccatagtagtactcatggacttaataaactttagatggttggcaatttttctatatgtatatatatgtttatatttataataatgacttctttattatacgacaacgccatgaaatgaattgatagtttctaaatacttgtaaatatatatatatatatnnnnatatatatatatattaattaatagatagatagatctagagatcataatattcatgtgtatgtgccacagaaaaaaaaaaaatcatgtgtgtacgtgtgccagttctgcaagtatatgtgtcatgatttaattggtatatatacgagtcgaatattgtttttaaaaagatagatatgacaatggatggtgattggaaatcatttttgtttgtgttctatatatagtatcttacgcatgattacttgttttcctttttcatttttgaaatggctttgattatactttcaaagaatttttaaagtgagtacatgtaaatctaaaagaaaaaaaaaagaaaaggaaaagaaaagaaagaaagaacgaaaatgctttgatcagaaaaatagttcacagacccctaatttataaaaataataataagtttacatggctaaatatttgatgtgatgatatttcttattaattgtatactcactacaaaaaactggtactttttatgtcaattttttagttacaacataaaatttttatgactaagggctcgtttggtacgccgtattgtattgtaatatattgagttgtattgtattgtattggattgtattgtataattttaatacaatattatgtttggcattgaattgtattagtgttgtgttaaattatacaatgtttggctcacattatattgtattgtatagtattaattaaaaattttgcaaaaattcaaaaaaaaaaaattataaaaaaaattcaaataaaaactgaaaaaaaaaaattaataacttaaaaaaaattaaaaactctaatttttttaaaaaagaaattaaaaatgtaaaaatgttgaaaaaaactaaaaaaattaaatcaactaaaaatattaactttaaaaaaaaaaaaaaaaaccgtgattataacccgaatattaat

SEQ ID NO: 16330 - DNA, 9163 bp, Cannabis sativa
  modified_base (1305)..(1317): a, c, t, g, unknown or other
  modified_base (6059)..(6059): a, c, t, g, unknown or other
  modified_base (8904)..(8904): a, c, t, g, unknown or other
  modified_base (8946)..(8960): a, c, t, g, unknown or other
taatctgttgatataaattttaccatgcttctgttttatttattaattaatttaaaatgtttttgatacacggcctcagtacaaaatcaggcttgttaatccatttgcattgctcacaatactgaaatatggatgcttgtgtgtatatttctatcttgctttacaaatcatctttatgagtttttgagaaggtctaaagtataaactgtattgatttattattacaaaataacatattcatcatgctgctaacagtgcaagttttatgttgcagtaaggtaactattgcacttggatatgtggatcctgtctctgtacttccttctcgtatcaaagtacaagcatggccagtgcaacaatcgaagaaaaacagttcgactacgagtagaaaggaaaatgaaattacggaaggtcaaactggtccagttcgcctgctatatgccgaggatgcattacgaactatgagtctaccagaaggtctgacctatttgttaagtgaacattttatatttttacctatatcagttagaattacaaatggatgtgattctgctcttcttatgacttggtttattgtgtctgtaatgcgtatgtgaattttttgttcatcaggtatttcatgccacccatgaattatgccttgagaaatgtttactataatgcctcctatagaaatagaatattgccactaattgctaccaggatgttttaaattacttatttttgtgttgtgtttttatttcttatttctgctttctctctccagcttatgcagagattgtgctgaatttgcctcgagctctgcagcaaatatttcagcagagggcttccactacttaagtactgcttctctctctctctctctctcttcttctataatggttgatttattggactccagagatcttaaagaaaattatcatgaaaatgagatatatagcattactcgtctattctaaattaaaaaaaaaaagttattcttatcaccttttctgtatgtatatatattagaaacatatgactttagttttgttactgtcactgactatttgtatcacactgtttgaacatattgatatgacttcaatatcaataacccaatggtttacatttttacataaagaatgaaattattgtgtactattaagatgtccaaatcttttcaatcaattactaattagtatttattttctttagtttcttaattcattccattgaaatgaagcactaagaaaattcttattttttttcatttttttttcatacattattagcacaagtttctaactaatatatatatatatnnnnnnnnnnnnntatatatatatatataatgtttgttaaaacctttgaatcgttttaatgatacactatacctatacttatcgactgaaaatacctttgaactagtcattttttatttgtttatactgtaagaattaatatttatataatatactttatctctgtacttataaatatatatctgttcacatgtgtaaacatataattaggaaaatttacataaaaatataaaaatctaaaaatattacccctatacttttattattgttatattcttacctttgtttttgtttttacatgcacgatgtcattatataactttcacacattatttatttttcctccctttttatcatctctctctctgtttttttttttttcaatttcattttcatttttctttgtatttttctgtttgaaaacttctcccatgatcaaaaccatttttgatccaaaaataaaaaaattgatttcatccatcttcctcaattacctttctccatctactgaccacgtttttttttttaatttttttttcttttttttgttctataaatggccattacttgatcttcatcttccctatcaccattgctgaaaaaaccttcaaaaataaatgttaaatctcttgccaacaaatctaaaggaaaatgacttgttgttgaagatgatgattcagactttgctcagcctatcaaaaaaagtgatcgtcgccttgttgagaagaaatccaaagttaatgttgctgaaaatatttttctcactgaagttaagaaagagaaaaaccaagctcatgagaatccgaaggtttctttctagtttctttatagttttgctctaacatttccctaacttattacttaccacaatcgagttttttctgtacgagtcgtgtatttctaatttcgagctctgttttgagctctgttttttttttttttaaaaaaataataatattatagtagcacaactattatttaactaatagacaacttaaatgcaactagaaattaaaaatttgaatggggatcatcatgaaaaaatttgtcagtgtttttttttgtcactgatcaacagccaattgtaccttaataatattatgtggagaaacaactgttagaattctgtaaaccaactttgtaacaaccaaatgaatatattaataaaactaaccatgttgtaatctttttttaaagagctttgtgttggattgcggatatgaaacacctgcaaatatcataaaaactatttatcgttgacagtttgaaatcattgatatgtctagttttagagcattagtaaaatgttaatgcaactgcaatgcaactacgcagaaacttaaaaactagaacaatgtttctatgtacatggatctagatgaattcaaattttctttgttattcgcaatttgatatgaataaatccaccattgaaaatctaaaaataacgttaattaatgcaacagagtaaatattagctagtgtattgatacatttttcttcagtttatacttgatttgaattgatcaggaactccaaatctatttcagaaagatttactttttatgaatctgaaaattgatattaagaggattagttttctgcgatctaattaatcgtaatttagggttgaattttagtttcgaaccaatttttctgcacgattttgcataaatccgaaattgtatatgtttggatttcttacggacttcttctcaggtgaagtcgccaaactttatggtgattctctgtctggcttggtttctttccgcttggcctactagtttagagttgctgaaagttgtcgttgaagaaggtggttaatgagactaaatagttagagcaagaagtatttatgtaaaattttgttgttgggttgtatgaagtttatagagcttgtctaatatatttgtataatatttttgctattttagatatttttgctattttagtatatacatatattttagtatatacatatatatatatatatatatatatgaaaaaaaccctatatattatatagattgcatttgtttaattttatgaattcatagttatagtgagggccggtcctgggcataggtgggctaggcctgtgcttagggcccacctagtccaggggcccaaaaataatttctttttttaaaattacacaatttttttttgctaattttgaaaaataccatttttttacataagggcccaaaaataattttttcctctatagtccactaaatttcagggccggctctggtaatagtctataccattttactaatttatagtattatgtgcattgttttgatagaatatgttttatgtgcttaataattatcacattaatatgcatgttgaaccattttttattattaataataataataataataataatgtgaaacaacaaatatgtctattattagataccataaaccatatttgacccattatgattgtgttccatatctcccaaattatataaattttagtgattgagtgcatgcccacccataaaaggtaagaaaatcggttatgaatacaaataaatcttaccataaaagaaaaaatattttatcatctaacatgctaaaaaaggactttacaattacactgccaaaatttgaatagaacatattttgataagcgattcatgcccaaaagctaaatctcatcaaaaatttgctgggatgttatagatataatataggactcttctactgtgaggaattttttaaatgtttgggtaaatgtattgtaatactatggtattgaatgcgacatatttaaactagttatgactaaaatatttttttattcagctctattttctgagatctacagctccactctctttctccaaatccaatgtgaaaacaataagagtgtttcctaaatatctcaaatggagggattacaatccacaatcacaaacggctctctagtttttcattatttgaaaatataaatttgactactgttcattcgaattattcaactcctagaagacccatctacaccacctttgaattctcgtcattaaccactaccggatccgtatttcttgcccaaaagaacaacctgcaacttgtcataaccagcaagaacaccaccacccttgaagagtgatttggtaccctcattcttgacgattttcttaaatgcatctaatgaaaagtattaatatttatagttaaattatttacaccaggtaatactcaatgaaaagtattccatatatatatttgagataaaatagttacattcaacaatattacattcaacaatgcagtttgatttggtagcaaacaagggttcttgtaattttcactggtttacataactatttgatacaacgaaatgaataattctcaaaacatgaacgacaaccaacagatttcggtttactctgattatcttttattggcaattacttatttacttatttatttgttgtttctatttacacgtaacctcctggttatcatactacatagtacatatacacactgccagtaattatatttatttcagatgggaccccaactatgtaatgtattattactttttttgggtcagttgttttgggatggacttgagctatttttgtgtttctgaatgtgtcattattggaagccatacaatatatgccccaagggcatttggaccccatacatccattggctttgttgttattgctgtaggaacctcattcagtgaatcagtctgagcaagggcaaagaaaactgagtcaaaagtaatcactttcttttttacttctcttatcaaccaattccttgtcaaatctccatactcaataagattctgtgtaacccatcacacacacacatatatatgtatatatgtgtatgtgatatggatatgaaattatgaagttgaaggctactatttccattgccattcttacttattatgagttatgatgactagatccatctttttatttaaattatttggtttgtccactagcaactaagaagatgcttcataaaaaaaaaaataagaaagaaaaatctaagaagatgcaacatgtaagtcaccactgggaactgttctaaccttcaacatgggcaaatgccatgtggcagcattcaaggccttggatgttattataataattacttaatctcacatttatcaattcaagaaggatttttctattagaaggagcaaaaaactggctaagcaaaacgattaaaaatgagggtaaaagtaataatccaaggtagctaagacttctttatcttaatataccaacaacaaaatattccttagaatctcacatagccacaaacgtgattatcaggcaaaaagttagtgtggatttattgttgaatccaaaagagcaggtatatatacatacgtaatgggttaaagcattatgcatgtatatatttataataataataataataattaagagagttgtatttttaaatagagtgcatacatacataggtactttttcattcttgtccaattccccaacattaagttcatacatgatacaaccaaccacgttttgcctaatgaagaataatgactcataaatataataacacttttttctttgtcattaaataatcacgagtagtagtactactatatctataagcaacaaataatatttgccaatcactatagttttcaaaagactaaaaaacaattcaaaaagtcaccaaaatgccttgcctcactttccattaaaacattcctctctctctctctctctcnctctctctctctctctgtatttttaaattatgagaaaccccacatgatctcctttacagctaagaacaacccacctcccattattcccccctggtttttttaattagcatttgcttacataaatatatgtacatataaacagttcattaagacataaatcattagaaaagcaacactaattatttcatggtaaactaaactagtagagagagtaaaaatagttttcttaagttataaaatgagttctccaactatgttctctgtttcttttctctttctcttccttagtagtgctactgctactactactcatcagcttcgaaaggactactacaaagactcatgcccaaatgtggagtcattagttcgagctgcagttgaagacaagttccaacggatcttcacaacagctccagctactcttaggctcttttttcatgattgtttcatcagggtttgttttgcttttttcaaacttttgtttgcacttatataatttatgtttgtttgattggaaatgtatgtatgtgtatagggatgtgatgcttcaataatattgttttcgaggaatgggacagcagagaaggacaactcagataatctttcactagctggagatgggtttgacactgtcatcaaagcaaaggaggctgttgatagagtccctcactgcaagaataaagtttcttgtgctgacattttggctttggccactagagatgttgtcaaattggtatttatttacttattattattattattattattaatctcctttcttcttcttcttcttcttcttcttcttcattattatatctatgtttgtaatttgttttataattactaattaatggtgcagacagggggaccattttatgaagttgaactgggaagacttgatgggagaatctccactagagccagtgtgcgtcaccatctgcctcgaccagaattcagagttcacaagctcaaaacaatgtttgtctcacacggtctcaatctaatcgaccttgttgcactctcaggtaaacaaaataacacaacacaatcaaattagagtttaattacttgactcgtgtttctgactactgttagtattgagatttgtttgttgttgttattgttgtaggagcacacacgattggattctcacattgcagcagaataagcaagaggatttatagtttcaagagcaaaaacagaattgatccaactcttgacctgcaatatgcaaaggtgctccaagagcagtgtccaagaaatgcagaccctagagctgtgacagacatggatccaaacacaccggaaatcttcgataacatctacttcaagaatctacaacaagggaaaggcctattcacctctgatcaaaccttgtttactgacaaaaaagcaagaaaatttgtcaacctttttgcatccaattctactgcttttgaacaggcctttgtgcttgccatgactaagcttggacgcattggtgtcaagactgggaaccaaggcgaagttaggcgtaattgcgctcttgttaactaaatacattttcactttgattttctcaaccttttctttctttttcttttacaataagatatagtaatttttagatatccatattctgacctcttatacaaactgctgagacagaaattgaataataatataatagtgaagcctattgttatcacatacattgcataatttagattagaggaatagctaggtaggtaggtgcggtattgatattatatattagagtaatgctatcatcgtcttatgtgttattactgctattagtttaattaagtattgagtgccatataatttactgtaataccttttagaaagtatcactaattaatcgcaaaatgacatgtctagaggtactaaacactactggtgtccaataataatgctttatatattactatttcgaagaacagaacatgtgtgttgttaagaaaaagtgaaatttataccacgcacctaaaacaacatttttttaattattcttttattttttatatttttacaaatttttttaatatttttatagatttttttatttatattttatagattttcattttatttattgatttatttatttttattgatttttctctttttttgtttagaaaaaaaatattactttcttgtagcagtaatggcaaaacaatattattctaaaactgttaaaaataaaatttattcaatacgtattgataattttattagtgtttcgtaatatgagaattaatattttaattttttttttcattaatctcatgtgttaaatgtacattaaatcaattaatatatatttttaaataaaatatattaaacatataaaattataaatgtattttaaaaatgtataaatataattgggtgaccataactggattggtttggtcggttatccattagatcggatgtctgatccaacaaccgatctgatccaattgaattttcaaaatttacatccgatctgatccaattatgattggatatccgattttattggatcggtcgtttataattagattggatgactttctgcacacccctatttttaactcttagcagttacaaagttacaaataaataaaattgtattgttagtttattgaatatttttatgggttattgtagagtactaaatttacagtactcgagcttgagcaagtaagaaataatggaggtgagagagaaagagataaagatgaaggatgagaaataatccttgactgaatacagttggccaactgtacatgtttatcctgttggaatatattttaccaggacttagatttactaataagtatgtttttaacatcctaantatgaacttctaaaacgataaaattaaacacataaaaggtannnnnnnnnnnnnnntggttgtagcggaattaaatgactacttccgctcagatctccaacccttgtatcctttttgtcacagagtataatcaagatctgaggctagaactccttcagttatttggattcttcacagtcacactatgattgaggactaacttactatgggtgggcatgcactcaatcactaaagtttgaattttaatggtgaagaacac

SEQ ID NO: 16331 - DNA, 5107 bp, Cannabis sativa
tgatttcaaaaaataaaataaaagaaaaatcgtcaacttgaaatgaaaaatagaaacttttcaaaattaaaaatttaaagctagaaaaataaaaataataaagaagtcataatttgaaattattaaagaaaaatgagaaaaaaggaaaaagaatgcatgtgttagacttagaatggcgtttgagagtgtttgacccgtccaacccgtagcgagtcttcaccacgcctgggcaggcgcataattagatatatccaatccaatcaaaattcccctttattttaattttctctaattactatttattttttattttcctataattataccaaattaaacaacaaaaacatacacgtaatttgctacatgacaagacaattttttcaatttgaattattttattatatagttggcgttattatttttaattaatgttacaattaataatatttatttatttttatttttcaattgaagcgctttgtgacaaagagaagaaataaagacgaagactttctctgagaaagagaagaacagtcgccattgatgagtaccgaagctctttcccgcgaaattaaaacttgcccatttcatttccgagttgcctatttagagtcctttcaacgctttcttttctctatctatacatcacaacgtttcttcactctcaatcgctgaaacgtttgaaatattctcacattttcctttcgtatttggtttcctaaaaaggagctggataattaggaagttgcttcgaacccaaataaaccgcaaatgcgcgtgacttgtacattttactagtcagaactctgagatctcatattgttccttcttcgttcaaagctgtcttattttcactttctattacattaaaattataataataataatcaaagtatggaaccattttatagatattttattcttctcttaaggcgtctagaacctgtttcgattgtatttatgggttcgaggtcgaacaagaggtattagattttctgggttactttgcttttgggcggagattacactttttcacagttatggtttcttagaataaaaaaaaaagggtaggtgggtcgtaggtatatatctttaactcttacattgtctgaactagttagactctctttgctcattttctttcaatctttgatctctctctctctctctctctcttccaaaactctctcttttctatattatacacacgcaaaaatacatacatagatatattattattcagctggtttggagcttttgggagtgctcatcaaaatttaagtgttttggtgtttgtgttcaaaggcttgacttgttgggaagctgtagtactgtattggaagaagtagtaatcaggaatcagtgaagctttctactttatactaatcacagcttgttctagtgctttttaccctatatatctttttgggttgctaattcttgaagagaggtacattagttggtgagagaataggcagttgggaaaaacataaattagagttttgactaagtgggttttctgatttttgggggagacaaaaaaatgaggggtggcagacggaggatgctgcatttcagcaagatctactcatttacatgtgggaaagcatctttcaaagaagaccattcacagattgggggaccaggcttttccagggttgtttactgcaacgacccagattgctttgaggccggaattcgtcattacagtgacaattatgttagtaccacaaagtatacacttgccactttcttacccaaatcattgtttgagcaattcaggagagtggccaatttttactttttggtcactgggattttggcttttactccattggctccttacacggctgtcagtgcaatcgctcctttggttgtcattgttgggttgactatgatcaaggaaggtgttgaggactggcgaagaaagaagcaggtacttatttcttttcactaatcagttttgtaatttttttattgaagaagatcatgagtattataaaagttacaagatacgataatgggattatttatttattttttgttttaattgagattgttttggtttggtgctgtaaggtttggtatgataaaagaatttaatgaaaactcttaacagagagatttcactttttttgttatgaaattctgagagatttaatttgatattataggatctatagcagttttcaatgtttcatggtgggtttctttatactgctgtttgaatagacaatatgaacattgtagtggttagaatatttgaggtctccaacatttctgtttttctcttgtctggattacaaaaattggttaagcttcaattattctaaatttagtaatcatgtgggtactgttttaacaatattctggaccaatttttagggttaatatatagataggcaattttgtaacttcaattttcccttttcaggatatcgaggtgaacaatagaactgtcaaagtgagaaaacaagatggtacatttggttctactgaatggaaaactctgaaggtgggagatgtagtgaaggtggaaaaaaatgaattctttccggcagacctactcttgctttcgtccagctatgaagattcaatttgttatgttgagaccatgaaccttgatggagagacgaatttaaagttaaagcaaggtttagaggtaacttcatttttacatgaagattctaacttccaggattttagagctgttgctaaatgtgaggatccaaatgcaaatttgtactcatttgttggaacttttgaatttaaagaggagccctatgcacttactcctcagcaacttctgctcagagactctaaactccgaaatacagactacatttatggggttgttgttttcactggtcatgacacaaaggttcttcaaaattctactgaccctccttcgaagagaagcaaggttgagcggaaaatggatcaaattatctactttttgtttgctcttttgttttttatggctactgttgggtctattctctttggtattattaccaaagatgatttggaggatggaaccataaaaagatggtatctacaaccagagaattctacaattttctttgatcctaggagagcacctgctgcagcaatctatcactttttatcagccctgatgttatataatacctttatcccgatatctttgtatgtatcaatagaaattgtcaaagttcttcagaccatcttcattaaccaagatattcacatgtactatgaagaagctgacaaaccagcacatacgcgtacttcgaatttgaatgaagagcttggtcaagttgacaccatactttctgataagacgggtaccttaacatgcaattcaatggagttcatcaagtgtagtgtggctgggacagcttatggccgtggtttttcagaggttgagaaggctatggataaaagaatcggttcgcctttaattgaagaaaatattaaggtttggaaaaattcagaggattcatctgaccaaaaggtgcctgtcaaaggcttcaattttaaggatgaaaggatcatgaatgggaactgggtaaatgagccacatgcagatgttattcacaagtttcttcgtgtattggcaatttgccatacagcagtaccggaggtggatgaagattctgagaagatcacatatgaggctgaatcaccagatgaagcagcatttgtaattgcggcaagagaactgggttttgagttttacaaaagaacacagagtagcatatcaatatatgagttagatcaagactctggccagaaggttgaaaggtcagtattattctctgtgaaatgtttaacagatagatgaaatagaaatcaaatcattatgccatattctattggtcctttgctttctcattcagttaaaactaaaaaaaaagttttatctatgctctctttcttaaaacaaattcgatcttcatttcaaagtgggctttctcactctctcttataagttctgctgatcctccgtttactcactgactgaagtatttttcacttttgtttccagggtatatgaacttctgaatgttttagaattcaatagtgcaaggaaacgaatgtctgtgatagtaagaaatgaggaaggaaagataatattattttgtaaaggtgctgacaggtatgtgatttagtccctttaacttaatgtttcaaggtgtttgaaaagctacttaactttgtattgctaatgttttaagctgtttgaagaacaactttactttttcctgtgcagtgtcatgtttgaaaggctagccagtaatggtagaaagtttgaagaattaaccatggagcatgtgaaagagtacgctgaggaagggcttcggaccctaatactagcctatcgtgaccttgatgaacaagagtatagacatttagaagagaaatttttaatggccaaaagttcagttagcgcagatcgggaagcactgatggatgaagtagctgaggagtttgagagggatttaattcttcttggtgcaactgctgttgaagacaaacttcaaaatggggtgagttggaacatgccaaagggcttttaataatttgaaagtgtatgtgatagaatgaggatatattgtgtttcttcttgggtttcaggttcctgaatgcattgacaaacttgctcaagctggaataaagatttgggtattaaccggggacaagatggagactgccattaatattgggtatgtctctagttacttagggcacagtggcttgattattgcagcgaatttcttgttttgggttattaactctatagctcactaaccatcttagttgaatttacagttttgcttgtagtttgcttcgacaagaaatgaaccagattataattagtttggatagtccagaaattctagcactggaaaaggctgaagataagagtgcaatttccaaggtaattaatttatactgtgctcttctctttcgttagatttaagttgaggtcggcacttaatcaagatagcattttgtcgagcaagttaattgacaaaatgtctgaaacttgttaaattttaagcattgataaaacagtggtaattgaaatgatgatctctatatgtgttttacaaactgaaaa

SEQ ID NO: 16332 - DNA, 3645 bp, Cannabis sativa
caaaatagtagagaagttgtcatatacctactccaacagcgagcgcttgaagaattgaatacttttgttagagtgctcgcatcgatccctaaagactgaccaagagagagggcttctgagacaccaagcatactaatagccattgccaaattattgcaaatctttgccgcctgaatagcaagacaccccaataggtatcaaatatgttgcaacaatttcttataggggtatataaatcaggcatataaatatatatattaacaataatctgaacctatttattttatacaaaaaagttgaagtttgtatcatatgatgaaaaagagagagcacttcaaatctatgtcaccatgtgcggagtcatattaagcatgaactacaatgaaacactaaataaagttgtgaataatgtgaaacatgatgtattttcatgtatgacagcttaccgaaccatttcctgctccaccgcagtatactgtgttcttgcccattgaatggaacaggggttttgcagccaagtaagcctcctcagggccaccaacctgcataaatatcaataatattgtttatttatttatttttaattattattatatatcttatatattagaaacaagaacataactttggttccatcatgaatctcaggaagcttaggaggaagatttgcaaagattcaaaagtggctcaaccggttttgctcttggtaaatagtctctaataattcacctaattctaggaaattgcctcaatgtcactagtatcttcatgtccctagaagtgatattcagataaaatgaaaaggaaacttcaggaaatatggagatttttcctcaaaataagcaaagccgttgtatctattccaacaaaaagagtcaaaaggtgttttcattgcatagcaaagctcatattttccttcttatatgacacaatgacaaaaaatgaatcatattataccatgaaagtaagtgtcccagcttctgcagcgagtacaccgccagatacaggagcatccaacattactggagtctcttgatgaccttcacaaatttacttaatcagagcagtcaaaacccaaaagaatatatcatgcttgcatgcatagcaaaaagatcagcataaccttttctttttggcattttctcaggtaatatcagctactgggtttaccaaaggcaccttcaaaattactttgaaccattctatcatttactacaaggtatttagcttgtcataacaccatccatgtttctttaattctttttctagtccaagaaccaatgtcataacatagaagtccaattttaagtaggctacactaaattctgatgtatcaaaactttcaatgaaccgtacaagaaaatttagacgcaaccataatgcaatactttatctgttcttgatagttatttcaatctgaaattgagagaaaaaccatgcacaatattatgtccccgttccaagcatcttctattctttcccaactcatcaatagaacatggtaagcttgtttgttagtaaattaagactccttataccatcaccatgcaattttattcctaaaatctgtcactaaaccgaaacaaacatgttattcctaatcattttcgaaggagaaattattaggccttaattgtttctgtcatgaaatagaattgagtaatgctcttcggcaactttccctacttctagtttccaatgtcttacactcttaggttgatcgtcttgtaaaaacaatctgtcactgtcagaattgtgccaaagttttcatgctggaccgtcaatttcataaaacaaatgtaccctaaaaatatcttgataaaaaatgtgtttatgtcagcaaaaatcttcatcattgttatagtcttctacatctagtttcctatacagcttgggaaataaataactgaacatacaatttgggtagcgttgaattataacaaattagcaacataatcagcagataccattccaattgagatgtgtaacaggcaaatgaaaacagtatgcttgtatttttagcacttatgataccttttttctcctttaacatgcattcagatatggtaaaagaaagcttccttgatgtttggggatcgattgtagatgaatctatcattagccacggtcgcaagacattcccactttgaagcagcccattaggtcctgtgtaaacatcagtgacctgcataaaacacacaatatgactagtatgaaaccataaggtcatcccatattagggactccactactcaacctaaagtatttcaagtaaccctctctttactgtttaagcaattaggagaaatggcatatgaaattccatcagtatatggagcttgatgaaattagctaccaagttatgcacaaatcaacagtttctaacaagggtatgtaatttcgcatacaaattaaaaagcgggtatgaaaccatttatactcacatgagatgaagaaggaagcattgtaattacaacatcactgacttcaccaatttcaaaaggagtttcctttgtgacaattcccatgtcagagaaggccttcaaggcattagaatttctgaataagaacaaaaatctcacctttaaatacacaaatatactactaatcattggcatataaaaaacaacaaaagataatcaatcaataaattcaaatacattacatgtcatgtacggctattttgtatccggcctttattagattattagccattctgaatcccatatttccaagacctataaatccaacattctgcaatgcacccattaaaaatatttattgtgctttatagtgaatgctttgatatatgataaacacacacatatatatatacccgtaatgtttcattagagataaaaaatacactaacccattatttcagtggggggcaaaatgaaaatttagaacaagaagaagaagcttgtttgaaagagtgtaaatacatgaacaagacagatagtgtattagattcaatttattcaatatacaataaaatacagaaacagcaaagaaataacataaaacgataaaaccttgaacacggttgataaaatcagattacaaataaaacccattaaaagccaaataataacaataataatagccatgaaaattgatcaaaaacccagttgagaattaggaagattatagtatagagtgataaataagaagaaaaacaaacctgaaatggaggagggggatggagtagttgagatgaaaatctggggtgtggatgagagaattgaaagggaagagaagtaagagtagaatgaagagaaagtaatgatcttgctctacaccacctgcccatgattactgcttacttaacctcttcttttcacaatcattcactctacatgtcccaaaaccaacatatatgactgtgatgtgatcaaatacatacaattcaatacaactctaataattaaaaccttaatgttaagaaataaataaacacttacacaatctttgtctgttactcatcaatgtcatcatcctcttaaaaaattgagaaatatatattgtaaaacactacctttcgtaccactcagggactcagactactgctattgtagcaggcaggcttagcagttatgttttgtcctttagcctcggttggtatgtaatttgcattattgctta

SEQ ID NO: 16333 - DNA, 10095 bp, Cannabis sativa
tacaaaaattatcaattgaactatttgatttattaaatgataaaatagaccctatttttctaaaagtgtacaaataaaaccctgaactgttttttatcaaaataaaacttaataataatctgatttaaagatgttatgtcaaaactgattacattttttgtatctgttcgtattagaaattatcttaaagttggttatattaaaaaataaaatttttaaaaatcgagctcaaagttctatttttactattttaaaaaatataagatccattttatcatttaacaaaacagagggttcatttaataacttttacaaaacacaaagttcaaaatgatattgatcctcctctttattatataactatacatacataggataggaacaagttctatgaacatattggtacacaatcttttacaccatttaattagaaagatctaattaatattaattagtaacaaataaaatttaaataactttaataatggataaaaatagtaggaaaacattaataaaaaaatatattttttgtgttccatatatatgaacggtgttatcatgaaacatcaaagtaaaatatttagtaacataaaacataattaaaattaacttggatatattcagcaaaaaaaaatatataatttggatatatgatctggtgcaatattcacaaaactatgaaaaaaaaatggtatattgataatcatgttatcgggacgaacttttcataattaatataaagataggcaaataaaagctgggttcttgtttaccaatcacatatcttgactgcttcattaaaccctagataaataagatgatgagactaaaaatattccagttttggagttcaattcaccatcatgtgctcaaaccccgttccagcttgaagtgttggaacacggctcacaccaacattgtgtagcaactgttgcagccacctcctggttgttgggtcctcctaaaaacaaggataaaaaacgatgaagttattgagggataaactaaaatatcaaggccgtaatttaaagcccctattttattttatggatgctatttataatatctagcaaagaaattaagccacgcaatgcagcatcaactgtgcaatgtcataacaaaactgtacacatttttttaagatggtgtgtaagggactaacaatggccaaaattaagcagatttgtaggaaatgactactgaaggtagtacttaaaaggatgtaaatgaactattgaaatactcacacgcaagcaaccgctgaaggtagcatctcttaacatgtcgggaaggcaacttcttaatgcatcacacgctctgtagaacaaaaggcataagagtatcaatacagaaaacaaagctaaacagtgaagcaacttggagtttttgagtaaaaatattgtcttgagagttgagacaccaactttggattgtctgacaaccggagataacatctgatgatatgttttagcaaacgcgatgagggctgctcagctagtgaagccaccatgctccccaaaactcgaccaaccgcgaaaaacctttccgctgtggtgcagatataatctaagcccatatcgtccaacaaaatcttttgaactataaatgtagcaacctgtcagtaagaaccatttttttaatcaaattgaaacctcaaatcctactccaaacaaaaggaagaaagcattatttattcaaagggaaaggcaacacaaaacagtgagaattccaaaacaaatgaattgtttcccttggtgcattttgtttatttcattagtacaagcaagatgtgtcatcaaatctacgaccttcaatgggccttcgattagacaaaagttaaaaacgtgaagacgaagtgtaagactacatttcttagcttcaaataacatgtaatatgcacttgccaacttgattacaatgaaggtaatccaataccagattcagcaatttctgaacatgtagaataccttccatctctaacaaaatgcatgctgaaaatgatagataactagttaaagatccatgttacttgacctctaaaagtacagaaataattgcagatcacttccacatacctcaaaccatgactgatggaaaagtatgagcttttatcacaatatgtatatacaagtggacaagtatatacaccgtaagaccagatatatgtatatgcataaagcatccttgtatacaattgtaagaacaattttatatgtatttatacgaatagaaatactctgtcaattacatgtagtctcctctctcccagaactttaaattttacaaataatcttttttttctttttttgaaatggttacaaataatcatttatgtatggaaatgagtatttacataaatatgtgagaaatcgaataaacaaatatttgatttgtcaaatttctccaaattatacgtttcctctctatctcaccacttgcaatttgacaaatacatttatgtatgaaaatgtgtattttatctgtcaaatttcgagttgtgggacagagtgaaacatgtaatacggatagggaatatttgtatttgtacttgtacacatgtaattgaacaaagcatcttgtatacaatttaccaactacatgcagatctttacaattgaagaggtcataccgttttggatagctcactgcccatttccatagtccgcaggcacaagggaattatttctgtcgagagaaggaagctaataacttctgtctcatcaaccttgtaaaatagaatattatgcaaatattacaacttcagaacaagaaaaggctgatcatttgtaacttggatatagttacaaatttccttatggcctcaatgagtgtgcaaaagcaaggaaggaaaggaaagcccacataaatattgacaggaaaccgaagaaattgtgtgaaacttaacattgcttttaaacatattcctcccaataaaaattgttcattatgataatcatgaaatgtaaatcctgctaaatcccaacaatcctaagaacaaattgagcaaaaagaaaatctgtacaatacacctggtgcagaaagatagaagtgtaaaatgatgactcccatgattttgttgtctctaaaggcatgaaaaatccccaccttcaaactttcagtgaaaaccagcaatggggtaagatctacaaaatataagactgaaacattggataaatttggaacaagatgcaattttctcaggtcagaaacattgttctgcttaacaaatttcagcctctggatcaataatgttattgttagaatctgagagtgtgagtaaggtgcatgggattccatctcaaaagcaattggcaatgagaagagtagtctattcatcttataaatggtataatctttccacacattaacagtgtgggactatttctgatagttatgaacattctaatgcgggatatgcagatgagctatgcaattgttagcacaaaaaataaccaaagtccaaaaccactaaataggaaaaaccatgtgtattagattattacacacacaaaaaaaatataaaaagatagtactaaagatgatttaccttcaccaaagccccaatgacccctagactagtaagcctcaagtactcaaagggtcttgacttgctcgcggtattaaggaaaggatacagatacaatggaatatgtgctgcaaataagtgaaagtttcagtagaacgaactagttacttggaattaaaacaataataacatatgcatttgttaccctctgtaaatttatgaaatctagaaatatactccagaacatattttattatgaaaaacaataaataaacaccatacagcatagtaggatagatccactatggcactgaacttgtttgtctattaatctgtgccagctcttgtgctggttgtcacttctaggaatttcagtagagtcctgggtaacctcccaagtgcaagactctaaacaagtcgacactcaactgccctcttctgaatctcctaggataccctcataactgaacagaaacaagtagctaacccccttattagttatctttatatatttctcactaatccttcacatggttacattctttcttctagaatatgtaaatagaatgggttgttatgcacccaatagtcgatacaatagacataaattacgtaacggaaagtgaaagaatttttaagggcttggttacattttattgggaagtgtaagagtctatactgggcatatttaaatatgccaagggaggtgtattgctatgtagtggtctctagttttgtgtgtgaatatatttgggtcctaacatgggtgttctaacagcatctcctaccacgtaaaactacttttcctctccctctccttctccctctccctctccctctccctctccctctccctcattctctctctaccattcccagtgggtttacaagacaaaaggttttgagggtctatctttcaatatctgattagagaatggagtcccattttgcactaattcctccatcttgggatatagagatagttctaattgtatagggatttatactgaaaatttacacttgtattttatgcttcaatatcttatgtttatcttgttacaatggtttttttctgccaaggctccctaataaacctgggaggggtcaattgacctttgtctttttcaaaaaataaatatatatatacatatgtgtgtatatatataccattcacaggatcttttcagaacagtaaaaataaagtgcagttatgatatgaaaagtaagtacttgatcctaataaaatcctactggtcattacttttccggcacaagttaatgacttaatacacatgctatgtagtaatcttattctttttctacactaaatagtagttattctccctagtttgccttagctaggtgaggcataagcctctgggcagactgaggactaagcaacgagttgatagcaatatacataaatataaagattgatattcataatagtaactgtctttaataatactagaacaatttgttactagccgaagatcccagaaacttagaacaacttatatccatgatgtctaaacacgtgaaaaattgtaatcagcaaaaccataaatcctaacagcctgaagtcgaatggagtgtcagactgatgagtgtggcaaagtactaagtgaggcaaaatgaggaagaaagaacaatgtactgtcaagctggctaaattacaatttaagttaacgccattcttcgactaataatattatgtcactgtagtgaaactatcttttttgaaactaggatccccgcctcaccctacaatacttggggacaaggaaactatagcaattgctaggtaggtacttaagaaggactagaaacttggaccttgtcggagcaaaccacatgcctggccattagagctacctcttgggactccgcagagaaattattaattaatatttgacttgcatgtgtgtatggcatcctaatgtatttttttaagaaaggtgaaatttgttctacactgctcttacttgagtaaagtgatacaacttttttagttgacaaacttagtacaataataaaatggatgataaatatattgaaagaccactttctgcggcatggaaaacaaaatactacatatggcccaagatttacttcttatgttagatgcaagacctatagcttctatagctagtgcttattgtggttgcaatacaggtaaatgacttatttgacaatgacacaaaaattccctatttgggatgtcagtatgttcagacaattcaaggtgctaaaacctccacggcaggaaatgaggagcagaagaagagataatgaagcaaagaattttacacgattttgacatacatacgttagtagtttgataaggtgaagaaaaataccattaatgaacaacttccttgtatctgggtgagaggctacacactgcaagaaacgcgaattaaggaagaagaaagaagaaagaaagtaaaaaaaaaaagaagcttcaaagtctgcattcatcaagtctgtcgcaaaaagacaataaaatgttgtacaatcatgtctaaatttaaactaccaataataactcgtgggatgttgtttcatttcccaaaaaaaaaaaaaaaaatagttatgaatgcacgaattgcaagttacaagaaaagtacaaaattaagacaaataatgctctttaaaatattcatacgtgtgtgtgcgcctgtgcttgtgcctacatgtacacatgtatcatgaatcattgaaagccttatgtcagccacaaaaggcaaacaaaatcatttgatattccatcctaaatttttaaaatacttgtttcacatcacttgcactagtcaaaaaaacaaaaaaaaacataactagattagcatcaatcaatatgactaatccgaacatttcagaccacttcaacacaatttagtgtcgtatgtttataagttgaaacaattaaaaatttaataaacatgtgaatcaattagatggtagtaaatctaacatgagcaatgaatagtgaaaatttgatatccatcgtttcaatgacatatgaatcagaaagaggaaatcatgtaacctgaagaagagcaagggcattgcaaactcggtttgattgtgcaggagtaagatttgggggtgataaaacaggatatattgatacaatctcctgcagatattaaaaaaaaacaatcaaaatcagatatcgatccattgcaagcagttactaggaattatatattcaaaattgaaattttcaactctacaaaagcataacattaataaaacaacaggagtattgtaagttgtttgtgacccacaacattgtccacaataaataactttgaataaaatccaaaacaaaaaagaaactagattaattatttagcaatgggcaaagctgcctaaatatgattactactacatttctattctaccatttctttccagctcaaacttacttccgttgggaaactaaggatcaccattccaaatatatatggcgtgtaagaacttggtaaaagcattaatagcaataaaaggttgtaaagtgaactggctacctttggaaggatttcagaactgtaataacaggaacaaaagtggtagactaatcaataatagacatacctgtaacagggcagcaatagtaccaaatgaattccacagtaaaggagccaagtcttgaaataattctctcttctaccaaacaagaaacaaacataatgttaccatgcattcatgtatgatttcagcaatagtaccaaaacataatccattaaaaagggggaagatctttaagaactccttgttcgtaaataaaaataaaaccaaatgaattatgcatttaaacataccaatattgaaacagaaaattgcataaatatccaaaatggagaacaatattacaacagcaaaaaaaaaagatattgactaatatatttgatccacatgcttattctacagaaaactaaacatctccatctgtctttccccttccttacccaggaaaactagacacaatctaaggctacaatcaacacaattgacctatagacctttcaaaatccatccaccctgtcaaaccataagttctaaacaaatccagttaacatgttcctacatcaacacctattgcgcttataccaagatattttttgggccacctaagaaacataaggtcaactgtcccaaaaaagtggctgcatggaatgtaaatgaaataatatactgctaaaacatttctcaaagtactagtgtcaattacatactatccagagcccaatttaattattccagcaaacttaatatatatatatatatacatatacatatgattatgtgtacataaaacctcatacacatgaggaccaaaatatagatgagaaactgcttttgtcatcctgaaattagtttaaaagattgaaaccattgagtgatagagaattcattaccgaaataatcatcacttaaaatgatattattcaaagctttctgttattctatatatgtagtaattgtgtccatgtcaattccatagtgcagcaacactttcaagcaattaggaaaactcaaagcacatctagctacaatttccttcttaacaaatgcacaaataaaaacatgctgaagcatgccacgatggacaattccaccaagtgattcctaatgaacataaaaacaaattaaatcatccaatcatgtggtttcatgctaagatgtgcctgaaaggcacaaaaattctgttcaactatatagatgcttaagcgaacctaaagcaaatcacttttgtccattagcataagtagtatctgtaacaaaaaaagaaaaaggtaccaagtaagctttggtgagcttctccgtaaatttttcattgcatactacataaataacttctcgaaagtgatggagctgatataccaaaaccaaacctttgttttttaattaaaacgaatgaagaattaaaacaccaaagcatcacaatctaagaaacaaccttaccattcataatccgggtagatattataacgaagaaaatattcaaaactgattccttgaagaaaaaaaaaactacacttttatatccacctttccactttccaccaaagattaacagaagaagaagtaagggctcatctattcttctcatgccctttctcttggaaaggcttacaacaaattggaggctagttagggagcttcctctggcctagtgaatttgacaattggattcattggttgaataccaggaggcctaacaatttaatgaatgatatattctatgcggctatgggtggtgctgtctatggtatatggcttaaccgaaacaattgtgtgtttgaaaaaaacattgttaaggtgagtattaaagctcgcttaagttttgttaatgagagcaagttgtctaagaaggatagatttgctctgaattttgttaaagacctgtaggtcttcacagagtataaggggtaatgccccggattttgatgcaatgtgcaagttttgattaatgaaagttcttactaattaaaaaaaaaaaaaagcaagggcacacaaaaaccttgaaactaacgaaataaccaaaactcagaagaatgaaaccaaggaaatcaactgataaaccaaacacaatgaaggtgatgcatcagagcataaacccatttgacccacaacttcactttcactgctctaactaataaagagaaaacctttcacaactattggaattgatacaccaaacgaaataaaaataaaatcggaatccataagaaaaacatcaaaacccatataagcaaacccagaaatgaaagaagaaatcaacagttatatcatcgtaaccgaaactggtaatgtaaagttatgaaattgattgattttaaacaacgaaaatgaatgtatatatataataaataaaaaaccttggagagttcgaggagagcgttctctcggagatcaggattactgagatcaagtaccaactgttctgcggaagccatttttctttctctgctaagttcagcaccacctcctcctgctgcagacacactcgttcctcctccaaacggaagtgtaagagattggggtaaactcgccatttactcaagaactgtagcctttttctatgtattctttttagttttatataataatttaatcaaaattactttttcccgtacaagttcgtctctgcagtactgtttctgtcgatttgagctttcttcattcatatataggtgaaaccaatactgtcttgtaacagttaattttttaaagaaaaagtttaatttcggaaaattactagaatgcccctactgcatttgctttcaatcttcatctacgaactttttctttgtggatgtcttcattttctttatttgtgtttccttatttatttactttattaaaaaagaaaagttgtacatccaaattgaaattattttttttaatggaaaattaaaattaatttgatatcataaaaagtttaaaaaaaatgagcttatagtaaagtaaaaaaaaatatttcatatgtcataaatattaataattatgtagatgactaaattttttatttattaccattaattgtaatcaacattcat

SEQ ID NO: 16334 - DNA, 1554 bp, Cannabis sativa
ttctaaaattaaatttataaaatgtaaaatataatgaaacaaaaactagttgcagaactgtagtttgtcatgcttgattcactcaattaggaaaattgaaaattttcaacttacaacaacatcaaagccaaagatggtcagaccaagatttttcatgagccactttgcagcttctgtaaccaagtcttcatcaatgtgctcattattgcccttcgagctattactatcagaatgagggttcccagttgcagtgggaagagattttaagctgtaacagaaatcatcacagttctggtatgtaaaattaatgcatacactctagggcgtacgtaaggaaagccaaaaccaaaaactaaaacaaataaaggaataaaagcaagagaatgattaatgttacctgtcgaacactagaggtttgagatcatgactaccgaataattttattaagatatctgtgtttggcgtagacttcttgactgcataaaatactttctcacccaagacatagaatttatagagaatggatgaatggttcacatattcctgcaattcaaagtataattaatttctccaacatgatcgacaatgaacatgggaattacaacaaatgcttcagccttctgcagttattgctcacctgaataactgctggaagaggaactttcaggtctttaaagtcttggtctttaaaaacaattgcctaatatgtaaaagcaaaagtttcatattaatggaaatatataaaatagctatgaatatgggattaaatatctcaagaaattcaaggtttgtagaaccaaaagaataagaaaacagtaccatactatgagcaacagctacaccacaagcaacttgaggtttaactatacatggaagagatagtttagcttcagatagcctttgaatgagagaaagttccttataatcatcaacctgaatattttttagctccagcagtgattacagttgaaaagaagtttcgatagagcatttgtgacttggcataactttttttcacagatttgtaggatttactattacagtaattgaataacaaccttaagaaaatgaggacccctgattaaatgaccacttgcacctttgagattttccagtccaagtaaaatatgttgaatttttagccgatccaagacagggtaaatattactaagcggatcaatcacacaacagtctacatgatgatccatgtatctgttaaaaataatcagaaagaaccacatgactgagtagattattaatttcccttttatatcccctttatacttggaatcattcttttctagtacttatggaaaaatcaccttttatcttggcaaaacagcatagattaagcaaaaagagattaaaatgaaagcaaagagtcacataaacaagaagctaaaaacccttccacccatgactaaacctttgaccacataatagtacaatagaaatataatatattcggaagagcccttaaaagtaatataaatccagttcttaatacccccaattacataatttctagtcatagatatgtaaaatcattcagag

SEQ ID NO: 16335 - DNA, 7278 bp, Cannabis sativa
taccacacagtcagttggcacagctggatcttttttattccattagaatatctatttttttttattttttatttttataaattataatttaaaataattataataatatttgttaaaaaaatcatcataatattaatttagcgaaaagaatatgctctaaaataataaattttctaattagtatttgataaaaattcaatttatttcaattagtattttactttattgtataaccaatcgcttacaatcgcgcgtagataaagcacaatattcccgtagcgaaataaggctaacttaaccacggtcaggagaaccaacccgactctaaccctgattaagtgaggatagtcggtacaacaaaataatacgcggatcgctcaaacccacggctaaaaaatagacacgtgtacggatagatatagtcgaagtcgtctcacgcttcggtgttaagttaaatttagggttaggttttttccttatctattacataaaaatcacattttcctcctttcgtggtttcttgtcaatttgaagatttctctcgaatttggattcgatctgtttagtcttttccgttgagttcttccttgaacgctgttgatcatggagacggagcgcgtgactgagtttcccctttcacacttggatcggcgaccaagaaagagggcgcgattgggctgggatgttcctcaggccccaaaggtaccttctttttctgatacgaaaccatcgatcttattaattttcgttgtctgtaatgtttttttcagtttcttgttttgatagcgtgtattttagatcaggtattgctcgatctcgtagttcttacttttttttttcgtcacggtttttgtttatgtgttttggtaatctgttggcttgtttttctgaatttactcgttttttgttcttttattggtatgtatatattcatacggtatagatctaatgataataactacaaaaattgggcagatttaatagatttagtgttttgctatgcattttaattcatgtttattattatattctattttttggtagaaggttttgagttttcggataagggctgtagctgggaagaactttaattttatattaagtagagtatgaattaatggatgtgtgtaggctcaggtaggaatgttatgtggacaagagattggaaatttttcaagctttgcatctttgaacgcaccctcagatcaaaattgtagttctctgtttcttaagggagtttctcgtaatggttccccgccacggagagaggatgacaaggatggccattacatgtttgagcttggagaaaatttaacatcccgctgtaattacatcttaccaccatcaagatactttgcatctattgataacactgatcattaatttagttgcataacatatgcttctgtgggtgcactatatttatacttatctctggtcttcaacagtttcatttctatgttgcaggtgttgagtgttcttaatttgttatatgttgttttgtttttacttgttattcactagaaaatttagatgctgagtactatgcccagaattgaatcttgttttattgtgtttacagataagatccagagtaaaatgggtgaaggtacctttggtcaggttttagaatgctgggacagagaaaaaaaggagatggttgccataaaaattgttcgtggaattaagaaataccgtgaagcagctatgattgaaattgaagttctgcaacaactcggaaaacatgataaaaatggcaatcggtgggtgatttatctcctttttagctcttttattacacatatgacacatttctggactttgtagcaattgttaaatgggtttattccttgcagttgtgtgcaattacggaactggtttgactatcgtaaccatatctgtattgtaagtatacgttgatttgtgatggattgatttccccagttaataaaaaagtacgggggttaagccttttgggtgaatttaaatggtttgaacaggtctttgagaagcttggaccaagcttatacgattttctacgcaaaaacaattaccgctcatttcccattgaccttgtccgtgagattggcagacaactgttggattgtgtagcatgtgtgtagtaaattactttagctagctttattcttcttattcatacctattgctttcgtaattttattccctcagcatgtcattcctagcctgataggatttcactattttaacgataactgctaataaaataagacttaaaattcatttaccttaaattatttttatttttctttgatattttgtaacttaaattctatttatcttttattattttcaatgttttggaagttgtgcgccatgtgtttttagttggaactgtagttatttttcctactcttttttgacaccttgttttctttcctttgcagtcatgcatgacttgcatatgattcacactgacctgaagcctgagaacattcttcttatctcttcggactatgttaaagttcctgattataaggtattactcttttgttcttcagcctgttgacagctgcatcttcattaattatattgtttagtgtgtgatctaatttttactttgttttgtgactggtatgctattctcagagttcatctcggtcaccaaaggatagttcctactttaaacgagttccaaagtcaagtgccatcaaggtgattgattttggtagcacaacatatgagcgtcaggatcagacttacattgtctcaacccgacattatcgtgctccagaggtgattcttggtaagtttattaaccccttttctcaaatacctgcttcttattaattttgttcatagagtaatttgaacggtaattttgcaggacttggatggagttatccttgtgatatatggagtgttggttgtattttagttgagttgtgcacggtaagaattttttatttgtagttattgggctctttaagttcaaggcttgctcaaaaagtaaacaaaagtgtaactataccaactataatatgtatgcttatttttattctcattggtacagggtgaggctttgtttcaaacccatgagaatttggagcatcttgccatgatggaacgtgttcttggcccaattccgcagcatatgttgaagagagtagagtaagtttattgtactctgttatttggcagtctgttttgacgtgaatttcaaaattgactaaagaataaccttttgttttgtggatgttattatcaggcgacctgctgagaagtatgtcagaaaaggtagattggattggccagaaggtgcaacctcaagggagagtattaaagctgttcagaagcttcatcgtcttcaggtttgttttccttgtaatgtttggaactagtatgtttcacaacattattgtgtcatacctgtttaagtgattttttttacttccattctgcagaacctagtaatgcagcacgtggaccattctgccggcgatctcattcatctattgcaagggcttcttaggtatgaaccttctgaaagaatgactgctcgtgaagctttaaggcatccatttctgtcaagggatcactttagaaggtaaaatcttcatagtatgccaaaattgagcaatcatggtcggcggttttgatcattcagccatttagaatgggaacctgtattggcgaacctgtcctaggttgcgtatgtgagcttttatggatttacctgtgtacatatcagattactgattcactggaagagttgggcaagcttccctctgaccgtcgaccatgtttattgtatagttgtattttcaaatgatctttagttgacatttgacatcgtaatcatataccccattttttacatccatctttagtttcttattaattattgtttgttttgaattattacaaaatttattattatttaaaaaaactcaaaaattgctcgggtaatcacttaattataatcactgtcagtggttaaataagagccagtggtatgatgtttgggaatatttgtttaataggtagaaaaacctctccatttaacaaaagcaatgatggtactgtttggcacctcgtcatcaaaaataaataaataaaaaaattaaacaaaagcaatggtttgtgttccaaaatcaagaataagtgtgatcaaaacttctttaagaaaaaagtgtgatcaaaacagtaaataatataccccaaatttttatgtttttcaagtgagactagatggcaaaaattgtgactttgttcaatagctattatttctttcatctccttcgaattgtgtcgggcctttttgaaaactagtttttgaacaattataacactacatattcgtgacatttttacattaatttttacctgcaaagataaatataaaatttagtagaataataataataataataataataatgtaagttatataatgcaaagggacatagtttttttttattgttacaatactatattaataatacatattaatatatttactttttacaatacaaatcataccacaatatgaaaataattatttatagttaatgatcctataatcatacttttcattttaaaattaatattaactattaatgtgatctttttgatttggaatatatttttgaaaagtcaaataaaaattaaactactcactgaagtatatcatacattaatgaaaaatataatactagaatatgttgcaataaagatttagattatcgttaagtaaaagttgataattttttttttaaagaaaaactaaaagttatatcaattatataaatataaacaacaaagtcataaaaattataacacagcaataattttaatattacatgcaacatattcaaaaaaaataaacaataaagtctaaaaaatatggaacaaactattaaaactaaaaatatatttgaaatgaacaaaatttttttttatcaagattaaaaaaaatagttgatttcatattgatatatgaaaactaactagtttaaagtaaaataaaataaatacaacaatttagtatattatatatcaaaattaaataaacacaactcatttgaactaaaaatctagaatagaaaaaataagcaataaattttaaattactgaaatgtataacaaaataacaaaattaaaaatttattaagtcaacaaaataatttatttatacataaatcaacatacttaggaaaataaacaaatataaaaaataaataaaaatattaatgtttaaatacttaacaaactaatatgctaaataaacatttcactatatttaaaaaaataatttagtataaattatgatgacaataataaaatttaaagaagaaatataagatggtgacatgacgctttaaaattaatttaaataaatctatttatttcttccttaattctctcatttttataattagaaaacagcgcattttgcgtgcggttctttttgaaaattttaaattgtatatgaatttttttattgttttttgttcaaatgtaattaattaataaaattgtattgaatttctttaaaaattttctatttacttttcttaactatataataaaaataattaatatattatagaatgtcatattttttaattattttgaactgaataattaaaaagtctacatatgtattaaaattttagaaataacataatatttttttttatataatataaatgtgataataaataaacaaacgaacaccaatgtaataactcatgacaattttgatctatgttttaaaatttatatattatactttgtatcaaacataaaactaaaactatgtttagtagggaggagagatagttggagggagaggagtggagggagagagtagaagtgagaggtagaatcaattgtttggtagtatagaaaaaagagagggagacctttttccaccaaatcccaaaaatcaatcctcccatttatggaatgattttggaaaaagacaaaatgaagatacaaaatacaaaaagtatcctttaaaaaaataacaaaataatacaatgataattttagtaattaattttctcttcatcttttccaacttacacttaataccaaacaatacaaaagagaattactatcctctccatcattccaaaagtctctctccatctttctctccatccattctattctcacaccttcttaccaaacatagtctaaaagtagacaattttaccttccatgtaatgcatattatctttacatcttggccatttaaactcagtgtgatcaatgtatctcatttgttgtgagcaataataaatcaaacaataagttaattactcattgtaaatgataaaataataattaaaaaaaaaatatatgcagtataagtatagattttcttaaaataatttaaaagttcattgtttcatatttatatcatcatataaaaaggggtaagttttaaaaatcatacttaaattagcaataaaaaaattgtaaaatatatttaatgataattgaggaacaaaatatactaatttttaaacataatacatttctctttattagtcgtgagtatatttcaatataactttataggagacattagaactcatttttatacaaatgcttctagtatttaatgaataaaaagataatacaattacttataaaattgtcagtcaaacaaaaatgattaaaactttaaaatttaagtatatcaaatattgaaaagaaaattatttttaaaaattgcaaccatcctaaaatttttacttaataactatgtattggcatagcaacttcatcccaatgttttaaaatatttttacttattgtatttgatttattaagtctaacttgtccaaaaaaaaaaaaaaaattagtacactttactttcattaattaattaataattaatttaaaatatgaaaactattatagatattttttaaaaagtaatcattatagttcattgtcaaaaaaaaaaaaaagtaataattatagatatataaatgcacggagaaaataaaacatgcagaaaataaatatataaatgcatgtttaatatagaatattaatgaagtatatataacatttacatgtagatatataatgtttttaataaaaatattataaattcatttatgccaatatgatgctacaactttagaaatttctcatcacctattttttttttttacctttcaatttttaatcttcaccataatcaataagctgaataaaaatcacacctataaccaaaaaacatcaaaaaagaattaacaaatagaaataaaacgaaaa

SEQ ID NO: 16336 - DNA, 13873 bp, Cannabis sativa
  modified_base (832)..(848): a, c, t, g, unknown or other
gtccttccacgttgcaccatccaccaggtgttgcatcgatgcatcatcctttgatttaccagtgtggtgccataccatgtattttaccgtatgccttgaactatatagtctcttcaatcacgaaattaacagaaagtaacgtatcattttatgaggcaccttttttgctcttgaattttctgaatttattcatctactactgccacaaactagacatgaatctttatttgcatgttcagtgtaacataaacagcaattatgctcgcaaacatgaattgactcataccccaaccctaatttcttcaattttttcttagcatcatagtagtttgatggaattttactttatgaaccaatattgttaagttagaaaagaggggattatatttaatcaagtggggaattattgtgtattggttaaatataataaaagggtaaacacaattatggtgttttatatctttgatagttccacattaaaagagtgtgaactttgatatagcatagaacataattaataattgtgttcctaggttgaaatgaccttatagagtgtataaggttacccaaaaaatttgaaatcaattggagaagtcaaaaaagacatttaaacacataatgtatgtccaagcgacatgtcgcctatcgcctggaacacaatgcatggggcatggaaaatgcataaaatattctctgtcatatgttcccggtgacatgtcgccttagagcattataataaaattttcaacattgtattttagtctaatttatctgttttggtatgaaaaaaaatagtctaatttattaatgagaaattattttatatattatnnnnnnnnnnnnnnnnntaaatttacggtttgggttactccagaggtttgtgggttgctatacgaatgttggttgcgatttattaggttgtttcgttaattgctatagaaacttctatatgtaattccataaaaatagaaaaaaaaaatattttaaagtataaaattataaataaaacccctttattaattatttagataagtaccgaaacacttttttaaggttgtcctattaatatttctaataaggctaattatgaatttttctccccaaactttgacatgtatcaaatcatgctctctgaacttttttggctgttaaaagtcccccctgaactattgagattgatagatttaaggacttgtctaatttcattcaattttactgtttcagtcattgtttatgtactaaaccatactccccagactttaatatctaccaaattatgtctctcaaactttgatacgtactaaaactagacaaaaattcgaggacatatcaaagttcgaggagaaaaattactaattagcattctgataatatataaatatacatataacactaagcctcgaacgtcttaattacatacaacacatataccatttatactcttcaattatataaaatatacatttgactattaagcaaaaattagttacaaacacttgtagattgaatgatgactgaaaagatccaagtatacgaagccataatacaaatgttaatctgcaaactaatcattacaatttttttgtttatataaataatttgtctttatttgcttcctttattctctttacaactgtctaggtatttttctacacccaaattttattatcacctccctctctctctctatattttttttttctaaaacgaacctcactgcaagctcatattgatatatattctataaattccatcctatataactaattacataataattaaacgttgacattaactgattacatatctttctccttttgataatttttacctaatgaaccatattgtattaaaaataaaaagtttagaacgtgaagcctttttttttattgaattttcctactcaacaaatcacatgtgatcataaataccgctagatataaacataatcaattaatagaagcatatatttgttcaaaaattaatagaaacatttatataatatactttaaaaatgaccactaggtatatatatagtacttaataatgtattattggaaaatatatatatatatatatcaattatcaagggtgttacattacaactgtatctatatgttaacagggtttgtatacatgaacataagatcttaagagaaaaacaaaaatcttggacaagttattaatttcagatctaacttcatttttggcccatgaatgatcaaatatgccaatagcaaaagttttcttctttattatcacaaattaatggctgtcgttttttggtagatatcatcacttcatttctttgggactccacaacatttcacattttcatatacctattacactaaatgacaatttattgccttttattaataacgttaaagaaaatattgtaatttcttcaattttattaagaaaaaaagaaaaaaaaactcaactttaaattataatgaagaaaaaaaaaaggcagtcaaaacagtaaaagatgtaaaaaggttttgacttgaagactgaaaatatctgaatctcattctcaaatctcaacttaacgttattcactacgttcgtactattttttactgagctcatatttgccacgtgtcgtatttgactttttgaccgaaccgacactttctttaccaacacaacttccatattctctattatatactaacaaaaactactcatatacataacctcaaacacctctacacaacaacataacatcttaaaacataatacaaaaattaaaaatacattaaaaaaatctaaaatatatataaaaaataaataataatattaataataaaaactaaaatgagaaaaattaaaattaaaagacacataacataatctatgttctctctctgtttctcacacgtccatacagaaacaagccagcctttcacagctttactttctctctctacaacttctctctctcttctcattttctctctcttctcttctctcagtgtctgaaactcgccgcattaatcttgggtctgccgacggaagaagccatgggtactcatatccgtggcgaccaaaagcttgtctttttctcattcttcttcatcacattcgccggaatatgcttctcattgccggaaaatgtcaaccccaggtcattgttctcttcctccaacgcttccacatcatcgggtcagatcaactccaactcggtcctggtcgctctcctagactcgcattacactgagctcgctgagctagtcgagaaggctctgcttctccagacacttgaggaagtcgtcggcgccgccaacgttaccattttcgctccacgcaacgaagccctcgagcgaggacttgacccggagttcaagctcttcttgctcgaacctggtaatctcaaatcgcttcaaaagcttatcttgtctcacatcgtaccgacccggatcggatccaacgatttacccaagaaacccgactctgcttaccacagaactctttcccacgaacacatccacctagaaaagcaagattccggtgagtggactgtggatctcgctcgtctcacacatcctgattcggtgacccgacccgatggtgtgatccacgggatcgaaagggttttgattcctcgctcagtagaagacgatttcaaccgtcgacgtagtctacgaacgatcacagccgttaaaccagaaggggctccagtggttgacccgagaacaaaccggttgaagaaaccagctccacctaccaaacccggttcggaaccggctctaccgatctacaacgcaatggctccgggtccatctctagctccagccccagcacccggacccggtggccctcaccaccatttcgatggggagagtcaagtcaaggattttatccaaaccctccttcattacggcggttacaatgaaatggctgacattttggttaacttaacttcgttagccaccgaaatgggtcgattggtttcagagggttacgtactgactgtgctggcaccaaacgatgaagccatggccaagcttactactgaccagctcagtgagccaggagcaccggagcagataatgtactatcacctcataccggagtaccaaactgaagagagtatgtacaactcagttcgccggttcgggaaggtgaaatacgacacacttcgattaccacacaaggttttggcccaagaagctgatgggtcggttcggttcgggcatggggagggttcagcttatttgttcgacccagatatctacaccgacggtcggatttcggttcagggaatcgatggtgttctgttcccgcctgaggaggttgagtccaaacccgtttcccaaacggttcaacccgccaaaattgtagccaagcccaaaagaggtatttttattcatttttttaattatactttattttagttttttagtgaaagttactcaataattgcttggagcttggactaagtaatcggctaaaaagtgaaagaagaaaaaattgggggaaaattgaccatttattgagttttcttttgatgtatagcaaaaaaaagtattaacttgaataggagtgtttggtatctgagactgaaggcttttttctttgtttacacataaccataaggacaataagtttagtacaaaaccaagcctatgtggattgatcacacagattatgataaaagtcttcttcaagtttctaagataagtagataaaatttaccttcaagttgaagattagttttttgtttttactatttgtgtgttttaaggaacgactttggtgattattagtgctctctatgataatgagtttttgtagaaaattttgtaatttctaatgggacatcacatataagagttatgatggtattgatgtgtgttgacttatcttctattatatggtatgaaatggttcaaaacattaaggcttttcttgaataataccaatagaagttgtattagatttccacaagcttatgccattatgacttatttgattgtaataatataggactaaatcatcatgagaaactaagtgggatatatttgagctttatttattggagtaaagctttttttttttattggagtaaagctgagtagttagcaaagatagcttagtggcttggaattgacttctaggatgggactttttttaatctgtttcttttatctttctacaaacaaaaaaattatcatgatagtaaaattaactgtatatcttaatttttgttgtgaagttacagatagatagtgttattcttgttctgaaatatcataaaatcactccttacttttgttaatggcaaaatgaatcatttaatcactttatatgaattcattaatttgaaaatttgcaggaaaattgctagaagtaacatgtcaaatgcttagagtctttggaaaggattcgcaatacccgacatgccactaaaagttgccctaaaatcctccggttgattgattcaagaaaacaggctaaggtcagcaatcttcatcttccttattatgtcattctatttagtaccccaaaattaaaaaaacaagtgcattgttctaattgcattaccaagcttataagcctctaaataaaacattcatgaactattttgaactcttttattgttggatgaagaatgggcgtatcaccgagtataattctgatttttggtatggttgatgcagagttcttggaattgcaaaggatgtaaaaagacatggaaaagaaaggaagcatacttgaatggacagtagcactatcctttttttttgttttcatttttcttctctgttttgggttttttttttttgggtcttttgtattttttattcttataattttatttttctttgggtttgggtactggaatagagaagtaaagcaactctagctccaaatatattattattataattaagtacataagtgtatgattagcagttattattgttactctcttgaagtttttaggtggtttactttgtggtggtggtgggattttaaggtgtgtaatcaaaaggttgggggcagggtgtcttgcacgttttcgtctgtgcccactttcaataaaatatttcaaacagaaaaaaaaaactgtgaaagtgcaataaaacgattcttttctgtaattatgtatttcaaccaagaatatctcttcatcatttcttctaatttttttcttttatcatattttaatttcccattactatttctttgtaatatattatttggtattttgtgtttcataaaaatatatatttaaaattctgaactcaaatttgacaaaataaaattttatatgtaattaaataattaaatttaaatttataagtcatgaattttgtattttgaaacagcgtagagtattaaataagacttctttttttttttttttcacaaaatgtattattagtgttatttatcatgagctactctatttttctttttttctttattcacaagcgttcattgtagttatagtgaactttttcggtaataaaatttgatgcttatagcatgttaaaaatttaaatctgatgaatatcagagctaatgtattataaagaattatgattattaaattagctagtaagaatttcataattatgataactagtgatattgtatttgtatgtccttaatttgatattttctgtcatttgttaactaaaatagattgattaacagagttggttggaatgaatcatgtgatgtgaagaatttcttctttaatttttattaaattatggcacagatcaagtagttcataagctgtatgagttgttaagttgacttgcacttggtactttgatctattctccaattatattttatttcacgtttgctcattatctcgaaatgtatacaaaattcttacttgagctgtctcacatttggggttgactacaatcctaacataacataaaacgtatttgactagattgatttttgcatcgaaaacttttgttaaacattgttgacatttgtttcaagacccaaagatcacaaaaaacttgagtacatatcttaggttcgctctccccatactcaacttaacatatgtacatttagaggtgttgaccaaatcgctcaaaccgcctgtactacaccgcaaaaaacaatgcggtttgaaattctttgcagtgcagccacggtttgaatttttccaaaaccgcgcggtacggtgcggttttgaaatattaatatgcggttcaaaccgcaccacaccgcatattataaaaatactaatttttatatttttttggtccaatatgtgaaagtccaactcaagcctactaattattgtattgttaaaacttcaaactttttttttttatatatatatttattttcaagttatatagtatttttaataagtgttgctcaagctttgttatatgtgatagtttaattatttagtgatagtccaaaccacataaaccacactgcgccattttttgcggtacgatttttgcagttttttaatttcgcggtgcgagtgcggtttagattaaaaaaaccgcatgtgtgggttagtttgaaaaatagtcaaaaaccacaccacccgcaccgcaaatacccttacatttacacaaactttcacaatttaatacatgcgtacacattcagaaaaaactatgataattaacaagaggcttagaagaagagggaaaaaaaacttttgtgacctttcacttggccacttttctcttcactttttttacacgtacacacatgtgacactttcagaggactactatgaaaatgagttcatgagttacaaataaactaacagcaacacaagttaaattataaaacaaaagagcagaagccaacccacaagaaaaagttgcaattttatttctgaaaagagaaaaattctccatttcaatagaacagtctaccataaagcagaaggactaatgaagttcaccataaaattttcaacaaaaggagaatttggaactttattgctgccaaaggatgttagttatttcatcgttcagaatcgtccttgagttttgttttcccaccactccaagaacttggtttgagcaaccatggtgtccagcttgtagagctgcagggcatggtttgcagcttcttgtccgaaagtccaaccaaaaacacccccggctagaagagatagtccagcacctgtcaattacaataaccaaaagacctcaaaattttgacctatccataccaggctagttgaactttttgctcaatgataatgataaataagggcagttatgacaaaaagattagtttatgaaagtaaattccttcaagagtgataaagtctcattcacttggaatggcttttcatgaacaaagaagagggaaatcaaacatggaatttcagttctttttccattactgcaaaccaaatatgcactaaagtccaaataggagcatccgaatcacagaatgaggactaataagcataagacagaagacagattgatcggcagataaataattgcatctaacaatttctacaagatatttagctagaggaaatcaagagcatgcacactcatagtaaacatgaagttgaagttgagtacaatatacatcatacatgagtagtagcatatacaagagattaaaaaacataggttgggctggaaaataaaggagaattcattctgaaaacacagcttttatactcaaacttatatcgtaaaagaattaatgacagatgcatgcaaaaaaaagaggtccccgggcaaatgaaaagaatgcaaaaggattaatctttccaatttacattccaattttttcttgtactactaattcctcacctaaatgctatttccctcccaaaagtaaactgagagtcggagataactatgactttgtaaatgccaaggatctcttcgcattttaaaaactacaataactccaatgacaagcctgatggacaccaaaggcctaaggtgaggttaacttatgtgagaaagggtaaacaaacttaggtgtttgttgagttggctaagggagggtcttttggtatttctgtgtagggtgagctgcctttggttctgtgagtgaggcttcaatcgtggaggaaaagattagagtaatattctccgcatcatggagagcttttgctctctacttttgtaagagacccttggtctcaagttttccctggattataataacagctccccatttcatctttttcaagttaccgttgtgttaattgctgtgttctaaatactgttgtgtgaccaattgcctactgttctgagtttattgcagcaagtactcatcaaagctatacttatattttctcttgtcatattactaatctcattggtgtgaattcaaatgtgacaattaatattgtaaaatgttgttgcaagaaataccctaaaatttggcacacacaaatgattttataggaaataaaaccataaatcacaaaaggaaagaacctggaaaattcaacgatctagaaactttatttccaaacaggaaaatgtgatgggtctttactagtaacaaaagaggcaagcacagaaaattatatcctgaattatcttctaatgtgatcttaagatattgatgggctacctacggtggtctccaatttcagaaacaatgtgaaaatggatgaccagatgattcaatagggagataaaggcagtggtgtaagactgtgaaggaaacaacaaagcaaccagatggttttactttaagaataactgagagaatgttaaaagagcatctcatgaaagattttagtaagtttcacaaaaattgtgtcataaacatttccaccaatgaaatgtatgtgcccccttgtctctaagtcatcattcttgctcaataaataaattttgccccatcagtttaatcactagcctctacaggataatctcaaaacttctagcgaatagtttgagagatgtgtaatctaacaaagtctaagaggctgaaggagcttttatagctgtaaaacagatattggatgtggctttaatagctaatatgtttgttgaggaatacaaggtggacagtagagattgatgatacattatgtgaaagcatgtgagatatgagtatgacaaagttaaattagatgatcgtttttgaattttgttctggagcaaaaatatttgggattaatggcgtttgtgggcgacataatgcttaccctaaataacatacttgattgtgatcaattgtaaaccaaggtaaatttagaggaggtaaacttctctcaccttattggtaaatggtttggggagaattgtaaacattaggcaaaaagaagatggacgttctctttccaaggtttcaaatttttgtttgttgtactggaagttacaaatttttgtccaagttaactagattacttgcaaatttttgttaacatcaagagtgaaataagtatggattaaagtgtaatgtgggcaaaaacttatggtacaattgattgtctggaaaatactttttaagtgtatagtgggaactactcgtaaaaggaatttgggactacatttaggtggtaatccacttaagtctgatttctgaaatctcatgttagataaaatcagcaattgattcgatggatggaagaaagcatatatctctcaataggaagattaaggaaatagatcatttgctttcatggggaaatggtttgcaggcctaaaatgtctggagagttgggttagggcaacgttataaaccgagatagagctacactaatgtatggttatggagatttcctatgctgaagtaaagtttgtaatatcaagtattaaaaaataaatatatgggcagtagtctaagacaagtggcctctttctctttttttcaaaaaaaaaaaaaaaaaaatatagaaatctttggctcctccaaaagtgaagatgtttgagtggttgacagcattgaataatttgaccactcattagaagttacagggatgcaaggaatttttgctgatatctcatagctagtgtgttctatgtaggggaaaaaaaacattccaaatgcaaagccacttatttttatgttgcttttttcatgggggttatttaagcccagttcctacaattattggtagtttcctgggtatggccagcacattattctgcagcaaatggagggttttagtaggaatggaaaagttttggaaaaaaggatagtgtggaatgtggttacctttactatacttgggccatatgttagggagatatggttgaatcttcaaagatatggaagagagttaaatattggatgaccactatatggaatggattttcaatgatataagtttcaaagattttcatttccccatggtactaaatgatagggcattgcagatgtaatttgatcatgagcttttcttttctatatattagatcaggaatagcttactaggttgtaatttgaatgacgtaaaaagaaaagaaaaataatgtcttagtgtcttacattgaacaagacaatctctctctagaataagaagagaaaagcttaaatttgttaaaaatatttagcaaaataagagcgaattttggaataacaaaatcatttaagagttctattcatatcatgccaccatgaaaatttcatgccaagttgcagtagttcttaatatgagctaccagagctaagagtacagaaacaaaagtattaccatgcaaactccttgaatacttccaggcaaccccagcagttgatactgctccaattacacttcctgtgatgccataattcattgcttctcttgtagtcttcagctgttaagaggtaattccagatagccaaaaataaatagatcaggctaaaattttagtttccaggtataaaaatgggctccagacattactttctagaccaaaattattaaattctactagcaaaatcaacaatgacaaagattgtgctatacttcgtcaaacataaactaagaatatttgcagctttacattacaaagtgtatcaaaatcttgcctaagtataagggatagtgtgtatcagggaagtggggcgggctgaaaggaaaacaactttctttatctgttttcgagaaaaaaggaaatgagaaaacagcaacaacttatgggacaagaaggtggtgttcttccaggactttctcaacatccaagactaacaacttaaacagaccaacatttatttcagacccaacaaaaccattaacccaaagcaatcatcagtttctgtacaactagacaaatacaaatccaaaacgtatacacacatcaaagaatcatgaccaatagtcagttgttgaagaaatgaaaagaatgtagcaaaccctaagttatatttaccaaaatcaacccacagaattcgccatcaaactttaataccatagcaatgtgaaattagataacaaattgatgaacttttgcttatttgaaatgaaggaaaaattataaacacgtatacccagatgaaatttttatgatgggaaagctaaaatccattaaaatctcatgagactgatattttatgaaatcgaaatggaaaaaaggactcacagtggggccatgaacagggtcggaagcaataaattcttcaacatcggaaggagtccaacggggaaggggtttttcacggttgacgaagttggtgaagtgatccaaaaacgaaaacctctcgctccaaaactctttgtaacctgaccagtacttcgtgaagggcgatttggatgatgaatcttccgccatattcttctttgcttctcaatcaactcacaatctctccaactatttccctcgactactctgcctctctattccccctctcaatcaaaatccgatatcaatagtaagccttttctttattcaaaaaaaaaaaaaaaaaaaaccttttctattacattgagctggaaaatatgcacttaaaaacaagaagaaattacacttattattactataggattttaaagattgttatgataaatatggtatatttaagtttgaccaatttatatgatatttttttatttttaagttttttttatggtatttgatatgtcatatatatgtaattaggttttcaaaactcatatttaatatttttatttgtttaggaagttttatttgtcactcggtgtcggaaaagtcgtcgaagtagcggttggtgtcgaaaaagtcatcggagttgctgtcggtgccggaaaattcgtcagaattggcattgtcgccgaaaaaatcactgaaaaaataccaagaaatcggtttcttcttcaagaaaccagaagaagacaccagtttctcgatgaaaaaatcggaaaccactttctttgtgattttgtcgtttacaatgccaattttgacgactaatctgacgctagcagctactccggcgacttttccggtatcgacagcaaacttcggaaaagtaatcagaattggcatagtcgccggaaaaattatcaagaaactggtttcttcatgaagaaaccagtttcttaatgaaaaaactagttacttgatgaagaaaccattttcttggtgattttttcgctgatttttctgacgacaatggcaattctgacgactatactggcgttggtagcaactctgacgactaatacaccgacagctactctggtgactttttcagtacccacagtaaactctgggaaattcgttggaattggcattgtcgctggaaaaattaccagaaaaatcaccaagaaactggtttcttttcttcatcaagaaaccaatttcttggtaattttttttatgatttttctagcgataatgccaattccaattacttttttagtgtcggtagcaactctggtgactttcccggtgccagcagcaactccagcgactatgctaattttgataacttgtttcagttaactttattgtttagcatt

SEQ ID NO: 16337 - DNA, 10680 bp, Cannabis sativa
  modified_base (10614)..(10638): a, c, t, g, unknown or other
atacgtgactcttttattttatatgaatgtaaaatagacagtttgaatattactttctatactacaaattattttgaatttctcaaaattttacaaaatatcttaagtaagtaaaacatacacgattacgacgaaaaaaaaattagattaaaaaaaatcctacatgctagcattgtaagcaccctataaatatatatagtcccattaagcataaaagaagaaaaaaacttataacatggtaattggtaactaaaatatactcatttacttaaaattgattaaaacttggcttgacggtgacaacttgaaaagctacttccttgcttcacaatcacaccattctagccttctcaaaaagaaagtgaaaattccattatctattgtattatgaacttgtaagcttgcaataattgttcaaaaaattcaatcaaataaataaataattgttcacaaaataaaataaaagaagtgaaaaatagaatgccgtactacaataactgttaaaagattaaacccgaaataattccgtactaaaaaatgtaataacggtttcagttttttttttattgttttcaataaataaactgctcgtcaaacaagttgcattttttatttaaaaaaaggaaataaattattttgtcaaaaaaaagagaagaagaaactattttatataaaaaaaataacaatgcattgtcatatccaatcacatttttgtcctaacctaatttctccctttttgtcaaaatatgatgtcataaaccattctcatatggtccaatcctcctagtcaccttgataagcaagttcacacaacaactaagcaataatactaataaatatttgaaaaatccataaatccagctacataattattaatttgtcatcaaaatacaatttttattttttgtcggggaaagcatttatcagccctttaaaaaaaaacgttatcagccactaactcaagtgagtgaaaaatcccttgtgcatattttaagaacagatatattttacctgatattttttgtttatataattaatagaaatgaagaaaacaagaaaagaatcccagattgtaaggggaaaatagaacaatctagatactaaaaatagaaaattaatacaatagtcaaacatcattaatccctataacaaaacatttttgaaatccctcccacaagggtgttttggtcacttcgtgtaagatttatattcccacaatttattttattatttttaaaaaatgaaacacgagacaagttttaattccaaattagagtaatcacttaccatttaccaaaaataaataaaaaaatacaacaagtcaataacaccaaattaattaattactgtccattttattttcatcttcaagaagcattagctttctctttcctcttttacagtttgcaaaagctgatattggtaccaaaccggaaacagtgcataaaaagcaaagagaaataaacagagaaaagtgagagagccttcagaagagagagagaagagagagatctcacatggggtgagagagaaaagcaaaagcagctgaagctgctgcaaaatcaaaagcaaaagagaaaaacaatcaaaatcaatttatttattttttattttatttttggtaagtgttgtattatatacttttatgtatggttttttccttgtgtgtccttttgattgttatagttgtagttttcactcatgtttttgagagaatccatgtccgtgttgtttacttctcaagtcataatgtttttggcgacttttgtagttggtggacaactttgttttcgatttttggtttttgggtaggtacaattttttttttaattctttgctatgttcatggaatttcggaagctggtttcgtaaaattaaaaactagttctacacttgtttatgtctttttcatgatcataaacttgcgtggtctaaacgctgatggggaagcacttaatgtaaacttgtgattatcttgaaatacctgaattttgttttataattctatggttttgatcatctgggttgaatttatcattgattaggtagtttgtacaagataaaaagttagcagtgacgacttgggttcataatttttgaaactgggctcagttgatcaggtaggttttttgagagttatttttcagatctttgtaacgtatatttcagaatctgatttcatcaattgggtagcttggaatcgtctaaacttaaattttgaatttttggcttgatggctataggtgctggttctggctctggtctagatcacatagcaagagatatacagcttcatcctcctgagaaattttcaagtttaggtggtttctgtgctggttctggcttgattttggatcggaatctggtctagatcgaatagtgaagagtggtgttattgaacacagttatggcatccaaagcagattctagacgtatgtattcttggtggtgggatagtcatgtaagccccaagaattcaaaatggcttcaggaaaatcttacaggtatagtactgcattcctttgcagtttttgctcaatatattgacttgggtccttgctaagactgactgtttttggttgaacacagtttacagtttacaagtttttgtataaattctgctcacacttgtaaatccaaattcttctttactcccttaaaatgtgcctattctctttgtttccaactcttatgttttcctttgttggtttgggatttagtagtttcgtgttccctactaaccagttacaattacttcattactgcttgaacagatatggattcaaaagtgaagctaatgataaagctcattgaagaggatgcagattcttttgcaaggagggcagagatgtattacaaaaaacgcccagagcttatgaaattggttgaagagttctatcgagcatatcgtgcattagctgaaagatatgatcatgcaactggtgtcatccgccaggctcatcggactatggcagaagcatttcctaatcaagttcctttcaatatgtcagatgagtcccctggttctgctactgatggtgatcctcatacacctgagataccacattcaatacgggcattctttgaccctgatgaactgcaaaaggattctttgggactctcatcatccaactttcatgctggcaagagaaatggtggttttggagaagaatctgatacagtaacaggaagaaagggtctaaaacagctcaatgacctgtttggatctggagagaaagcaagccatgcgaagttttcacaaggaagagcaagaaaaggccttaattttcaagatttggagggagagagagatataagtgtccagagcaatggcagcagtgatcttcaagctcaggctgagtcagattctgatcgagtgggcaaagctgaggaagaaattttgaacttgaagaaagcccttgcaaaattagaatctgaaaaggaagcaggcttggttcagtaccaacagagtctggagagattaagcaatctggagtctgaagtctctcgtgcgcaagaggattccagggaccttaatgaacgagctagcaaagctgaaactgaggttcaaaatttgaaagacgcccttacgaaattacaggcagaaagggaagctagtcttctgcaatatcagcagtacttggaaaagatatccattctggaaaaaagtatctcttctacccaaaaggatgctggagaacttaatgaacgtgctaggagagctgaaactgaagctgatgttttaaaacaagaccttgctcggataagaactgaaaaagatgctgcacttgcacaatatgaagagagtatggaggttatgtcaaatctgcagaacaagttactacaagctgaggagggcgctagacaaattaatgagcgtgcatataaagctgaacacgaggttgaaaccctgaaacaagcagttgccaaattaacagaagcaaaggaagctgctgctctccaataccagcagtgcttagagagaatctcttatcttgaacaagaactctctcgtgctcaagaggaggcgcggagactacacaatgagatagatgatgggcttgcaaagttaaagggcgctgaagaaaagtgtcttcttttggaaaaatcaaattattctctgcaatcagagttggagggtttagttcataaggtgggaactcagggtgaggaactaacagagaagcaaaaggagttgggtagactatgggcttgtgtacaagaagagcggatgagatttgttgaagctgaaactgctttccaaacattgcagaatttgcactctcagtctcaggaagatctaagatcactagtttctgagcttcagaacagggctgaaatcctaaaggacatggaaatgcgtaagcagggtttggaagaggaagttcagagagtcaaggaggagaacaaaagtgtaaatgagctcaatttgtcttcagctgtttcaataaaaaatctgcaagatgagatcttgaacttacgggagacaataaagaaactcgaagaagaggtcgaacttcgagtggaccagagaaatgctcttcagcaagagatatactgtttgaaagaggaattgaatgaatcaaataagaaaaaccagactatgctagagcaggtggagtcagtaggcttcgatccagaatgctttggatcatctgtgaaagacttgcaggatgaacactcgcagctaaagaagattcatgatacaactcagattgagaaagtggctcttttggaacaattgaagatcatggagaaactaatggagaaaaattctcttttggagaattctcttgatgatttgaatgtcgagttggaaggagtaagagaaaaggtgaaggcattagaagaaacctgtcagtcacttcttgaagagaagtcaaatcttgttgctgagaagaccagcttaatttctcaattacagattgcaactgagaatttagagaatatatcaaggagaaacacttttttggaaggttctcttttagatgcaaatacagaacttgaaggattgaggataaggtcgaagagcttagaagattcatgcctggtgcttgatggcgagaagtctggtctcatcactgaaagagaatgcttagtttctcagttgggtattactcatcaaagactggaagatctgggcaatggatatgcagcattagaagacaaactttctgctctggagaaggagagacaaactgcacttggcatggtagaagagctgcgcatttgcttggacactgagaagcaagaacgtgccagttttgcacagttaagtgaaacccggttggctggtatggagttgcagatctgtcatctacaagaggaaggtcttcggaagaacagagaatacgaagacgaacaagataaagcttttaatgctcaaattgaaatcttaattttactaaagttcatacaaggcctagaagagaagtatttgtctctcatcattgagcatcaaaagctcctggaggcctcagaaaagtccaagaagctgatctcgaagttggagaaagaaaatgatgagcaaaacgtggaaaataaatatctgtctgagcacaataatgtactgagagtggggctttgtcagtttttgaagaccctggatattgatgataaccttgggtgtgcaggtaaggttgaacaggatcagagacttcttaaccttgtacttgtcaaacttcaagatacaaaaaattctttgtttagaagttttgatgataatctacaactggtaattgagaagttagttcttgtgaccatattggagcaagtgcagttggaggggactaatcttatgacagaaagagatactcttgatcagaaatatacgaaccagtctgagcagtttgtggcattacagttagagaagcagaagctttggcaggccactgaagaattaaaattgaaaattgtggagggtgatcacagagaggaagtgttgacatatacatcagagaatctttgtaagcagctgtcggacttgcaaggggagtaccaaaatctgcagaaagaacactgcgaggtgcttgagaaaaatgaaaccttggtgaagacggtctcagatttgggagaacataagagcttcctagaagaggaaaaccttgttatgatcggtgaaacaatttatcatagtaatctttctcttgttttcaaagatattgtctcccaaaatatggtagatcttgacgagcttagtgaaagattgaacaagcttcatcttaatcatatcgaccttaaggagaaggcaagaacgttggaggacaagttggaagatctacagattgaaaatttacacctaaaggagtgtttaaataaatcagacattgagctgaacattgttacgtctttcaataatgacttaaaaactgaaatcacttgctcaaaggatctgctatctcagaaggaaaatgaagttttattgtgggagaacaaagcgaatacattctttgctgaattggaaacctccaatgtttgtaatgtagtactcgaaggaaagattagcgcgttcaccgatgaattcgctaggctcgaagatcgaagtaattccaaggatagagagattgaacttttgaaacaagaagttggcacagtaaaggatgcaaacagaggactccaagctcggatggctgcatatacctcagctattaaatctttgaagaaaagtattacatctcttgaaaaccatgtagtactggaaggagaaccttctaaacgtgaaagcagtgaaatagaggtaatttctgtttgttcatacgcactcactaaacatatccaccatttactccaaatgttcttaaattttcaagttgtaatcttctctaagtgtcaccatgtacggcagccttacatctagttatgaatatatctgaaatgttatccatttgtttttaggatacttgtttggtgtcccagaatgctgaaacctctcaatcagatgaagttcattctgctaccatggtaccagatggaatttcggacttacaggactttcaatcgaggattgaagatattgaaatggccctaatggagaaggaaaagattgtgatgcttgaatttctaaatactggtaccaaactggatgctgcaatgcaggaaattgaagagttaaaggctagaggcaaagaaaatggtcaatctagcaagcatatttatgcaacagaggaagcagatgaattgaggggtagtcatagacttaacaaaaacctgagggtgcggacacggagccatgaaatctctgaagttttaacaaaagacatcgtccttgatcagatatcagactgctcttcttacgggagaagcaagagagaagcagtagaggctgagaatcagatgctcgagttatgggagactactgagcaggatggaagcattgacttgaaagttggcaaatctcagagggttgctctggcattgaatgagcgtcaagctgaagcaagcaaagcacacaagaagcaaaatccctctattgaatcattaatggagaaagagcttggtgtcgacagattagagctatcaaggagattttcagagcctcgccaagaagggaacaaaagaagggttcttgagagactggattctgatgctcagaagttgtctaaccttcaaataacagtgcaagatttgaagcaaaaggtagaatctaccgagaagagcaaaaaaggcaaagttatggagtatgattcggttaagagtcaactagaagaggctgaggaagcaatcacaaagttagttgatgtgaataaaaaactgacgaagaactatgaacatgtttctcaatcctcagatggatcagtggctgcaacaggttcagatgaaagtggtagtgtcaggagaaggagaatctcagaacaggcaagaaggggttcggagaaaattggtcggttgcaactggaaattcagagattacaattcttgctactgaaacttgatggtgatcagagagaaagtagcagaagaaccaggatcactgagcataaatcaagagttctcttgcgtgattatctctacggtggcggtgttagaactggaaggaaatacaagaaaacacctttctgttcatgtgtgcagcccccaactaagggagattaaagcaattaaatcatgtatcggctcataagtagttataaaatgtaatgagactagttcctttgtccataaattttccctttttttaccttagaattttatgtagacagtaaatgtttttctttttctggtatttagatttgagatcctgatgtacatgccaggccccctatcttaatcaaacgatgacactctcatggatcatggagttgtttttacaatattgttttaataagttttgcaagaaatgaagcaggttctatgtgggaaactcaatgtcatatgtttcaagctaccctctttctctaacttgattttgtactgctaattgtttggtgcacttgccagttttcatactattagtttgaacaagaattttcgaaagagtatcatcttgcttctttacagcattagaggataacttcttcctaatctatatagacattttttgatctgcgcctaattgggaaacattgtgcttaagtgataatttgcattaacctacagctcaactcaaatcgaaacaagatacgcacagcaagaattacaggacataaaaattaaaaaattatttcgatagtgaagtttgttcaacatgcgcttttgtaaacactttggctaaattttccctcaaattctctcccaaaggatcaacttgcttacagtactgttctccatatcctgaatcatgatgtcctgatagagcagcatctggatgcaacttatctccacagtcaattattatattgtgaagcaaacaacataccaaaataatgcttggcagtttacgtttatctggtctccacataaccttgttaagaattctccagcccccctttaactgagagaatgccctcacagctagcaaccttgcagcctcatgctttgcattaaaactggccatggaactcacaagtccactagtctcgtaaggtgttatgagccagggaagtagaggatatgcagccccaccaacaatgtactctctaatctcaactcctccagataaagttgttgaattcccatctaatcggtctccgctgttacaaagtttataaaatccagaaaacttcaacactctagatactgacataccaccaggccaaccagtgaccatatcaagaaatctcatctcatggtcgacaactccctgcacgagcatgctgtagttgttctctggatcacaccaatcgtccgaagtttgaacagcaggcagggtcataatgatgtgtgttgcatcaatggagccacaacaattgggcaatccaaaatctgcttcaagtttggatttgatctcctccattctagctgaatccggccaccttaaatggtgcttggctcgctcctctaaggcttcaatgaatctccaagtaacctgagaaacagtggattggccaacaccaaaagcagccccaactgagacttgggactccccagaagccaaccttctgagtgcaatagcaacctgtttctcaacactaagaagtctaccttcaatgttgatgagtccagatggtggtcttgacacaagatcttctctaactaaagaacaaatgtattcaaaagtctttttagagactctaaagaaatacttaaacccttctgcttcctcatttggaactgaataacctacaagtttgtatttacagttacacctccaacaaaagtaacactagctggatttcatggaatgttcatcaagtaaaatcattaaaaccaccaaaacataagcaattctagtactatgctttcttaatgaatgattaaaagataatctgggaactctcaaattagcatcacagcagaaatttaagggaaaaaataaaaattaatgcttgcctaaagaattataaacttggatgaaaataaaaatggtatagggaatgaagagcaacctggggtggaagaatttttttgccagaaacagtcccaccagtcggaatcgatgggtttgggttcattaggagagttgttcgcttttctggattccttcttgcttttctttgatttcttggggggcgccattagagtgaaggaggatactacccagaatttagatagtctgtgtctgtaataaaaaataaagttaaggcaagtttgcctgctaaggccaacttcaatactaaaagctaaatttaatattaaattaacactaaattattttttattctaaccacaccattaaaatttacactaaaaaatattatttaattaaattatctcacaatataatatatataaaaatctaaaaatttaattataaaaacattattttaatgttaaaaattaaattttattatttttaagattttagtgtcctattaaattaacactaaaaaaatataattttaacattaaattttttttctgtttcaaccacaacactaaaatttacactaaaaatattttttattattatattattttattaaactatctcacaatataatataaataaaaacataaaaatttaattacaaatacattattaaaataatattaaaaactaagtgcatgtttggcatnnnnnnnnnnnnnnnnnnnnnnnnntttaaaaacagaaaattatttttaaaaacaatttggcttgtt

SEQ ID NO: 16338 - DNA, 6735 bp, Cannabis sativa
tgtacatatttaaagtcaaatctcacttatatataattaaataactaaatgtaaatttggaactcatataattgaagacagtttgatcatattaataaaatttatttgatcaaatctgagttcagagtactaaatgagcattattgaaaacacaagatactaaacttatatttagataaaacatagagtatcaaatgattacacacccttctttttactttaattcgcctttttaaatgtcgataaatttcacagatagagggccggttttagtggatttctggactgcagtttcatcttatgagctagtgcttaatggggtcccaagaactgtccttgcaactaacaaaaaagaggatttgaagatctttttagactttagaattcccatagtaaatactacagaacagattggtaatgcattacaagtgaacatgggtaacttagtacctatttatagtactaatcaagcgaaccgacgatttgcttttcatgtaagcaacaaaattcatacttatgttcatttttttaagctatttttctttggatgtaacttgtaagcaaagcatttggaattttgattttgtagctcaatgttacagtaagcactgtcatcatcaaagttgaatttcaatcccatttgataattagtaaaacaggaactactgtctcacctgctgacttaatcacatttgtttatggtatgtcattccacaattttccaatataaaataaaaaattcagtagctttgtgggatcatcatctcttttcttttctttcatcttagattcaatggagcctggtgtaaagctaagtactagtgctccaaatgttacaaaggattcgaaaatcaacataatagttgagtttacaaagcctgttttcggttttaaagcttctatggtagaagtgactggtggtaagataacgaggtaggcgattatgtttgatagtagtcacttcataacagcctgataaaccttaactaatgctaagatggtttatttttcttcatgtaaggttgaaggaactttcgaaagctctgtactcgatggatgtcctcatggaaacacataatatcgtgtcaattatcgttcctgctgggaaagtaaatgacatttcaggaaatctaaatttggagtctaacaaacttgaagtgatgcactgtatgaaatcataaaatatagtttctttcttacttttctcaatcttttttcttccattttgtgtactataatgtaactttctttcttaaagcagatttagccccttcactatcagtagcattacactcttttgtaactgctggaatattgacaacatcatttgcaactgctgttctttcaatttctcttgcaaatcttggagcattagacactcttgcttctggtagtacaaatcttatcggtactgacactgcaaggaatcttcatgtaagtttttgaagtacacctcagtatcgaaaacatgaagtatttattataataaagtatctgattaatcttcatgcagggtatggttggacatcttcaagtgtttgtcctttcagattggctttcagttaatcaaccagttgtattttctgagactgctaaaggtctaaggtggcttatacctcatcaaaagcttccatggaaaaaggatagtgcttcagtttggcccagtcatgtctacttatcagaaggggagcttggaatgaagcttagcaccatttccggggcaatagattcttgcttgaccaatatatcttgtgcgcggttaaatgacataaaaccaaatcctggttggatttatggacattacaacataagcatgaaaaaagaaccttatggactagctcttgattccaaagaatatttcatttatttcttggtgagtatctaatttgtcgcttgtgttttcgaataagaacttttcttacagttgaagaacttgccttgtagagaggagagccactgtcagccagagatgttgtcaagagaatggagaattacaaagggtagctacaattttcctttactttgaaattttagccaaaactctacgagtctatgacactctctcctttgcaaagaactaaactatgtttaatattttataggtggcaggacttagagatgaacttgttctggcttggagttgggggaggaagtctagtcatagcacatgttctcttattacttttcttaaaatggagaacaggaacaccagttcatggcattctttcagtaccccgattcgagctttttcttctcattcttatgctaccttgcatatcccaatcatcagcttttgtaataagaggtaaataatttgatatactctttccaaattctagtttcattttgtcatgattttttttataattttagtccaaatggcaggtggtacaacaggtggaataatcactggagctctactactagcaatcccagcagcctttattttatcaataatcatttttctcataattgcagtattctcaggaactttggttcaatacaaagaaatcaagtatgctgcgaacacagaaccatggtatgcaaagctatggttctttttcacaactaggaatgtgaaaggaaagtggttttatagagaaggcattccttcatctttcctttcacgttttgggattctctttgagagtctcaaaggtcctccaatgtttgtgtttgtcgatcagaacgactcaaacatgactcaaaaatggggtgaaagtggccataatgggattgggagaatatgtactgtgaactcagatgacagcaatgaagaaactgatattcccttacaaagaagactattaggctgcactagatcatcatacatagttattgatcttatgagaagggtcagtttaggaattttatctggagcatactcatcaaagaagccaagccaaagtatcttagccttaacaatcacactagtacagtttatgtatctgtttatactaaaaccatttttaaataagggagttcacctggttgaaagtgtgtctcttttgtgtgagattggtatgtttagtatttctatcagtatgactaacacaaatccaatggaaacacaagagttgggatttgttatgctggctctcctcttcatcacttttgttactcacattgtacacgagtggtacgcgcttataagttctttgttaagactatcacatcctcagaaaaattctctcaagcttggattgaagtttgctgctaaaggtctagttcttcctttcctctcaagaaagcattggtctggagtgagagcagcttcttcacaacccaaaataggcctagtttctggccttcctctaagtccagaaaccgagttgagaagaagagacaggagagcaccatttgctgacccaattggcgccatgacagcaacagtagtaccaatgcttagtcctggctcaccatgctcgattgcagagagaaatgtcggcttgcagagaacgggagagggaaaacagccgaagggatatgaacaagagtcgaaaaatgagatgaagaagttaagggcattggcaagggctagctttgctggagactcaagtggtaaggaagctagcactagctacacatataggtagtgaaatagtgatctcttagtttgtttaaaaatttaaaatttgagtactaatatgtatagaattcttaagattcacaaagtttctgcagagttacaacataatgttagtctcttctgaaactttctagcttaatatataatccatctgatttgcacaaagctcctttagcaaggtttttattcctctgtgaaatgagttttttagtacaaaaatctcttagttacatgaatgacaaagtacaaataactaacttaacggtcaatcatgaccaaaactaataacctttactgaatcaaatgtcatctgacaatcatgaattttacaatgaaaaacaaaagaaaagaagaccagaaaagaacaacctagtggatactattatccatgagaatcatcaccaacaaatccattagagaaagaatcttgattccattcttgatcagtgaaaggcttgagaaacccattaaggccatgaacaatcaacctttgacttcgatatatatcttgaaacacaactggtgcatcgttaagcataggaataccgtcacttgacaccctcacctcgatcataaaaccccttgaaaaagtcggaagctttgtcccaacaacttggcttccaatcaaatcctgccacgtcatcaatctcggcacaacatgtcgccggaaaatcaaagcgtaatcgcttatattcgatgcatagtaatcgaaagttcggtccaccggagcaaagatggtcagtttggtcccgtcaccgagcccggtcaattgggcatcaagaagcgtggccattatatagtaacctctcgacctgagaaactcagcaaccgaagcaaaagactctgtcttgccgtggaacggggcaggcgccggagccggagctggggacggcggctgatcagcccggaagaaagatgagtcaatgaactcgtctataccgtacagagctacgaacccatcaccaaaaacggctttctcgttgatcctgacgtcgtttatggagatgtagccgtcgccggagagagaagcggtgacgattagagggtggtcggggaccatggtgggtattactgagccacgaggaagagtcttgagtgtttcgagggagagttttacgggggacacgtggcggcgaaggagaaacagcgaaggttggcctgacttgacgaaagcttggtctgccggagcaaagacggtggcggtcggtgaatcgtgtttaatggtttgagaggcgattttaagggtcaaggacattgagaggtagccggagtttgagagaatctcggcggcgtttaaaagggtcaagcaagagccgagagcagaggaggagaagatagaaagaatgaagaaaaagaagagagctttggccatggtagtgggagagagagaatggttcttggctttttttggcttagtcgaagaagaagtcttttacagagttaaacttaaagctttgatttttgggcgccaaacaattcagttggtaaagttcgttgagaatctacgacgtgtcgttctattttttctagtaaatataattaattaaatttaagatagactataaaagttatatttgttggtattcgtaaattaaatatgtaattttataaagtttatttttattttaatttgtttgagtagaaaatgaaattagacaatattataccacatcacatcttaccagtaagataattgaaaaaaattgataaaatataatataataccaagtttgaataaccgtttaaaatttaacaggtatatttaacactcgtataagaacaggggagtatgattttttagtaaaaaagtttagaagaaaaataattttttattctttttagtatgaatcattgtgataatgattaatgttttggcagctccattatagatagagaaataaattgaacaaaagttattcagtagttattaaaagattataggaaaattttatgggtggggttgccaaaatattcagttcggtaaaatttgttgagaatctacgacatgtcgtttgacatacgtcgttttgtcgtttaggatttattctccgaacttttacataatctttcccataaacgactatattgagaaatacaaaattatgtaaaaactcataaaatatttaattttgacatatatagtaaggcatactttgcaaaaatggcatactcaaaatatataagagataaatattatatatattcaaataaaatagcttataagaatattcgaaaagcatattcttgttagaaataacaaataaaggttagtacttatcttgaagattataattatggtaaaagaaattaaaacttaccttctattataaaactgacaataaaattaattaccaatttcaacattggcgttaccattttaaaatagccaaacaaaaaaacgttaccaaaagcaaaagaaatcactaaaccctagctataaccctatataaaggcttcattgtcatagagaaccaaccaaccacaaaagcaataataatataccaagtgaaaatttatattctatatcttctatattttgttatagatatggccaagtctcttcatttatacaattttctcttaatcaccatccttgttcttattgcttcaagtaataatatctctctcactcttttatatatattttagaattattattagtaataattttgagtttgttatttaataatgctattatgttatgatttttgtgtgaaggtaataataaggtggatggaaaaatatgcaagattgagatagattattgcctcaataaaggacatgatgatttatgtgaacaagaatgtactaagaatttccctcaaagcaagtcaatatgtgaagtagtacctcctccggctaaatatttagcttgcaaatgcatttatcaatgttaaattatgtattattatcaatttaataataagatttatttattattttacctaatatatatcaattaagtgccattattaatatatattgagtgactatttaatggttacgtcaaatatataactacgatagttacgttaattttgaccattcaattattattaagagtgtgtttggaagtaactgtgtaattactaggtaaggtaattactagggtggtaattacacagtttagtaattacactatattt

SEQ ID NO: 16339 - DNA, 3702 bp, Cannabis sativa
aaagttatcttttccccaattatatactttaattaggaattacatgcaaaaatcaatttgtgaaaatccatccaaacttattatagtcacttataaaattacgttcggacaatatatgcaaagcttctggactttcttttttcttcttgatctttctcttggtgtatctataaagcatgcaaagggcatttagtatttactagaaaagaaggctttccttagaagcataagctaaaaaatgaacagaaacaaattatatatatgtaaagaattattgagactttacgtcaccaaattaatatattacgaaagaagaatattacaataactaaacatataaaaagtaaatggtctgctgaatgtataggagaactgtctctgtcttttttagtgaacctaaactaacaaacactcacctactctaccatcagactccaaaactctcttaacatatctccatatttcagcttataaattactctcaattttcttattacgtttctccacaacacctctctctctctctctctctccctctcaatatggaacacaattggtttcgtgtgtctcttgtttccaacacttcaatacccatttatttaattattgtcacaataataatcgcagaaaaccattggtattgcaatgcgaaagctgagtggaagcagcaagattatttgatgagctataacaataacagtgatagaaatagtaatataaatttagaaaaggggaaaaggtgtgatttatttgaagggaattgggtttacgacaattcttatccactttatgacacatcagcttgcccattcgtagagaaagagtttcactgccagaagaatggacgcccagataaagcttatctcaaatatcgatggaagcctactttttgtcaattgccaaggtacgtatatacaatcaatgatattatcattattttttatatgtaattcgtttatgatcaaattagtagtatactagaaaaattaagttttatggtactataattaatgaagatatgatctttgaaaacacaggtccattattaattaattaatacaagtttattaattagtcgcattcattgtattatttgaatgtttataaataattaatggatctgtatagactatagacgataatgaataataataataataatatatattaataaaaattgggggacagttaattcatttatatatatttttatgctttacagtaattatatatatttttatatatgtacaactaaatgacattagggagaatattacatgatggatggatttgtggtgagaataatgtttggtgtgaaaggaatttatttgagggaagaaattattagctggttgatacattttttttttgacaaaactggttgatgcattttaattaatcttctaataatatatttaaatagaaaaatgtaggtccacactaataatttggttgacttaaaattaaatagaataaaatttaaaatgtataataaatattaaattttttcttattttacattgaaatatagtttttctttttattttaaaatgtattttattagaataacattttaattttttaaaatgcaacaaaataaaagaataaaatgaaaattattttctttctactttattcagtttgattaccttcaatcaaaagctaattatttattttaacatctcctatttatatgtaaattgtctactttattaatttctctatttttttttctaccaaaccatgaaagtaactaagtaatgtgtgattttttttttggacgtaagtaacgtgtgattttctttcctttacaacaaaaaattacataggcataagttacaacttttttttttttcctttttagaaatattgcataataaaggtaatcaaaatatgaatgaatttaatttgtctttatattttggttgggagacaaacacatgtatatggacaatggtatatgtttatcattttcattttctggttgccaacaatcagtacggatactcacccaatctttttttttaattctgtcatttataacaaattaattaaatccttgcaccgacacgctattctatatatttcacattactaaacaaagatgtccctttgaaatgaaatcattaatatatttctatatgtattatttatataaacatggaggtatatatatacgtataattaatccaataataatgtagttatatacattgtttaagcatatatagtcgactaattatatctagtagtgtacccatgcagattcaatggaatagagttcttgaagaaattaaagggaaagaagatattattcgttggggactctcttagtctcaatcaatggcaatcactaacatgtatgctgcattcttcagtgccacattctaattttacattaacaagaaaaggtggattctctaagttttatttcccagtaagtttattatttaattacgatcatatttaagtttattatatatatatgaaggtttacgtaatttttagaatatatatgtatttcgttacacattgaggtgttttaattttcaggagtatagagtgtcggtgatgatatatcgtagtgcttatctagtggatgtcattaaagaaaggataggcagagttttaaagcttgattccatcaaaaacggcatcgtttggagaggatacgacatgcttattttcaatacctggcactggtggctccacaaaggaagcaaacaaccgtacgttgacaacacaaaccaaaactccaattaatacaacaataatatcttattatattttgtataccacaaaatttagaacgcaataaaaactaatactatgtctatgtgtacatgtataaaatatattgcatgcatgcttcgtctgattaatattgttttaattaattaattaatgttattttgagatttataaacagatgggattatgttgagataggaggaactataaggaaagatatgaatcggttggtagctttcaaagagggtttgacaacttggtccaagtggatagactctaatattgatcctaaaaagaccacagttttctttcaaggcatttccccaactcattacaggtagatatttctgtctttttctaataattaagggccttattactttattatcctctgtcaaatttaactaatttatcctttgtcaattttttttttaaaataataattaatttatccatctatattttattgttgtaaaaaaaaatgaaacatctataatatttattcaacaaagctgtatctgcacgtagtactatataaaatatatatcatgatttatttaatttgttttaatatataataataaatagtacaaaaaaaattactcattttggtttatttttggggagagaagtggagaagagtggaatggtgcaaattcaacgacatgcaaaggggaaactaggccggtaataatagggcgttcaacatacggtagaggttggcggccgcccgcagcggcggcggtagtagagcaagtgttggctaaaatgtcaacacctgtgaagcttcttgacataaccagaatgtcacaactgaggaaagatgggcatccttctgtgtatggctttgacggaacaaagggaaacgattgtagtcattggtgccttcctggtgttcctgactcttggaacgaactcttctatgctattcttttttccaattgaattttt

SEQ ID NO: 16340 - DNA, 4988 bp, Cannabis sativa
ttagttacaagtaacattttgttgtgactaaaagtcacatttaattacaaaaaaattatattgtgactaaaaaattgttactgaaagtagtattttttgtagtgtactgtaagtacaatattaatatgtatatataatagagtttctatcatgtggaatgtgaggtcagatgctcttttattaatttcttgttgatgacaaaacaaagatataaatgaaataaattcatgcttcactagtaattgtttgctttcacaatgggattgggtgtgaacataatatgaacaccaattatttattatcaaacgtctttttcactgatcatttgccacgtggaaaatactagccaggtcaaatattagtgataatttatttggttatataaatatttgcaactaagcaatatcattattgttttattggtgtaaaagtctacaagtactataatttaaggggtatttttgccaaataaaataatttagggggtaagagtttacaagtgcaataatgccggagatcaacgtggcttgttttgtttcgtacgattactattggctaattttgttgtacgccactagttttagtttaattttataagaccagcatgattagttttaatttttgtaaaatgagtatgactaattatattttgtaaaaccagtaggttagttttagttttgtaaggtcagtatggttagttttagtttttgtaatgtctgtataactagtttagttttgtaataagaccagtatgactagttttgatttttgtaatgtacatgcttatttttgtttttgtaaggccaattaattttaattttgtaaggccaatatagctaattttgatttgttataaggtcaatatggtctaattaaaatacatcaaatttattgtagccacattcagcaatggagacgagaatagataagtctttatctttacatcagagaattatgtgtgacaatatgtatttaaaatttcatattttattaaatatttgatattaattaattctttttttttctctttttttccctttattttgtaggtatttattaattgaagagtcagaagtcacaactcttagttttgagattttttttttctgatattaacgttttattgtctaattctcttagagtatctctgcatgaccttaaaatagaccatacacttttataaatagaaaaaaaaaatcttctattatttgtgtaacgttattacatttgttattttaatctacattggttcctctcttaaataaaaaaaaaagtgtgaaaaattatttatttttaatccttaattaaattttacatatatttttaaaaacatttaagaaaattggaagaaccacgacatcctttggcctcggccccggccccaaccccgaccctacccttagcttcgtcatcactgctacagcaaaataattagattttaaatttcggaatttctttgagtcaatgattgacgtgagattttttaataaatttttttctttcacaaaaagcaataatcacatgttaattagtaaaacaagaagaaaacaaatgacgtatatgtacgttaaatttttgtaaatgtgtcaagatgatgcaaaagaacaaaaatatagataaattaaaggctctactcaccaatagtatttttttttttcttttttttacgttttctcaaattagaaagaaaaagaaaaaaaaatctatatatacagctagcaatggacaacaccatatagtagataattaggtgttttaaagtattttgtggtgaacgtttgtctattcacaccatatagttggagatagacttataattctaaattatttttgaatgaaaaaataaacttaataagatagtattaacttatattataagttttataaaaaaatattatgtaatcggtatctttatcccccaatcctaaatttcgaacctcaggctatttctaaatattataataataattaatataataaaaagttttatttatagtattatttttatttaatatatgtgagaaaataattaattaataatttatgattcagtatatcaaaccaataaatacgtaatacaatcaagaaataataaaccaaaagatcacaaaattcaagtaataaattaagcagtaaaatagaaaagaataacaccatgcatgtttagcgagttcgagccattgcaatgctctacctcttggtcagaacaacagcaactatatctttattgatatcagtatttacaaggttacaaaaatctttacaaatttttcagagattacgagaataagtttctctctctagtttagactctttctctctcaaccttaacacttttcactcaagctaattagtctgattctctacatattacaaggattgatagttattaatttatagatgtacattgtttcttaaattagctgtgagaatatcgtggcttatttatatcgccttaattgatctagctcatctccagcaataataatctactttagctttgataacacacttttagtacagacaattcaaaaattttaatacagacaaactatttagatgtacatgaccttctccagtttcatcatcacacatgacattccccaagtgatataaaattgtacaactcctaatctttctctttcgaatcacgagattctgactatcacaatgataatctaaaattttatatggccatctacattgttatggttattttgaatttcacaccaatcactacaagaaatgtcacttttactatatttttgtgctggcaaaaggttagtattgcgctggtaaaatagaatttatatgatgtgttggcaaaaggagttgacaaatcaacgttggtattagaacttttgtcagcacaaaatgaaaagcattgcaaaaatgacttttcctagcgcgtaaatgtgttggttaaagttaaattttagccactgcaaatatgcgttgataaaactttgacctttttgccaacgcagtttgcgaaatgtgctggtaacttttaccaacgcaataacgaactgtcctggtaataatatttcttgtaatgaatatttatattgaaatatatttcataaagtttcaaatactttactgcactgataatttgacttcaaataaatgaatttcataacaatttatgtttgcaacactaaaaattatttgaaattatataaaaaaaatggaggttctagtataatatatgctatcttatatatctagatatataaaataagaatgtataagatatcatgatactaagaaacgtcacttttatcagcacagttcgctagctactgtgctggtaaaagtaagaagtcaaagttttgccagcgtacatttgcaatggctaaaatttaacttttaccagtgcatttacgcgctgagaaaagtcatttttgccagcgcttttcattttatgttggcaaaagttttaatacaaacattgatttgctaacccccttttgccaacacatcacaagaaaatgatctattttaccagcacaataccaacttttgtccgcacaaaaatgtgctggcaaaagtgacatttcttgtagtgtgactacacactaaaaaaaattaattttagtcacaataaaatttatgactaaaagtaaaataattgtgacttattataaatcagtattcctatattgtgactaaaaagtttgtagttaaatgtatttgtcacaaaaataacaatttattgtgaataaatgtatttctagtcacaatacttattgtgattaaaactaaattagtaacaattagtaacaagttgtatctaaatagtatattttagtcataagtaagtttttattgtgactaaaaatcatatatatttaatttatattatgactattacgttgtcactaaatataatttttttttttgtagtgtttctattttcacttaaagaaattatataattaatatcaatttttggaagctaattactcaaaactcaaaggcaaccacggactcgagttatagtttttaatgaatataccaaaattaatattaattaacactattttcaaaaaaaatattaattaacactaaaaaatatcaactttgtattgtctcataagtgatagtggctagctaaagaatggagaactaataataatgatcactaaaaagcttgtagtggagaaaatttcaaaaaaaaaaaaaaaaagattgagacaattgatgaatgacatgccataatgtagagagttgagattgacctatcatcgtcaattttgggagattaaatctgaaccgtaggatcttttttgatgctctaatatacacttagtaaaaataactttgaattgggagacaatttctccatgcttgtaacttcttcagaattatgataaattaacatgcttaggaaaaatataaatactgttgtgtacgagttcatgatacttcctcaagcctattattttttgttttttcattaaaatacgtttttatgtatatgtatttcatgttcaaataaattttgagagtttaacttctttgattttgcaagaatttaaacatacttacaatatttctagctagctagcttcaatataggacgttgaatgaactggtcatttttaatataatgtgtacgtaccataatatatatagataaataataatttttttatcatatagggttgctttgaacagcctaatataattaaagatcatattgttagtcttatttcaatttgaatgtatttgtctttaattcttattatatatattcatggtctggtttttagactaatataattaaagatcttgaatctcattagctgtgtttttaggtgtacatgaattattattgatattctctaaagaaatatatatataaatgcttaatagagaatatataattctattgagaatctgttgttatagtcatttgcatatatcaatcgatcttaatagtcttttaaatttgcattccgctcctcgtgtacattttcctc

SEQ ID NO: 16341 - DNA, 5416 bp, Cannabis sativa
caaattgcttgttacataaaaactgaaaccttggagaagataatggcttagtaaataggtctgctgtttgatcttgagtggggatgtagcaaatttcaagcttgttctctacaacttgctttctgaggtagtgcacattgagttctatatgctttgtccttgtatgaaaaactggattcaaggccaaggcttaagcactgtgattgtcacaccataatactggaggtgttttgtgcaacttgatgccaagtttagtgagtaaagagtgcatccagactagttcagtagctgctgaagcaagggctcgatactcaaactctgtgttggatcgagccactgctttttatttcttggaactccaattaataagattaccccctagaaaaatgtagaatccactggtagattttctatcatctaaactagaggcccaatcagcatccgaataggcttcaagtgtaaatgggtttgaaatgaagaccaatgtgaggagtgcctttgatgtatctaagaattcttttgcaggcattctagtgattagtagttggggctttaaggtattgactgagcttgttaactgaataagcaaggtctggtatggttagagtcaaatactgaagagctcctatggtgcttttgtacagttctggtttttcaaatggtggactgccattgagagctaaattgttgactagaatcatgggagtagaacactcttttgcatcttcaaattgtgttctatccaataagtcagcaacatacatggattgtgtcaaatataaaccagaagaattttcgtaagctttaaatcctaaaaagtaacttactgatccaagggatttgagagcaaacttgttgtttagagcttcaattaatcttgatatggctgctgtatctccacctgtgattaagagatcatctaaataatccagaaccaataatagacatccttgctgatattgaaaaaacagagaggtatcgaagatagaagctttgaaatcccaactaataagagtggtcttgagagtattaaaccaggcccgaggagcttgttttaaaccatggagtgatttatttaatttacacacataatctggtttttcagggtcttcatagcctaggggttgttgaataaacacttcttcttgtaactcaccatttagaaaagtattgttgacatcaatttgttggatatctcaatcataggtgactgccagagtaaacaccaatctgattgtagcagcctttatgacaggactgaaagtcgtggtgaaatccaaaccttatgcttgttcaaaacccctcactactaacctttctttaaacttgtcaagtgatccatctttattgtactttgtcctatacacccatttatttgacagtatgttcatatctagtgtaggaggaacaagtatccatgtctttttcctctttaatgcaacatttttagtgtccattactttcttccaatgaggcaaactcaaggtctgttttactatttttggttcttcatataatttctgtttagaagctgcaacaagatataccttaggtttatagacaccagatttagatttggtttgcatagggtgtccctgaggcaaagggggaggaagaacaggtatgtgtacagcatataatatggtttcactggatgaagaggatgaattggaagctaagttatcaatgggagactgagagagatgattttcatctaaaatgggatcaatgttggaaaaagaggaggagatatgtggaatatctggtggagaatatgctatgctatgggatatggaaccaaactgaatatttggtagatcaatataatctaatatagagggaattacatatgcaggagcaaggttattgttgtaagaggaaacagttggcttggatgagaataaagtggagtatggaaattcatgttcattgaaattgacatttctagcaatgtaaattctacctgaggaatgaagacacctatagcctttgtgaaatggactatatccaagaaaaacacacttagatgttttaaactgaaacttgtgttgattgtagggcctgagaaaaggaaaacatgcatatccaaatgttttcaaaaaattatattctagtatggagttatagaggctctcaaatggtgatttgtatgcattgactaaggtgggaagtctattgattagatatacagcagagacaaaggaatcccaccaaaaatttagtggcatcttagcttgagccaacatggttaaccccatttcagtgacatgcctatgttttctttcaactcttccttgttgctggtgagtatgtggacaagggtgtctaaagagaatacctaacttttgcaacataggttctaattttctgtattctcccccagtctgtttgcaggccctaaattttggtgtcaaattgtttttccacaaaggttttataggtcagaaatgtgggaaaggcttctgttttggtttttcagaggatagatccaactatatttagtaaaggcatctacaaacaatatataatatcgatatccttcaagtgtaggatatggagaaggaccccaaaggtctgaatgtataagttggaatggttgagtagttttgagagatgaactactaaaatgcataagatgattcatattgacaagcatcacaaaaggataaggcagattgagaaaactttttattcattgtttgtaagacttttccaagaattacaaaaggggatgtcctaatcgattgtgccacattacaacaattcgattggattctttatagttattaatagaagaagtactgggagtacaagtagatttattacagggtttagtggtactaaaattcactaatggtgtatgcaaaatataagtgactaaagcagaggcaacatgttgatgatgctgagaagatggtaaagaaagctggtagagtccttgattaaggcttccctccaaaaggacttgcctcgaaatcttatcaataacaaagcagacatttgcgtcaaacaagattacaacattattgtcaagaatgaattgagatatactgagtagatttttttgaattgtaggaacatgcaacactttggtcaagaacaaaggtgttaacccgaaattcggctagcacatcagaggaagacacatgtcaagctgggaaagtataaatctagacacataattataattacatttgaagaggaataactcattaaaaacataattgataaagtgttttataactcagatgactaaatagtcttctgggagataaagatatacaaagtgtcgccttgtgcattaacgagaaatcatgtaacttcaggtgtacaagacgaggcactaaccttgttatgtggagaggatataataaccgtgaaaacacttagcgtataatttacagtatacaagctacgtatgacagacgggtgaaccaaagcaactgacagcgaggtggccacctcgccataggaagacatgctcatgttaaagatcacctcgtcactaaaagctgcaattgtcagataaggtattaagtttccatagtaaaagcgaagagatttgcattatcaaccttggaaagaagtatgacaagctccagctcgctatttgctctattcccagcgagaccttccaaaacgatacggtttacaacgtatttaatacacgtttattttgacccagtaaaagcaggctattcacagttgtgtgatattcaaataataaccgcatttatttaacgtgatatgtaatcagaccccatgatttcaagggataatcgttgtaaaaatatcagtcaaccctataattaattgcctactatgtgactataaatagaggcaagttagactaaaaaaggggggatgaaaaaatgataagagaaaaaatccctgaaaaaccatcagaaatctaataagattgactcgtggactatataactgcaaaatccacgtaaaaaatcatgtgtgtttatattttccttttctttaccgtctttatttttttgtgaatgtttaccattcagactcaaattttgattaacgaagatctgcgttaacagtttggtgctttcattgagagatttcgtgaaaaagctcaaacaaaatcctccttacataaaaaataatattcttcttatggctgacaatgaagaaaacaatccttatgaaggagccactcatcgtcctggaaaagagccaatgagtccccaaggatcatatgacctatcatttgaataggccacaagctccgggaaaacccaggatttgggaagcagacttgaagggcctaagataagcaactgtcgtctcttcttaatctagttgatgaggatggcgcctatgatccaataaggtacataccaatctttgaattagaaaattgtcatctcaggcatcgattggaggaagcaaattggcgtaatgctgaattagaacgtgaggtagctacagccagggcggcataggggaatagctccccaaatcaacctgaccatggagaaagagaaccacgaggaaaacctctgaactcgcaaaccagggggcaggaggcaacccaaaagtatccccagaacgctcaggagagacaacctgaggaaactgggggataacttgaaggtgagatgccatatgatcaaccaggaaccaagaaaccggaagttccccacaggaataagggacatctagggaacagcctgggatgcctgggtcctcattcagggattgccaaccttctctccaagctcataggaaaggagcttgcacaaatcccaataggaggaacgagatgaaccaaaccttaggaagaagagcaggacgtgaagaggcgagtgctaccatgaggcgcacggtaactcatattcgatcaatgcaaggagaagagaatactcgtcacaacgatgatcaaaaaggcaaaatacagtctatgagtggaacaagatccgccagcctttatggccaattggacctacgagaacgcttgaaccagaaaaaacttgatcttcgtcaataacttggtccaaagcaaagggattcaatccatttgcgaatagacgagttggagaatatgttcaggaggcatcaagtcggggagccgggaaaacaattgggatgcgattctattgaagaattcgagtcggaagcttcagggtcaaagaggaaagatgactctaagaggtcgtccaaagataagaaatagaagaaacacgacaaatacgtacccatttatactaactaaactgagcttaatggaactcaggaatcgcgcatgaacaggagatcgtttttagtgaaccgaagcctatgaagcacgcgagacgtaaaagggacctaactaaatgatgtgaataccatggagatattgggcataaaatagaagaatgtcgttagttgaaagatgatatagaagttctcatag

SEQ ID NO: 16342 - DNA, 4640 bp, Cannabis sativa
  modified_base (2820)..(2820): a, c, t, g, unknown or other
tttcattctcttgggaatcccaagttcatgttaccacggttttcctttggcaaatgtgagggtggagatcagacaaagacattagacctctgtctcttttttcaaaaaataaaaataaaaataaattaatagctagtggtggcagtatgattggagttgcttgctttgcgttctttggttattaaaagaacaggttatttctccatggatttggtattttctaagctatccttgattttttttttttttttttttggtgctagccttagagaatattaagtattttgtctaattttccaagagtgtcctaatctttgagtagatgagaatctaaatttttaggctaggatttttcttcttcctctatgtaagagaaaaaccaaaaaaaaaaaagttgcattacgtaatttaggacacaaattcatgttactctcagccaaaaccaaaagaaccaaattctgcgtcatgaaataatcaagcatgactttcggttaacatcaaagtaagaggagattcatgaatcatgagtgattaaaaagaatagaaaggcaagtcaccttttgagtcatgaccactgaaagcagaagcgtgaagataataaaatgcatgcatgagaaacataagaggttgcaagccacttacctctggaccattgaaaacagaaggctcattcatgtcgttccagatatacaaggaaggtgtggaaccaacataaacttcagtagagaacctctcagcccaccaagatctaatctcaggattcaccacatccaagtaagaagacgaaccaggccaacaccacccatcataatcattgccagtagcatccttaacataataacccttctgagatgcttccttgtgcaaaaaataagagtcatctcgcttaatatgaggatcaacgatagttaccatgtgcctacccttggcagccaacttcttctgcatctcttctggatgtggaaaaagagttgtatcccatgtgaggtacctcttcccatcagtatgctcgatatcaagccacaacacatcataaggaatatcatgctcgtcaaacttggagtccacattctcaacatcctcctcgtctctataattccacctacactgatgataagcagtagcaaaaagctgtggcatcgatggccggccagtcacactggtatactgccttacaacatctttaggacccggaccaacgaaaaagaatgtgtcaacaatgcctgcttcgctcatccaaaatgtatcaatcctaccctgagacgaaggcagagaaattccagactctgcatcccatccagacccaagaacatcaatctgcatttcagctgagttcaaccagaaaaacccagaagtcccacgagatttcccatgggaaatcatgaagggtattgatccataaagcccaaatggggattcatgaacgtactcaaagacatccaaattaaacaatctataaggttcagattcctcaatcccaggtcctctggtgggcttaagagcaaggcttgtggcatgttcaggaatcccataaacaaaatcagcatcataaaacgacacgtcaaagctaatagattgagagccataaggcctcgtatcagtatgtcctttaaacctctcttcccattcttcaccttctttcttcaccttcaattgctcaaaatcaaacaaaccatgggaattaatagagattacacgacgcttaccttctttttcccgaacataaacttcgaacgggtcgtggcgaagaacgacctcgtagccgtcggataaataaacgacagacaacgatgaatcttcctccgtcgaaagcttctgaagccaaagcttcttatcatcaagctcaggcaaaatcacatcagggacctcaaaccgcttctttcgcggttctagcttggggtcctcatcgatctttagccgcacgatcccgtcctggtaaacggagagactgagaatcaatggcttggattggtcttgatctgggttttcgtgattttcctttggaaggagcttagctgtgagctcaccattgacgatggtgacatcatgggcaacgagggcgcatgaaccagggctgcgatgccgggcttgcttgcagaatggggtctggttgcaggtcctgaattcttccttcttccatgagagaactgagctcagatttgagcccagaagaaggagaagaaataggagactgagatttccaatttgggtttccataatggctgatgattgcaaggaaaatgtgaagcgaatgcttttaaacccaagtatttttctagtaatgactacttggacagttctattctatggatgcaaagctacatacttggaattgctttcaaggacttcagtaaattaccacacattgagaagttatatttaaaaaatataaaatttaaaatgcatacaaaaaaaattaataaaaaaattattatatttttttaaattatgtattgaaatagtctttcttttcatttcaaaatagaatagtcaagaatagaacgaagattgtttcatttccattacatttcattacctccaaccaaacgctacattttttttcttgctaatacccttctaagttttacttatgtttgcaaattaaacaattgagagaaaattacgactaatgttagagaatcaaatcagttaaacattaaacaatcaaacaattaataatgacaagatttacaaacacttaatcgaaatcgaagaaaaacaagggcaaacagagtatattattttagaaacaataaatgcagaaaaaaaaaatcaacaccaatatatatactaattcaagtccgatagatcgatgtgatntatggctctactccagttctggaacaccaccgaaatccttctttcttgattgagcaaaagtagatacaatacagtcgggatgagattctttgttgagttctcacaaaatatttcaactctcacacttacacccaagaatcttcttcatttatagaagattcttcttacaaaatccaaatccaatctctattttctctgcacctatctctccacctctcaatcctctcaatcttttctctctcaaattctcaatctcatatgaactgagttctcaatctcgtgtgtcgaaataacaagtcaaggtggtatttatagccttaagattaagatcctaaagtcgatagttgcaaaaaacgaggttgttaagttagttagaaataaccaacttaaccaactcctctttgagcaaagtctccatatcagcgtaaatatcagagctttcgagactcgcggaccaaggacactcattgatgacgctttcatatacgaatggacctactagagtcgactatccgaaactatccttctaggagggataactaaccaactagagctctatcccggagtgaggctaactatcctgaagactaaacctgtagtggacatgatagttattcgagaacaccctttcagactcaacgatcattccacaagacaccttccgggatggacaagttagctgtccaagaacaacattcgggagacatttaactttctagggacgactttccaaggatgatattggagaccttttcatttagaagaactataccacaaattccacctagttacttcaaattaaaagaatgacgatgatgaataaagaatgcatccatcattgattggtattccaggaatatcagtgtactaacttatgagattaatcaagttcaagcaatgcttaaacttgtttaaggttaagaccttagtcccaacatcagcatgattatcctctgttctgaccttctccaaatcaatcattcatttttctatcttctctctaatccagtagagtcttatatttatatgctttctcttttaatgataaactgaattcttacaaaggtggatggatgattggctatccaaaaatacattcactccccctttgatttgtttcaactcataaaaactccctaaagccataaagcttccttgaatgcttctgtagttgccataaattctactttcgtggtggaaagagcagccacggactgtaactgggccttccagtttatacagttccggtttgttaagaaaatatgggaagtggttgattttctcgtatctctattcgaggcatagtcttcgtccatgaacccttttaactccaattctccttctgctttctcataggttagatcataatcccaagtgcccttcaaatatctcaataaccatttaagggctttttaatgttccatgcccggattggacatgaactgacttaggatgcctaagcgtgagctatatccgatctcgtgctcaccatcacgtacattaaacatcctagagctacaacataaggtacatccttcatattctctttctctttcgtactgttaagacattgttcttttgacaaaacaaattgaccccccaacagaacagatgtactctttacatcttccgttttgaacttttgaataattttcttgatgtacccaaacttctttaagctaatagtccattccttttagttccatgagacttcgataccaagtagcttttgaactggtccaagctctttcatcttaaattctcttttaagcttggctttgatacttttgatcacatatttatctttgctcatgatgagc

SEQ ID NO: 16343 - DNA, 10511 bp, Cannabis sativa
  modified_base (4483)..(4483): a, c, t, g, unknown or other
tctctctctctctcggtctcgctggttcagaaacgcgatggttttctacttcaaagccagaccagaggccggagactatacgattttcatgggtctcgacaagcacgagaacgaagagctcatcaagtacggtttccccgaagacatttggtaaaaaaaaaatcttccttttttctctttcgcaatttctttctttctttttttttttctcaataatttgatgtaaatcttgatgggttttcgatttttgattgcatattctactgggtaggtagtagtatatcaaggttcctataatcctaattcctaagattttgtttcgattatgtttctttctttattctttttacttgatcataatttgaaattccaagaaataaagtttcgcttttttttttttttataaaaaattacataattttttttttattaatatattacttgttgattaaaaaggaagttcacgttttattttatgagattttttttatgtttatactcggattaaacatgtttgaatatataaacacttggctcctaatgatttatgtgcttagccttagttccagaatttcggtgtttgatattgaaaaactgaaaatggagaaggaatcaaatgggttattctggtttatacaatatgttttgatttggtgttgtattgtttaccttgttgcaggttccatgtcgataaaatgtcttctgcccatgtttatgttcgactgcataaagggcaaaccattgatgatataagtgaaggattactggaagactgtgcacagctggtcaaagcaaattccatacaaggtaaaatcttggcttgtttttctttcttgtaatttgattaatgaatgcttgtttaaagtttcttttttccctttggaaattgtaatagaattaattgtcttgttcaataaaaaatccatctgttctgacttgggttttctttgcaggtaacaaagtgaacaatattgaggttgtttacaccccatggtccaatttgaagaaaacagcatccatggatgttggccaagttggtttctacaattcgaagatggtgagctatatgttagagggtgttccttttatgtctgttttggtttgattgcaaatgtgaagtgatatatttgtcctctatttttaaacaaaatataggttcgaactgtgcgtgtggagaagcggattaatgagatagttaatagattgaacaggactaaagtggaaaggacacctgatctgaaaggtaaaattaaaaattatacctgaattatagtctttactctttctctcttttttgtttatgtatttctgtttcagagtgaagtttattgttgtatggagaagaatttgcaagtattagttcggcatgaaatatagcaactttctaaatgctgcacaattttcaaatgtttggataacaattatggaactataattattgatttcctaaatccctcaaattatgcaatgacagtgcctgacagctttgactaactttttttcaaagtacactcacttatttgtattgtaactacagctgagcgagaagcagtgaatgctgcagaaagagctgagaggaagctgcatctgagggagaaagtaagtttaatatttgtagcctttccccatgaatttatgtgattcaatggcatttatactagtctatatatctagtacattgttgtataactctttagataagcactgttgactaacctaattaagtttgttgatatcagcctaggcactccgaagctaatatcttttgttaagcatcagaagtcgttcattattaattgctacatgttgtggctatgtatgtaatggctaatatgtcttaccaggaacttattttgtgatgaaaatgttttgcagaagcgacgagaggagatagaaagacttgaaaaggagagacaagcagaaatgagaagttacaaaggattgatggtttctgaaaatatgacatctaacaaacagattgcatctgcgagcaaatccttgcaggaactggaagaggacttcatgtgagcattcttaaactttgagttgcttaagaagatatcctagaggttcccacattgagtgtctgtttttaagtttgtgattcatggctaaacccctccccgacctgttgtacctgtcaacctgttaagcaggaaaagggtatgcaaattgaaacaggacgggggtgaaaatcgtaaggggaaaagctgtttcgtgtattggagacagataattggggatgtttatcttatctgtgtaattggatcatgatgatcagttattagttatatggatcatcacttgtgctttaatggtcaaatttactaacagttactatggtaggttgaaaatcttgattttttttttttactgtcaactcccttgtccttgacaaaagtaaaaggccctccttgatgtgcattgtgcacatttattcagctggttctctagtctcaacccttcttttcaagcttttggcatagaattcagggtattctttttgtgatgtttggttccattgtgaatggaatttataataaaatagaataagaataggaatggtattttattttgagaggagattgaagttgtttaataatggaatcagaataaatcactagtgtgtattgactaacaatgcaaaaaagaaagatgggtttacaaagtaatgctaaacttgtgtatccacatcacttttgtgattatttacagctataatctttactttttaatgaaaaatattggctgaaaagttgaattgtaatgaaaagagaagaatacatttacaagtgttttgtatttgaaatataagtatgttatattcaactttttacaaatatatataaactatctcagttcttttccacaaaaatgaagttacacaaggttaaactactagaaacgtttgttgtcttttttcttcttcctctttttttggaattctatctggacaatcataattgtagattgtcataaagtaatgatctatatacttgtgagattttatattttaaacttttgtcatttaaaatcttagaatttgaaagtgcggtttgatctaaggaagtgttttgttttctgatgcaactttgatcgttatacaaatggaaatattttggaatattaggagatttttcgactgttttcagtttttggaattgtgttgtcgaaattgagaatagaaaataattttgtcatttaaaaatttaattgtgtttggctattttttttttgctaaaaaaaatactttaatgttccacaccacaacacgaactcaaccccacacctaccttgacatggactccaaacattggcttcggacccagacctagcgatggaccgaacccatacctgaactcggccccaatccaaacttgcccttgaacctagacttcgaacctcaaccccagacctataactaggtatgtgagtgaaaacataaaaaaaatatgttagataaaaaaaatattttgaaaatatatagtaacattttaatgttttctgattttttatttttttttaattcaattttcaaaaaactggccaaacactctttgttggtttttaaaacagttttttatttttaaaaagtgaaaataatttttaagttatgaagtgaaataccctaagaaattttgggtttcataaggggggctaagatgtctatcaatcaaaattattctttaattgacactttagagatgaaagctatgattgcataaggctttagaggactgagaaatactttcattagcttagaagattgctcatttttaagatgagtaaaatgagttcaataagttttgtattcgaaatccaattattgggagggaaaatctttcttcataactagcttattccattatttgaaaaagaaaaaaaaaacatatacctatcaaaaattccactaagaacataacaataaaaaaatatattaattattcattttataataatttcttaaaatataattttttgtttaagataatcactatttaatgattgattttttttgggtaagacacgcgagcaagagcaaagagaatccttctcaggtctctctcccgacgacaacaattcaaaaaaattattcatatgaggttgaaaccaagaaatttaaaggctaggttgatcacaattaataattaaaatgattttaatatagtttctataataattaaaatgatttgaattaataaaaatgtcattcaatttggcatttaacaaatgacaccttgaatttgattttataaaaatgcaaatatttaaggggtttttatactatatattgaaatttctattttttttttttaccgtggggcgaattttttttaaaagtattgtgtttttttttttgaaaaatattgtgtaaattttatactatgtattgtgttaagtttttacggttgttccatggttgttttttagttgtttttaattattttattttgttgtttatgattgttttataaaaagacantatttttgtaaaaaaaaatccgtatgatagtaaaattgtaaatatttatttaaaatctagtattttttttaaaactctatatttaaccgcaaattatcttattattaaatgtttagctagaactttggtatttatatttgcactgtatatgatttttatgatatataaacgttttttatttataaatattctatagttttagctaagcctagtaatttattttatttttatatagtttaaaaaatttgaaataaaaatatttttgaaaataatatgaattttggtgtgggataattttattgtttacatcatatcatagaataaaggtacttaaattattcttatctcttaaatgatctatttattatattcatggctccatacttgaatggtatcaattccgaacacccttgtaggaggtgggtatgactgtatgagaaaaacagttagacatggtggtgtttttggatggtatatatttgttggtgttgtgcacattacaaagatatacatgaatttgtcaaaagatgtgataaataccagagattttcatatataccttacgtaccacaaacagaattaagaatgatgaccttgccatacccatttgcaatatagaaaatcgacttgattggggcattacccacagggcgaggaggagcaaagtacgcagtagtagcagtcgacttttttacaaagtggacagaggctgaacctctagtttccacaacttgcaaaaaatttattgattttgtcgtcaagaacataatttacagatttggaatacccattaaaatagtgtctaacaatggaactcagtttgatggcaagttattcactgaaatctgtgaaaggaataaaattattaagagtttctcgtcgatttcaagaccccaaacaaatagacaagtagaagttgttaataaaactttaaaggatactatcaagaagaagttggacgctggaaaagggagatgggtagatgaactaccacaagtactttgggttcacagaacgacagagaaaacagcaacagggcatactccattctcgttggcatttggctcagaagcaatgctgccagtagaagttaatattgtgacccacagacgcgaattctacaatcaagaagaaaatcaagaacttcttaagttatccttggatctacttgaagaaagatgtattaagtcgcaaataactaatgcagcctatcaacatcgaatcatgagatacttcaataaaagagttaagaaaaggctcttccatgtcggagatttggtgttgaggcgagtatttacaaacacatgagatgcatctcctggagtgtttaacccaaactgcgaaggtccttatgttatcgaggcaatagttagaaccagggtttataaattggctcggcttaacggctcgctaataaaaaaccactgaatattgaatatttgtgaccctactaccagtaaacttataatgtaaatattgtattttctttttctttgtaatgtaaatcccagttattaatgaaattaaaatttgttcaagtaattacaaagttttattttttaaaattacttgaggggcatatatatgtgtatatcaactggaatttatctagaaatacatgatatattgcaaacccacccattttaaaattttttaattgattaaagttgtctatggacaatgtaaagtcaaaaaaaaaaaaaaattgaaccttttctttagaaaggaaaatcgaagtaacaattgtaaatgagattaactcataaaacaacataaagctacatgtgaggctgaatatttaacgactcgcattattcaagcatgtattataaacgaggcacagagatgccttaaaaaataatacttaacctaaaatatgaatagaaggcttaactattcgtataagcaatcaaaaaatgtacaaaatagttcacaaaatgaattattcaaagtatgttgaagtttgctttttaaattatatgtggcagatttaaactgcttacataatattggataaaaaataaaccactcgcatataataaggcagactataactgctcgcgagccagaaagcataggcagaacataactgctcgcacacatatatagtagattaataactacttaagaaaaattaaaagaaatgcgagatcaatggaaatgctctcttaaagtatcttaagttggatcaaaatataattgtttaggttgtgattaaaaacgcaaataaataatcatatgaagttcaaacataaagatgcgaggtgatgaagtaaagatagatatataaaggaaaaaaaaaaagttagtcatccaacaaatgcaaatttttctttacaataaataaagtcacaaggggcaagctattgtctcggccaaaggacatttttctaaaaaaaatagaaaaaaaaaacaagttaaaaaccaagtctacatagtaggagacttggatggatcttcttggtctgcctccatcctcgccgagctcttcctttctggtgccctcgcaataagcaagcatagcttcagctccatgacccaaaaaattgaagtccatctcgggattagctagccagacctgaaagatagatctcctagcaacattgttgaccctattcttggtatcaactttggcctcctcaagtttcctatcagcctcagcctgctgggtcttggaggcatcctcaagctctttaattttcttcttttacttctcaatctcctccttggcgcgagagagctcagactctgaatcattccatttcttgtccatgacatctccatgttctctagtctgatggagttcaatctcgagcatctccactcgttagagccctcgatgttgagtagcaaaagacaaaagaaatgcctacgagaaatgaaaaagaagctataagaaagaagcataaagatgaaggagaggaagagaaataagggaaagaaaaaagactaacccgatgcataaactcataactgctttgtgccaagccttcaaagctaccttttgaaagtaggtcccagtcgttaggctcaaaagtttgataatgtctccatccatttgtagcatgtagcgagcagagttgtgaacctttcgtcccggcttcaagaggcaaggggcaggagggctcgagaaggaccatctttgggcgagaaccagaaaacttcacctggtgaacagatccagtgggttgttcactggtgttcaccacggcaagtgcagcttttgttggagatttcgttggttcaataataatctggctcaaggattttttcttgtttgcggttgtttttgtcctcttgggttgtttagtagaactcgaggcttcaattgcttgagaagctcattttttggattttttgtcaacaagaggaggattgttgatcatattctctaagtcaagatccatatctgcaagacaaaaagatacatcaaacacttgccataaaacaattaatgaaaaaaatggggaatacactcccacttagagaaagttaccataagaatcagaagatggcgaggaaaaactataatagttactaaattccctagatcttgtgatcataaatatatcataggggtttattggatctaaatcccaacctgaatctagatggctcgccctatctaggttggtttcgtattgttcagcgatcccatagtatgagctagtacaactaagttggacgaagaaccttggataccaactgtcaaatctatgggttatacggtctataaggaaaaggttccaggtataaaaattatattgactatctgtgaaagttactagcgaagtacactctgccctaagcacagtaggagaccatccacactgattacctcgggaggctccttttttagcttcccgagggatcattccctggcgatagtgtgcacgagccacatagtcctgactctcttcatcaacaggaactgggaccttctcccacgaagagtactttgggaacttgtagtgacaagtgtactcgtctgagccaagaagaccaacaaacctcagatcagcttcattcagaagaaagtctgatgatcgtaatccgaatggaagacttagcaagattttgtggcgctcggctatctcaggtgtagggattggtattgtagagaccgttgtcaacacaataagcaaaataaatcagcaagctcaaagccatgaacatgaaaataactcaaaaccaagtttttgagacaaattttacttaggcatcatacaaaatgcagtggtgcttataggagaaaaaccagtcatccaaaaaaaattctccttgaacttggttttatttggcaagctcacaatgattctatgattgtttgtgtgggtgccaagataatagaagccccctgcacatcgcttcctcacagggattgctttaacagaatagaaataaactatttctagaggagtggggcactcccatcctaaaatataatacaaaacctttaaactcgcaaggattctgtaagaaattggaaccaactgaaaaggggcaatttcaagataattaatgaactctttgaagtaatctctcaaggggagaactgcttcagtcttaatgtgctcaaggctccaagcaccaatcccagacgagccactagtactagcaccactgcattcctcgcaaatgattctttctggggggaagcagctaaactcccctagagcaacagatctgatacgacagcctcgcctttgctctatgttgcaggactttaaaacaccgcccacatactctccaataattctgaccttggattcaatgagttcagcctcaaaggtaacactggggtcttatggagtctttgacttacgaggcttggtgggcatgatttcaaaatcaaggtcacctggtgaaaaagcaatagtgactttggataaaaacattggtcttgctaatggaatagaagataaagttggaggttcaagtcaggttgcatcgcgcaaataatgacgtttaccttcggttatctcttgtagaaaacgcctatagcgactagtagtttcatccttattggtttttattaaatggtccctaatttttgcaccattgatctcaagtttggattgaggtttttggattctaggtttaaatggaagagctaaatccttaaggcattctatttctaagaattctggagttgaaattttaaaacttgattgggacatttctataaatcctaattcctagaagaaatttgtttaaaccagaaacttatgattgcgataaacctaagttttccctctgattaaaaccctagaaattacctagaaaaataaattgaaatcactaaaaccaaaaaaaatgaataaagatgcaattaattacataataaggatcataactcaggaaatagaaaagaccagaaagaaaggaataaatcacttactgtttataaatgagttcttacacgacgaagagctctgtgataggagttgaaatgaatggtgtgatgtattctaagactttctgagattgaagattaagtctgaagagattcgcaggaaataggtcaatgataaagagggcatgcgagattttgaggaatcagaaaaagggtttttcgcagaaaagctcgaaggttttttgaaaacaaaaatggtgaaataatggtttcttttcagttttataccttgagatcgatcaccgttagattaagaggatagagatctaacagaaaagaacaaggaagaattggaaaagatggataattaatgctaatgatgtgcctcgaaattatgaaccgccaaaattcaaaagcatgcatttctacaaattgggttaagacaaatataccttttgtaatcatttaaaaagtactttttattaaaaaaaaactttttaaggggaaattattatacctgaaattcggctacacttcagagggtaacacgtgtcaattaagtggaatatgaaccgcttaatatattaactattatatcatttaatgcaagaaggaataactcattaaatatagaattaatagagtatattcataactcgctgactgtatagt

SEQ ID NO: 16344 - DNA, 7251 bp, Cannabis sativa
ttaaataattatcatcatcgcattctacattcaaaatcgagtccaacgacatataatatgactatatttaaaatttggggtttcaaagcctcacctgagcggtgcacattaacaatcggtggcggtaaaaatcggtgtactggaaacatcgccgaaaatagggatagtgtatatcaaaacgatcacctcgacgagtagatcacactcatgctaaccgtttgtcaaaacggtatacgatatcgttggaaagtcgccgaaaagggacggagctataaaaatatcactggaaaaagtagcgagatgggcaaaatggtttagtgtagattgttctcctcgacgagatgagtttagcggtgaagacgactcgtcaaacggacaccggagatgaccgaaaaatccgttcaaaagtttgaacccccaaactttgacttgcgatcccgagctaacggcggcgaaagaagcggtgccgcttggggggtgagatcgccggcaccagggagttcgagtggtccgacatgtggggttggtcagtggccagaggtgggtcgccgaagtgcacaagtgatggagcttgtggttttctttttgcgttttgaagagagagatggatagatagaaagatggacgataggggtcgagtctgctatttattttttttattttttttgttttatatatatatacatatatatatattattattatttaattattattttatatatatatttgactcggtcgaaaacggagtctttacagtaattctcacaaccaatcaaaatcttggacaccaaacttgctctagatccatgagaaacaaagtaaatagttttaatttattgaaatatagttggctcaagaacaaaaaatttacacaaatcttcaagacatctccttgatatctaatacttcaagtttagacaccttcacacatgccatgaacttaattagtcaagattgaggaagatgagaaagaagtaagaagcagatgagctcacaataattgtgtggctctgataccatattagtaaatgaataaaagaaaaaacaattatttttcattgattattcaaaaattacatattaaacttatatatataacttattatgctcaactaacctaagagagaatagttacaagattgtaactaaaactaatcacagtaggtaagtagtggccaacttgtgcagctagtcgcaaccgtactaacttagacactaattaatcatcacctatatttgataattatgttcactatgccattattataatatgtagacttttggccaaataagttttacttttgaaactacaattaattcgtaaactagatcctctaattaataatttgacgttactacgtacagaatatatatatctatatatatatatataaaatgaaatgatcggatgagtactggagacatatataaattcatcgaagtgagaccaatccgaagttacatatatattcgatcatttcatcacattcattgtacctcattatcacaaaattaatattgctcagcaaacagggatcagatcctcatgaattaatcatgatcatacttccaatatatatatatatatatataaataatatattaattatatcgtgtgtcgtgttcgattgttaaaaaactgcaatattataatttatacagttgtgtgtatatataacttgcaaaatgcagggagattgaagatcataattagtccacggtcatatatatatatactcagtaatcatacatatatttgtactattataaataactagtacaagttcccaaagcaattaatgaacacacaacgagcatgagaatatatatacaatgtataaaatatatatataatgtaatgtatcagaggaatcatgtgccttgccataattacaatcctaaatttaagtaacaatttttcttctttttcggacactcttttattattttgcaccatataagctctttgtgggttgtaaaagttagtattggttagatccaattattaaaatgtgattatataacttattagaacaaaattagtgtaacctataaaaataatataaaataaaaaaaattataaaaatattgagataatgagtttttttacatttttactataacaactttacaaaaatattgtgtttcagtatgtaaaataaaaaaacaaccttaaaacaatttaacaaacaacatgaaacaactataaaacaataaaaatataactacaaagcaagagaaaaataacaaaatattgatctaattgcaataagtaaaataatattatctcctaaatatatttttgtattatgttttttttttttatttagttttgacaatttaattttttttttcatgaaatttgttgttacaattttattctttcaattttttttttctatcctcctttttgagtataatgatagataaaaaataattataaattaaaaaataacaaaataaatacacatagaaatttcattgccttgtattttaattttgccaaaaagcttacaatcacatattaaaataattaaattcttttaattaattaataataataataactaaaaaatattgactttttctaaaaataagattatttttttagtgagtttttagacaacgacgtactcatgtcatgtatagatatctctagaacagcgaagaaagtggtcccttcttaagcaaaggaatttcgcatcgtgtgctgtagaaaactagtttttttgggacaataagcattagatatatatgtaggggaaaaagatcactctagcaaaccacatggtatggctcaaactttacacattaaattatatttatataatcaataacaaatttttatattcatcaaaaaagaaaaaacaaatttttataggtgcagcatcaattttgcttttattgaagttaaatcaattattgaaaaaatttaaataatttacataattcaaaatagtgtatgtatataaaaaaaaatcataataccataaattattttaaattttctaaaaatgagctgaatatggatcataagcttataaccataatataaattattatatagagaaaaaaaaaagtgtaatcctttgtgtataattggatttataaaaaataaaaataaaaaagtacaaatgacacccactatcttctcctatctttatagtggtgggtaccctccgtttctgtatgtagattctagacagggtaggagtgtaggaccttaacatctatgaatgcttccatttccatgtagatatatatatatatatatatatcatatttatgatttacaatccacatacattacgtatataagtactcctttgactaaaatcacgttgtaatatatattttcttattttgataaatgataatgtatatatgaaaatatatactataatttgaaaacaaattaaattatatattatatagtagtgttgtctaaattaagtctgaatatccgaccatttctcatggtcatggataggatctttataaagattgtatagtgactcgaattttgtcagtctttgattaagaatcccgacatttcttttggtatcgatctcatcttgtttaaattcgaagcctttttttttttcttttctaattctctcagcttcaaatattaaattaattaattttttcgtgtgtaatattatatacatcgtatgtttatgtgtgcaagttactagattcttgatgcgaagtaatatatattattaagtatatatatatacataagcattattatggggatgtgttacgagggtgaatatgataatatataagtgggatggaaagaataaagtttttggttatttttttcttatatagtttatagtgacattgggagcagtgcagtagatttacatatattgagcaatgcatgtgaggttgtggggaatataagaggataatagcagagttgtggtcacaatttgtccactacgaggatgatcacatatatatataattattttatatatatacacataagtcgatgtatatatatgttcattattttgattggacttgtcgttatatatttatagatatagcaaaaatatcacaacaacaaataaacattgcactatatatataatctactttcgtcgttgcaatttgcatatatcattggctcgaagaaatgaagaatttggtttgaattagaaaaccattgtataatttaggtttcatgatcaattggttaatgtatagtcaaaatatatgcagcggcacattttaagacctttcacacctttgatatgttatctagtttaatcataaatatatatgtaaattaaaagcttctatgttaatctgccaaaccatctccatgagtatttaacctaaaattcataaattacaattacaattaaataatgcattttatcatcataacacccttgtaaaaattatattaacaactcactaagttaaactaattaaaccactatcataacatcataaaagcatatgaaaaaattcataaaaataacaacacaaaaatagcattatcaaagtatattatctataaataataataacagaatcaaatcagtcaattcttattcattttatttgctctccaaagtaaagttctatcaataacaatttagcttttaatttgctgaagaaaaataatactataaacacatttttataaacacattttcatgcaatttatatatatatatatatattaaattaaaaggtaatggtgtcaaaattctcattaaattaatagtgttcttattgcaatattacaaaatactaaaatgaaataagggaaaacagaaaacattaatattcaatcaaagcaaattattttcctactacattaatcgagttttataattttaataataaatttgtggaagttgcatatatactatattgcacaacaacgtacgctccttctaggacgactgcttttattgaagaatttagcataatattaataactgttttcgatgcaatccttgattgattttagaaggggtgaaaaagagttcactattggtttgaatgttcaaatcaaagctaatacaataataaaaagccaaaacaaataaagaatattttatttaataattagatgaatgcacttctggttttgaatatataaatagttcagctatgaataaattaatagtaattaaaaataaaaacatacctaatttataaataaagtaaaaccatacatatatagatttttttttttttttaatttgaaaaagaatacatagttaatcactagacaattttatttcccatatgaaatcatatgttgtcccacattctcatttcctatttatgtaaaaggaaaactaatcaaaataatacattaataccataccataccatactataacttgtggcaatttaattttttaataataaatcaccactaatttatgataatgcggtagttttttaattagtgctacatgaatgaataaaacaagaaaaagcaataaagtacagttagtagatatcgttctaacaatatatttcagtttctataaagttaaaaatcaatggacaatctaaatatggtgcacatttaattattttactcaagaatgagtatttaaaattggaaaagctacataataataaaaaaaaaaaaaaaaggaaaagctacacgctctgcataaaaaatacagtttataatcttttatcatgcacttgttgtttgcatttttgccaaactgtccggtgcagtgcagtttacagttttgatcaataattgcgatttaacctacactgcactatatattacaaagttactaacctttacaatataatttttattttttctttcatataaagacaaatatatgtaatatatgtgtattattgttttttagagacaatttattatattgacttgatgattagtatacattgttatgatatttattaccttaaagtttacacatctgacatgacatttacacgtggcataatctaaccagttcttaaacatgacaagaaaaccccgtcctatatggggctgacatccataagttgcaggtggccttccatgaagcttttggctgggccaccaacctgtcagtctgggatggcaagagtaagactttgccaaagtgattccatgagagaagacaagtctcaagagaggcctggtcgggtgatcaatatgtcgggcagaaataatattgtcgggagtaccggacaaggctacgcgagccttgatatcttcttaatgtctgacaaatatctcaaattgaatcctataaactcggatccaataaatctatatgagaataaaggagcttcaacagatcgtaactgcacctcagattataggaatatttactctttgttcactcactacaaaaaaataggcctatctcggcgggcccagccccccgttattgttttatctcaacgggcgcaaaccaccgtgaatttgaatggcgacattgaaaaagagtcattctcgacgggctaggcccgctgagataggtgagcaatctcggcgagctaggccccccatgataggtcattttttattaaaaaaattacagaaattaaaattaacttattcctgccaatattatacatatatgctttaacccaaattttaaaccacaataattttttagagaagtattaatacataattataacaaaaaaatttcaccaaagttttttctttgaattgaatgaacattccaatcaagaaaattccaacaactatactgacattgaaacaaagataaatatctatatatacataaataaattattattaatcatgcataaataaaaaaaattaatctaaacaactcaatttaaaaaaaatgaaatcaataaaaacacttttacaatgacattgaaagttcttgcctttgatatgaaaagtgaccatcttagaagaaaaaaaattagaaaaaaaaagatacaaaataagaaaactaaaaagaaaaagaacttttataccattcagatgaagagaagactaacctataatttatatgaggaaaatattttttaacctctaatgtccaaggctcagcgtcgtccctaacttcggggtcatcccaagagaagcttcttccccaacaacggcgtacgtcgtccgcctaaaaagaatacaaaagaagaagaaaaataagaatacgatacacacacactaccattcacgatgtcgagctctttgtcttccattagcgttgccactgcacgtgaaaaacgaaaagaagaacgaga

SEQ ID NO: 16345 - DNA, 1591 bp, Cannabis sativa
tatatatatatatataaaaaacttgtgttttgtccaatattgttcatgtgtgagtgatttgtgagatttattttacactcagggagtgtttgctttggcctttgagttgcatgggaaagtgtagagggattgaacttggggcatctaaaactctcctctacaaaatatttagctttcccttttaaattcatatgggacctacacatttccccacaaccatactctacccactataccaaacaccacctcatagctaccaagccataaccccatgatagggttttgggttttggtaattggataaatgctattgagtgtgattaaaatttatcaaaaaaaaactatatcaaatactacattaaatttaaagtcaaaagagcaagtacaataacaacaaaaggaaaaaaaagtgatgaagctcttgtaccgactaccaagcaaccaacacttacattttgcgtataagcagtccaacatacccttttccagatccaactacacaaaggaagacaagaacagtgtaagttatcctacacaatcaacaatccaaaacaaaagatattttgcggtatatcaatgttacaaaaactgtgatactagaagggcagcatatattttagaagaacaaacatgcatgatcggaacaatcagctgcatacactttttatttgacaattgataggttatgaaataaacaattagtaagtttgaaattgaattgaaacagaatatgatatcaaactcagtgcattaactactcaacatgaaaacatcttccaatactcactttattctggatagagaaattgatgaagttagtatcgaccaaaacccgataaggtggtcccagtgcagagttatatttgaagaacagtgcagaagaaacgtttggcctaaatattgcagacaataaccaaattcaaactgttatatccccaaattgcaaaaatttaaaatatatattttaaaaatatatattaaattgtttaagaaacttacacatttcttggaaccgtgcggagatcttttttattagggttaagaacttcctccttgtagctgaattgtagaatcaatccattattaaataaaatcaaattatattaagcaaaggaaatcaaataaataaaatcttaagcttactttttaatggctttggaagtgacgaccttcttcataacagcaaatttagggcccttcttcgccttacccatctctttgattttgtaagaccctaacaagtgagttgctgatgcttctttcaacggttttcccaggaagagaacagttgcaactgaaacagattaaggaattctaaggccttaaacccaaataattagaattaattttacttctatcaaccaaaaacctttgttgaatacgaaactaaatcttcaaaacacaaaaaatcaaagcaatcaaacaaacccaaaaaagtaataaaactctaattcacaacctgacgctcaaattacaccccagaaatcccaaaaaatagttcaaaacgagtcgaaagaagagaagaagaatcagatttaatttttttggtttaattattaggtttattttttgaaatttgaatttagccgtg

SEQ ID NO: 16346 - DNA, 12094 bp, Cannabis sativa
  modified_base (45)..(63): a, c, t, g, unknown or other
  modified_base (12038)..(12060): a, c, t, g, unknown or other
taaatgttatttctgatctataataataagtaaatctgattatannnnnnnnnnnnnnnnnnngggcataaaacccaacaataattgtcatccctaaccatctttatttactttaagatcaatcgttattgtgatctatgtcaatgagtgcaattatccttagcaaaattacctcagcttttaattatcgccagagtggattgaaagaggcttcaattcaaaatacttagcatccgaatcagcacaaagggcaacccttcatcctcctctttcacatcttccttctctttctcgtcctccaattcctcctccctctcctcctacccgtcctccccttctacatcaacaaacacaatctagatcactttcattaaatgcgtttggaatgatcatcgtgtttagtggctctcctatggagattagccacatccaacataagagctgtaagtatttctctagttgaaagttaccatgctacacgagattattgtatccacacattataaaatttactatacattgtatccctactgttgtttgcagaggcagcagcagcagccccctctcacttcatttccacaaccaacaaatggcattttaaagataaactgctctagctctgatacgggtacatgatgaaagttctaccagttagtctttatgaaattcagtgctatcatttttggaaaaataaaaagaaaaaatccactgtcattatacaaaaatgttgatatatctcttttatgaatgcttattttcgtggagaaaaataaatcatgtttaattttcgtttgatttctgctacaacggcgttttttatttttctggtgagactcagaatcatgacataaacacgcaccacactacataaacatttgaattcttaataatatctgacgcattaattattgtttcattaaaagcaaaccaaaatataatataagcaagatttgctttacgttatggatttagaccactactctaaagcaacaacagccatcagtcctaaaatatcaaatcagaagaaaccacaacacataaatacactagtactaaatacactagtactaaagagtactgggactatgcttcaaataaaaagggactaaaaccttaagtaaaattttgctatataataatttacagattcaataagcgaaggaatcgatctgagaacaaattgcaaaagcagattcaagcccacaaaataaaagcccaaaagacagtaatgggaagaaaaaaaaaaaagaaattcactatactgttctttttcaaataaacatcatacccccaacgttttcttgctaattaccactagatatcctcatctttccgccattaaagtcatctttctccagttgaacttcaagtgtgtttctggggctcttatttgcatataaatgcctattacattagacttagcagtcttcaagtataagatgtgcaaataatttccttatcttcttatttcccccgtcagttcaccatcaataaacatttggtcctatgattcaaacccttttagattgatttggctgtttcaaaactctcatttcttttatctttagatggccagacattccacgccttaagatggccctgttttgttcaaccacagcaaaacacgtagcgtccaatgttttcttccaataaaatttacctttccccgcaaggctgaaaaataaacagaagtacatgtacttcttccagggcctttgaaaggccatggtggagagagttcaagcatgactaacagttccaaattccaagggagcacaatctgattcttctgctaaagcttcaagcatattaatgacttccgccgtgtcatccaaatagtacttggctttactcggtttctgtccaactgtgcatgcaaacaccgatgaattatttgagagtacaccacttgacattgcactgccaataatctcaaacatgtcctcgtcggatctgtcatcaccaacacacagtacaaaatcggcttgtcttccattctcattcattgttgtgaagatattttcagcaaccaagcctttacttactccctgagaagaaaaacgtctcaattattctatttcattagcaatatacaatcagcacaagggatatagacaaataaaagaatttatatcattgccgctgccaaaaccataaattatattgatttcagattatcttgaaagttaatatgattgaaggttaccaaatttacatggatcctgaattgtcgagaaaagattattgaaaatgtaagcgaccgctgtccattttctgacatcatactgttcttttcaagtgtcaattgccaccttaactatttccttagctatatcagctagacagctacccttcactaatcactaccctacgtttggtatggagcaaaagaaaaatgagaggaaacgaagtgtaggaagagaaaagtggaaagaagaaaaacacagtgagtaggtcccactaatttctttcgtttctaaaccagaaaagaaagtggagagaaaaagtagggtgattattgctaaaacttttgtaactacgattttcttccgccacaaatggggttttcaatacaccaggtctaagacaagtagcatcctcctctttttccaaaaaaaaaacagttttataattacaatgggtataaaattattaaattatctttcctataaaaaatgtatattaattatataaggaatacataataattttatattaatccaattttccttcctttccttcttatctaccaagcaactacaaatgaaatatactatcctttctatcttctctttactttctctctcctacctatctctcctattttctttcctccatgccaaacaactataatatagtaagagtgtgttactgtcctctccttctcaatcgggtctactaaaacaacagcattatgagaaccaatgtaatggagaataatgttccagacatctcccctactttaaagacaaaaccctcgtaacaacatatggcaacaagctttccttgtagtggatatgtactctaggccaaactaatactcccacctctaggccagggtggatgaatatgtccaaagactttcaaaccaaaagttaaaataaaatgtgatgaggaaaaaaagggttatctggctcacaatcatatctgaaaaaagaagtgtcaacttacgcttgtccgtaatatttttctcggtggcaatttttcatggtaggttagctatgaataataaatatacaatgattcttatttctaagggaaaatttacatactagaagaaagcaacttgtgaaaaatacacgttgatgtttggaaaggtaataacaaataaaaaaaatatctacaaaatgtaatttcttcagtcttctttgtttctctccccatgcttagacatagataaatatggagcagcctaatgtgttgttataaaagtgaatcgatgaaaattttcatagtctactaataacattaattaaaattttattcttacaattaaacgataaatgcatactctcatcatgcttatcttcttcttcttgttttgatatttgtgaaaataagaaaacaaaattgaatgaaaagaaaaaattagacagcagatggtttctcgtgtataaaacatggatatagtatgctatcaacctttcagggctaattagtacaatggatttggttaatttttagtctgttttttattttttcttcagcttgatgttaacagaacaacagtaatatgctatcaacctttcagtctaattaaaagaattggtatagatgaatttttagtctgttttttccccggttgatgtaaataatggaaatgtaatatgttatcgacttttcagtctaatggaacaatgggtatagttgaatttttactgttttttcatttttcggtgcatacttttaatctattatattttctaatttgtttagaagtaattaaactcacctttatatttgtattgttcttcaaacttttcaaagttctaagcttaaaaactttacatgacaatgtcaatactcttgccagaaattcttcacaaggagcagagtagttttttttcctgaaatattcttactgtcataagaatatttgtagttataggaatgattctcaatgattaggattttaattattgcaacaatatactttgttctcattgcagaagtatggattgtgaaaatggaaatggtttttcacataaaatggaaatttttttgaacaagaatggggtttgttctcataaaatggttgttcacgtgttccatttttttcagtaatgtttcatatttactatttaaataacactatgaagaataggtgcaagtggaaagatgtgcctatgcactgtcataatattttgtaacttacgttaaaattaacattttttttattatattctgttaaaagcacaacaatctgttaaatgcataacaaattatacatttacataataggtagttttaaaaaaaaggtaatgtttttttttttgaaacgaaaaaagggggtaatgttaatgttagcctaccaatgtatataaagtgcaagtggatggacgcgcatacctgtggctttacttctacgataaactgaccacttttcactgcaactggttcatttgctagaacactttctagatggtccagtaactccttggcctggcaagatccaaaactaggatctgcatcacgatgatgccaaactatggcactctctttcttttcgatgtaagaaccatcagtggattccgtgtattgtttcataacaggttcaactatctgtatccacccaaaatcattacacgggccacaaatttgccaatccttgtcagcagaccacctaagaaatcaaatacatttaaaaatccaaatacgtatgtactttaaaaggcaaaaaaaagagtcagataacagatattacatacctcatataataaccatgttctgcagcaataccaagtttatggcaaggagaaaaccacttccctaagctgtctcttcctctcccgctgacaacaaatatggagtttttatcatcagcgcagagcatatttatggtggagatgaccgtcggacttgggactttattgatggatgtttgtggcattacagtaccatcataatccagcaatatagccctgtttttggatcttgaatatgaagaaacaatatgatcaattgacaactttttaaagttgggatcaagggcaacaaccctgaaaccaaagctaagaccgatgccccagcaccttcttctgaaatgatctctacatgttctctccatatcctggaaaaagcttctagaccagtaagctacatcgtgggtgctgacatacctatagtgcttttcatgccgcatttgcttctcagaatcagccatagaaattgcctcattcattgcctcagcagttgtctcaatattccatggattaatacggattgcaccactcaaagaaggagagcatccaatgaactctgatactactagcatgctctttttaggcccatcaaagtccgtgctagactctgaactagacaccccttgtctacatacaatgtactcatatggtgtaagattcattccatccctcactgcggcaactaccacgcactcagcaattgcataataagcagccctttcactcagagagactggcctgtcaataaagatgattggttcataaccggctcgaccaaatgtctcatttattctcttgcagctagcatgtatttcatcctgaatttcctcaaggtctttccctcttgccctagcagggtttgcaatttggaccataacagcctttccatgccaggagggatgctgcctcagcagctgctccatggccaacaacttcaagttgacacctttaaagatgtccatatcatcgactccaagcaatacagtctttcctgcaaactttcgtctgagctcttttactctccactcattatccggatttctcaagactgactcgatctgccccatgtggatcccaacaggcatgattttaattccaaccgttctcccatagtattccaacccaatataacctctttttgattggtactctagaccaagcatccgactacagcaagacaagaaatgacgggcataatcaaaagtatggaaaccaatgaggtctgaatttaacagtgcctttagaatctcttctctcacaggcaaagtcctgtaaatctccgacgagggaaatgggctatgaagaaagaaccccattctgagcctattaaatctcctccgcaagaatgtgggcaacaccatcaaatggtaatcatgaatccaaacatagtcatcttccgggtttataacctcaataaccttctgcgagaaaatcttatttgccgcaacataagcctcccacaaagatcgttcaaaccggccaccatgtgtagctgagtaaggaagcatgtagtgaaaaaggggccacaaatgctgcttacagaacccatgatagaactttgacagaatgtcagcaggtaaaaatgctggaacacacttaaacttatccaacaaaagctgtgatacatcatcctgctcatttgcatcaacatcagcattcaaagaccctacatataaaacctccatatcatcaggtaaaccattctttaactgcaacaacaacgaatcttcatcccagctaaaagaccaccctttattatccagtcgacgcttagcttttacagggagctggttagcaacaatgatgatgcggtcttgaataatggaggaaggaacatcagacgaaacactattagcttgatcatcatcgagctcagatataacaccaggaacagtcattactcgaggcaatcgtttcttttctcgagccattacaggaaaattccctgaagctagatccaaaagattggtatacgatttggacatcattttgaatcacctttttttcctcttcctttcaaacgattgttaatccgaactccaaaatcttataacaacaaaagaataaaataaaaccaacacagtattggtttcctactgatcttttaaacgaatcacatcaaccagtcctctgaaatgaaaataaataaaagcattataaacccatctctaaatcagattcaaacattacaaaatgacctattgattccatttccccactattaccaccaaacaaaatcaggcgataacattagaaaattccttacacaaaaaaacaaattgttaacacaaattcaaaacaaaacaaacaaataataataataatacctgcatctaccttgaaggaacaaaatctgaaccttttccagtacggttttggatcagaaggaagaaaaatagtatcttttcgatttcagctccggaaaactaattttagggtttcgtcttttcggcccactccttcaacccaatagccaatttctctctctatctcttctctttttctctctctaaatatgaatccttcccccttttggagagaacaatttgcaaataaagaaatattactaatgtgtttattaagagaaattaaatattaagtaaaataataataaaatattaaataaagaagaggataaggtcggccagtagactacccagaaatgccaactggcaatgaagaaggttcgtcacgcgctcttattcccccggctttaggcttacgtgtcttcatcatacactgacacgtcgccacgtgattgaccgcttaaacaagtcctcctcctctgctctggtggaacgttcatatagactccactccatcgtaaaatcatatggaagctagaagtaatcccctgtgatgcgctccatatgagattcctgaaaacatcccacattttgacacatttccatgacatttaactcggtccaattattagtggtccccagtgcaccagactgcctggggagaactagtaggcgactgcctctacccagctggagatcacgacacgtggggccatgtaatgccgagagtttggataatgatctagcaacaaagaatgaaagaagttttaataataaaaaaaaaaaaaagtacaaagaatgaaagaagtctattttgctgaatagagaatgaaagaactgtttatttagctaaaaaaaagaatgaaagaaattacgctacttctgacgttggtggcgtcgcgtaatgaaatcatgggataggggcgaaaggaggtgtgtaagataaaacggggttttgatacggcacatgaataccaatataacacgaattttatatattaagatgagaaaaattagaggtaggtggaattttacacaaatttaacatgtttaacataattttttaaatataataaaataaaaaattattaataataatttaattatataaaaatatatatttagtgatttaatgttaagttaaaaaatttaaatttaatttttttaacataaaattaaaaatattttaaaattttttatttttattatatataacaaactatgtatacataaatgtatataaattttctaatggaacctaaatttattatttttctttataatttcagctttaataatagtaaaatagctcacagtgggtcgacacgaacacgatacaaatttttacgggttaggctaaggctgagaaaattagacacgagtcaaaaacgagtcgacaatcctaacatgaaatatagaaacaggtcacataaattatgacacgaatacgacacgataacacgttctgtcactcttatgtgtgaggcccagtttgatgggtcggagtgaatgtcattttcgtcctcgttcagtttgattcgtatttcatcgggataaattgagaattacttcttttttgtattgattaatcaaaaataccctcatattatattttattaagatgtattcacttttgtaagtgggttgcccaatatactctcaccctccactgaagtagcacataatttacattagcctgagaaatataataggggcatcatctataaaagtgagtatatcttaaataatataaaaacaagggtaaaaattaaaataaataaagtaaggtaggtatacaatataattttctctatttatttcattatcatatgcagaaatcacctttgggctaaatcgtaataatcgagttgtatgaggttattcttatctatcataagtacgctttttttcaaaaaaaaaaaaaaaaagttgtatgaggggtattagattaattggctcactgtgtatgagtcagatggtaaggtggcattttttgacttaccttttgtcttcacacctaacttttcaaggaagggaagataagagattaggaagaatatatttatatttgtggatatatatttctccaatataaatcataattgtaaataatgtaatattataattcaattataaaaaaaatatatttaattgtgatgtgaggtttagaaactgaataattaatttttttggtccttgtaaaaggctaatttgaaaattatatgaaaaatgaaattttgtaactttgttatcaaaatatgtcacttataagtttgcttatttgttatagttttttttttatatatttaaaattttgagtaatttacaactaaactatttaaactttaaaattttgtacgatcaacccccaactaaaaatttagagcaaaattctctaaatttttgttctgttttggtctccactttgtcatctactttgctatacaaagtgttaagtcggactgtcattgtgtatacaaatgtatacataataaattttcattagtccatctaatattaataatttaaaatataaaaataattaagaaaattaaataaattaataaaaaataatttaataactaaactttaaaaattaaaatatattttccttttcttttatttcttttttcatttttctttctttttcttctctccctcttcgttcttcttcttctctaccttgggcaaaaatgaagaaacatctaagagggataactatctaatccatttggaatgttttaacctagtttgaactcatattagttaagccaactttgagcaaccaattggtttagggtcattgacagaaacacacattaacatcacatcataacattttgaaagacatttgttagcctcgaaaattagtccagctaacttttgaggttagttaactaatcaccaagagacgaacaaaagtgcattcaacgaatgtacctactcgacatgtatctcataaatttgtcgacgactctcgcgattctcgggatgtatccatgcgattcaatgactaatctcgtggtgattcatgaacgggagaacgccgaaagcgaggacgcaagaaggtgaagtcgcttgtgcatgtgagtgtgtgcatgcatgtgtgtgtgcgattgcatgggtgcgagacaaggggcttgcatgcgagcccatggagggtttgtatgtgagcatgtgtgcgagtgtgtgcgtgttgtgaggtgtgcgagtgtgtgcgtgctatgggcctcgaggggcttgcatgcgagacatggttttgagtgcatgcgtgaatgtgcatgtgttgggggcctcgggggctcgcttgcgagccgtggtatgcacaagcatgagttgtgttgtaacgggtgagtagcgcaacatgcatgtgtcatgaatgtaagatgaagctcattcaagtgcatgctgatgagaatgtcgttgaacggggacaaggcatgcaaaagacaagcgtaccatcatgccacctgtaaactctgagaataaggaggtacaggtagcggagacaatgcatctgcaaggtctgaggacccaactaagggtacactgcaaccacactccggcaaccgaggaccacacctctacaactggagaccacctgacaccagacaaaggcacgaggtgtaaggtcacctcttgaacctgcgatgtgcagcatgaaagcgacatgttgtccccttgggaacaccttgtacttcaggccattagagcttataaatatttctttctcatatgtgagagggggttggaaaatcattttgtgtaactcggaccttgaatgtaatagagagaaaactttcagatatcttttcatcttcgtcttcctcttaatcgtcatcttattcctaggttactttacattttttggccactagatcagttgacgagttcttaccatcaacagtttggtgtcatccgtgggaacggtaagctcaggccaagttgttcttttgcacacaattgttacaaaaatgctctcattgtcgtcaatacgcgaagacttgccttgatggaaaccagttgatcgcgtcaaagcaagacctatcaccatttgccgtcggggaggaggtgcgaacatcaaaaggactcaagtagatggagaacactagcaaaaagtgccccgcaaagtccctaaagtggtagaagatgtcagaatgatcgtagaagggccttgcataagaggcgatagttgtagagggagagacaagtatgcccgagagcacagtgagaacctcactcctgaaacttagagcaaagacctccagagaactttaagggagacaataactcattcacctttacagaggaagatgcaagaggagtgcatttcccacacaatgattcgttggtacttatggttcatatggctaacaccagggtacactggatgttggttgataatgggagtttagtagatatcctataattcacagccctaaagaagttgggactggatattggggatctaaaaccctacacatcactgatatatgggttccccaaagactcgattcaaccacgagggatgatagaactagcactaactgttgggaggagacctctacattccacgatgatgaccaccttcctagtagtggatcgtctggcagcctacaatatcatgctaggaagaccatcactcaaccgattgaaaaaagtcacttcgatgtaccatctaggtatgaaagtttagactcttgagggcatcgccaccttgaagggagaacataagggagctagagaatgctacaacatgtcactcataattgcctctaaacctggagaactaactgttgggttttatgcnnnnnnnnnnnnnnnnnnnnnnntaatcagatttgcttattaatatagatcagaaat

SEQ ID NO: 16347 - DNA, 5508 bp, Cannabis sativa
aaaaaaaaaaaaaaaaagagggtaatagttactggagtgtcacttgattaaaattgataatcatgcagaggtttcccagtatggctgcgtgacatccccggcatagaattcagaacagacaatgctcctttcaaggtataaaacttgtataattcccatgcttgcaaggttatgtttgtacttttttggttattcttatatatatagcactgggagtacccatcatccaagccatagtgtcagtttagagtaattaaaaggagagaaattcataatttttatggtgcttgtcatttttgggttgggttagggcgccttgagatagagtgtgagcaagaaattaaatcttgttccagtatattgaaattgggaagactgacaatgaattttttggctgtgagtaatgagatttactcttaattcagtttctttctttctttctttctcttctaaaactttatccgttgttgactttctcacttaaaaactagttcttttgaacgatttttatcattctagtagattttgttgtttatacatataatattttgatgttacctttcttttttgctaggatgaaatgcaacgttttgttaagaaaattgtggatttgatgcgagaggaacaactgttttcatggcaaggtggtccaatcattatgttgcaggttggatgcattaaaatttgagcattgcatacataagagattaaaagttcatttaaaccatgttctacttctttaattgttaagatgattcacatatgcttgtatgttcttattgcatatttatcagattgaaaatgaatatggaaacattgaagggaagtttgggcagggaggaaaggactatgttaaatgggctgcaaagatggctttaagccttggtgctagggttccatgggtgatgtgcaagcaaactgatgctccggatgaagttgtaaggtctttagccattgttttaaatttgtctgaccttatatattatggctgtaagaatgtgtagggacctggataggtgaaacttccagagcagtggcggataaattttacaacgtgtgataccttaatgtgatgtttttcataagttgctttcttcatttacagatagatgcatgcaatggatactactgtgacggttataagccaaattcctataacaaacccacactttggactgaaaattgggatggatggtaatatcttataaaacttcattttttttcccttcatgtattattttgcattttttgtttgtttgtcttgttttgtttctcttaattacttcagctttcgcaagatggttccccccctccccttccctaaacttgcatgattttatgctatttgtcgtttagtatgtagtgctgtcatccaagtaatgcttgtaattttataaatttcaagctattactagatagattccatttacaaatgaacttttgtgctttatgagcgataaattataattttaggttactgttttaaaggtatacgacatggggtggaagattgcctcacagacctgtagaagaccttgcatttgcagtcgcacgcttttaccaacgtggagggagctttcagaactactatatggtatggtaatattgactttgcaccagccaaatttctaaagcaaaattttcactttcagggtatatagtgatgttaaaacatatggaaatttgttcttacatatattggtgattggcatatgaaaatagcagaatttttgtaagacaaagcagtaacagaagactttctttgggataaaataaaactctgggtggcaacctgggtataatttagtcagggatgggaaaaattatgcggcttttgtgagcaaatttagatctcattcttacttttttgattgtactttgggtactttttgagggtttcatgtttcaatcttatgatgcaaacatgaacctattactttataatttagtctaataattaataccaatttttgtttcttaaaaaaaaatttcatactttatgccatcaagttcatatatatacatatatattttcattcttaattatatgtgcattctgctgcatcactggtcatctgtgtggttgcagtactttggtggaacaaactttggtcggacttctggcggaccattctatattaccagttatgattatgatgctccaattgatgaatatggttagtgacttttgattatttttcttcgtgctttatttggatttttttgtttgtctatttgaggaaagagtgatttccatataaatattctgaatcgaaaggaaaataagtgcgaaaatatttagattaaagcatgtttggtcattgtgtaggcttactgagtgagcctaaatggggacatctaaaggatctgcatgctgctataaagctctgtgaaccttctctggttgctgctgattcaccccagtatattaaattaggaccaaagcaggaggttggtgtgacccgctgtttttcttgcctaacttttggttatgtgggcacatgatgacttataattgaaatagaaaagaaaaataaattatagaaacaagaaaaaactcactgtcacgtatgcctacttcatgacatggaacttagcacttacctttcccgatcactatgatcatctttagagtgtgtaaagagattttatattcatacttgttagagatttattttattggttgggattagatgtgtatcattaaagtctgttataaaaaagcttaatcctctcatgcttgcgactttccaaaaagatactgtactagtacagattgttcttcgactgccattaataaaatagtattcatgtgattttgctagcatttgatgtgtccaggtcctaaatttattctgaatcgttctgtgattatttgcaggcccatgtatatagtgaaaatgtgcttggtgaggacctaaatttcagtttgaaccaaactaaaagcagatgctctgcttttcttgcaaatatcgatgaacataactctgctactgtaacattccgtggtcagaaatataatttaccagcttggtcagttagtattttacctgattgcaaaaacacagtgttcaactctgcaaaggtaggtgtttctattcctgtgcacttactattaatgaatgggcattaagcatttcttgcctatgcatcaatgcactattacctatgtatcctatctaatgctaatctatttatttgaatctgagtgttaatctatttattcgactcttcattgttaattgttctacatgagatcaaactaccaattagtatgtataattgacttggtggatttttaaagaagtaacttttttttcttttaaactattttatgtcatcttaaatttattgatagcatgagaaaagctctcttcctgctatatatctagttgctgaaggaactcaattgcagagatttttttcttcaaagttgacttgacacattatttgaatgtttattttagttaatgtgttgtgcaaaccttgactaaatgaacaagaggatggtatatgaaattataagatatatgcatctctcttcccatttttgatcttagatagtttagctgttgtacattccaatttttcgaatgggtttctggagtacggtctttgttcttgttgtatactataatgaagtgtgctaattaattgattttgagcatgcttcctgtcttttgtttacttgataatatggaaatgttaatgattttagcccagcctttctcataagtatttgtgctttttctttccatgcttgagtaggttgcagcacaaacttcagtcaaatcagtagagtctagtttgtctctttcttcagatatctctttaagccaacaatttgggactaagaataacagtgtctatgtcacaaaatcctggatgaccgttaaagagtcaattggcatatggagcaacgatagttttacagttcagggtatattggagcatttgaatgtgacaaaagactattctgattatctatggtatatatccaggtaaatagttgttgctgttaacgcgatggtgactaagactacttgtttatattgagtagttttatagcaacctttacttttttcatcttctttcctcttttcccattgattatgttttttcttttttttttgtttggttgtaaaggagaacttgtttaggctacatgtctataactgacctcccatctttattaagaacccttgcttctggcggaggaaaacttggtaacaaatattgaaacttaaggagctaactgacctcctccccttgcttatgtagacttcaacttgtttttcatttcatttcttttcttttcctgcttggtagacaataactattgattgacctggaattagagtgacggctttcgcccccaattatgcatttatttcatttcttgttcatttgcctcgagatttcggtcgccttcttctctgattcactgtagtactactggaattaggaattatttttttctgatattaaaactttattgtttaattcaagttttttttttcaataaagaaacaatagtgttttctagtaccttccccagcaccaatttttttttccttacattaaacatgatacttctttttctcttcttagtaaagtaggtaaaaagaaaattcattaaagaaaatggaaagttacaatagatactatgtttctttagacacatctttgattgggagctgacttgtgaagcataataacaaaaatatgtagcgtttgattaatgttgaagcattactcgttccctaaaccttcctatgctgtcttttaatacctattcttcaaaatgtagaatatatatttcggatgaggacatatcattttgggaggagaataatattagcccagcagttaaaattgatagcatgcgtgatgttctacgtgtatttgtcaatggcaagcttgaaggtaaatagcgatgataaattttataaggtatgcatggaattgtgataatatggtgccatttattaatatttaatttagctctttggtgaggtgatagtggttcggttctttgggccaaataaattgacttaagtccactttcatcacttttacatatctttatttcttgattcatgttctaactttcgatgttgatgaaaaattgagtcaatgctaatggcgaagcaatgatacctgatcttattagtagatagccttgccaacctctttggttttttatgtatgtgacttcatctatacacatctgtgatgtaagtgcatactgtgtagttgtattgttttcttgggactcatacatatctataaaatctgttgttaccagttcacatgctttctactttggagtttcatgattgtaatcttctcgaatacttatagcagttgcagtctttctgagcatgaatattacattgatcttatatagaagcaggttatacttggtcaatgttgtttatagtacaacttctttgtttggccattgatatataagttattgcaactttttgaagtgaaggcactgtg

SEQ ID NO: 16348 - DNA, 8922 bp, Cannabis sativa
  modified_base (101)..(106): a, c, t, g, unknown or other
attaacagtaatatgattacatattatcctacactgccaaacagagtttacacatttccctataattatattctccttcataatattccctataatcaaannnnnntgaacacctcataccaaacgccctgttagttttgctagatggagaagtcgctacatttataattcttatattaatgaaaataatccttcttctcaatctcaagtaaatatactattactatttactatttactaattcataattacatatatttatcacatttatctattatttaatatgatattaattaattaaccttgaaatatttatgcagacgccaagagacagagatcttagtcctagagaaagtttcctgtaatttgtatataatttatatatgtttaattaatgagtatcataataaaattctcaataatttatatatatatatatatatatatatatttatattttatgaaactcactcaaaccaatttcaaccgtcgaagttaaatttagtattataattttagtactttaaatttttttatttacaaaaatatatttttaataaaaataataaactgatttttaattattttatagtttatttataattatattattgtttaagttgatttatattaatttttcgttgtttttaaactttttgttgagcaaattatatttttgtaattttaaaattttacgaaaatatttttataattaaaaaattttaaaaaaaaattgaaaattcccttgtattattctcacaattattaattagatattctacacaattctcataaatttgcttaataactaaatttgcctttttagtatcagaataggaatgattatcagaatggcaatggtaagacctagaagtgaagatataagaagaagagaatcttgctttatcaacccattattgtcagatgtaagtaaaagtaatgtatatctaattattaatattactaattaattttattatttcatattaattatactattcttttcaaaagaaaaagatgggacttaaacaagtgaagtatcatgagtcagtttcgagatatgattcgacggagtgttcagtgtgcttgaacgagtttattgaagaagaaaaagtggcgttgaccttatgttctcatgtttaccatcgacattgcattatgaaatggctaactaagaacaactcatgcccattgtgcaaattctctcttttttagaaaaaacaaattatttaggattttttttttttttgaaacttagggtcaaagagtttgctttttcagcttagaatcctctattgtaaggaggataagttaattaggttatttttattttatttttttggaactgacttaggatcctttgtttagttgtagggaggataaaggaggtttagaaattgttattaattgttattatttgaagaaaaatgtctatttttttaattataaattttattcatttagatcaattcaactttaataatgtcaacaacattaaaaggaagattagactccgaaaaaatataattactatataaacgagacactctagccattagcagatcgtttgacaaaatataaaaaaaaaaatcactaaaagaaaataaaagttgtttacaatcctcaacgataccatctaaagtgatgacaaaatattctaatttctaatagcttgtactaataccagacaatcagattcgataaaattaatactcggaaatcacgcttcaaccacaaaagtacttccttgagagctacaactttagcaatctctaaaaaaactcgtctaacctgcaatcccgaaatcccagccatgttctgaccgtggtaatcccaaacaataaataataatacaaattttgattctatatggtaataaaaaggctttatttttatccaattgcacatttaaacaaaagcataataacattaaattaacacagttctagcacttctcaatgtttaaaatacattacacaaagatgaaacacatacacatacattggactagaaaacaattaatttaacatctacattaatataatatatatatagagtaatcatatgtacatatcattatgtatatgtatgcacatatcattactcataacatatagagaggatgtaaaaggaataccttctcctcactcatgcattttcataatagatggagaaggagaagcaaagagagtttgcttcttaattctaaaaacacatgactagtacaaacacttgtttctaacctactaactagtaactaactaagatgaaatgagaaatttcagttactgttctttccaaattctaccagtcaccctaagcttcaactctttccggtctcccccagagaaggagagagccatatttcgttggataatgagaccatcaaaactgtcacgaacttttcggtgactgtccctaatgcttcttggaatcccctgccataccatcttcctcccatgtccacccacttcaagactgtagttataactctttgcctcaacatcatcacccataaaccgaaggaaagctatgtagacgggagctgtaccgagctggaaagcttcaaaatgcagacaaaaatactggccaaaacagctgaaaacctgcaagtagattaaaaaacaaaaacaaaagtggaggctcaatcctctgaagaataaagcagcacaatattaatctttgttaggccctaggattagggtgtgctagcttatagtaaataataaaggtatatgagtctttatttgagagggtagtattgagtgaaaaattataagggaggaattgggatatgcaatgtattgagtactcacttgtaattagcttttctactgcaatcaatatcaaatatactaagttctttttttttttgaaaaggagaaggagaccacttgacaggtctcccccgaatagattatagtctcacttatggcgcaggaaaaccgtggtacacaaaatgaaaaacaaatacagtgtaaatagaactaaaagtgacccaacaaacgaaaagtccctgagttttacaacgaaacactccatttcctacttaagtctagaaaagaaaaagcctcaaagtgtttggttttaaagacccaagtggctgtccaaaattagaagttggaagttagattttggtgagaaaagaaaatagtaggaaaatgtaagaaaaaaaaagtggggacaacaaaaaaactaaatcaatttttcaagtttgatatggaaaattttgttaaattgagtgtttatctatccaatttttctttccaatttattattttttttccactttttttcttatatattccctacctttctcttttctcactaaaatcccacttccaaacatagccttaagaataaacaaactgaaaagatcacaatgaaagataaacaagaggaccaatttcatgaatgttttagcaagatgagaatggaaagaagagaaataccgttaacatccaggttgcattttcaacctcctgcggatttgatttgacatagcgatgattaaaagtgcagccattatgcatatcaactttgtgatcatcttttaaatgggctacaagagaagggatatcaccaacaatagtgcattctgatccagcatatgggcaattgtatggtctgtaaatgcattgagactcatgcttcaacttgctgtaataagggtatataccaatgcaaccataactctgatatttacatggaagctcaagagatgcagcaactttctctaaagcaagacatcgaatgttcccgagttcatgcctgcaggtgggacaccggttatgaactcttggcttgcaaccagaacataacgtgtgaccatttgaacactgcaacacagaaaaacaaccatgagctgcaaagcttagaagaaatcgcacgtaaatattatgtttaatatgatttcgtagatgcaaagagagcatgaacacttgttaacatgttctaggataaaccagacctgatgaattggagggtacattgcatttaagcaaacagggcactccaaaagatcgcggacactgcttgtaacagctacattaggctttcctatattttgtggagaatcattcagaatttcaccaacatcaagcatatcttcactttgaggaggatcaataacctcggattttgttcgcatatcttcgaaaaatggattcacagatgccatgatgtaaaggggagctggctcaatcttttcactgcaaaggaaaatataatctgataaacatcaaggagggttcgtttggtaatgccatatcacatcatattgtattgtatagtattacattgaattatattttatgaaatatttttatgtaaaactataaatggtattgacttttatcgacacctaaatatataatattttagtataaattaaaatttaacatagtactatatatgatctaattcaatatagtacaatacgacctaatacaatatactaaacgagccccaagttcactgtttaatacaactagtaccaaaattcaaaattggagtacttttgctaaaagagaactaagatcaagaaatgtgcagtgtatttgtttcaatgcattaattaaagcaagaaaaagatgcatattatggtaaagcagattaatatggacttcatttgatggcactaactaacatatgttacaacttacaagtacataatcactttgaacttttctgtctttatcattgggatacacttttcaaaaaaaaacaaggaaattactcatttggtttggggcaaatgggattgagaggtcttaacttaatgtagaaaacataaattttaataaggtggaaaaagaccaagttgaaaataacaaataaataaaacttgttattattcaaaaaaataaataaaacttgttacagaatgaaaatgatatgagattacactgattaatctaaaaacaatatgaccaaaagaaatttagaagagttgaaatagagagtctaatgatacacacgaccaaacaaatatacaaaaaagaaaaatgcaaattacaaaactacttttggaaatatacttaagtgttttatacaaaatacttaaaataaaacatatatatttatagaataagtttaaaagaataattacaaatgactttcaaagtggctcatattcaagttagaataaccttaaaaagaagcatgacaagactaacaaaacaaagctttctttttctttatttgactgcaactttctcctttccattaaagaaaaaaccaagaagttgtaattcagaggaccctacccaaaagttcacattcccaaataatactcccaaatattctcaaatcaaatttcaaatcatcattcaaaaatgagaaaaaaagttttttttttcttagcatactacaaaacaaataccatgacatatagtgaccaataaacaaacactaaatatagtgtttcaaattcaatactctactcaaaattacacttgaaccacactcattcatacttctaccatactatacatcattctaaaacataacccattcaacttaaaattcaaaacaactatttgtagataagtcaacgttaatgtaagttaataaccataattttaattatttattacttactataaataaatgtatacaaaaaccttaaaaattaatcacattagagacataaacccaccacaaattatatccaataaacttaaaatcaagagatactgcttatgaaaaaaaaaaaaaaaacagaagaagtttgttggtattaacataagacaaaccccttaaagacccacattgaaattcaaagccataaatgcagaatgggatctagaaaatgggatttgatggtaacagaatgagagaaagagtaccttaacacaacatggatgaatcaaaaaccaactctgaacgaaaaagaagaagaagaagaagagtgttatgttgaaatgaagtgaattagaatggttaagatgagtaaataaatggggaaaaggaaagatattcaaattaaagccgttgagttgaggaggaagaggaggaagaggagcgtagtaggatatcatataggcctgtctgaggagagagaactttctcgagaaaatacaaaaagaaaagaaaatcagttcaaataagtggaccccacttcccacttccctctttctttgtctctaattaattttttaaaaaatccctcattttcttttttgtagttttccaaaattacatttcttattcattttttttgaaagagattttacttttctcattaaatatgtaatttttatttatttgacaataatttttgaatatataaactaaaaagaatattaaggaaagaaaataaggcgaccagaggccacagtttttcgctgtttgtttgttgcctagacgacaccgtagcaatgttcggatttgtgttcggttttaattttctaataattctttttttttaacaatttacggtataaatattaaatttaatttaaataaatatttaaatttaattttttacggtaataataatacttaaattataattttataatttctataggtatcttattaaataaataaattgtcacgtgacaattcttgtttggtccaaatcattaaatttttattatttaaaaaaattagttcaaatatactaaaaaaaaaaatgacctcgggatataatagtttaatatttagcggttaaattctataaagttccaaaaatataacttaagtattattagcgttaaaaattaaatttaagtatttatttgtaagtgagatttaaacttaagtatttatgccgcaaattattctattttttaaaataatattagaataaataagatttttatttgagtttaacttttttttttaaaaaaaaaaagataaagagattttatttgttttggtaattttattagacaaaaaatttggtaagtggtttagatttgattaaagtatttttaatggtagcattttttaaaatgtgctaaatattttcatatatcaaagatataatattttattttatctttattctatattatttttagcatttttacttttaaaaacactttaagagaatcttcaatggaggacaacactatagttattaaaagtacgcgcatcatcctaaaatatttttttttattttctctctcatccacataagatttgacaacttttcatacaaaaattactctaatggtacgtttactatacaatattcaagatcagaataaattaatggagaaatgtaacagaataaataaaaaataatcggaatcaatatttgtaatatgttgtttactaaatttttttataaattgaatagttgtgatttatcttgtttactttattgggaaacgtaatcggaatgtttaaattaactaaattgtccttttgaattaaactatattatatagtaattattttgtaagatatattttaaaggacaaaattgtcattatatatttaatattataaaaataaaataaaaataattaaaatttattacccttaatgacattccttacaaaattggtgggagaagttctcattttcttttctcccttaatcaagttatcccttttgtaattttaataatgtaagtaaacaaatgtaagggaatgattacattactattgattctcattacttattagtatacatgtcatttaatggttgagaactccaaaatttatcttataaactaatttgttttaaatatatatatatatatatataaagtaatgcaacatgagtgttaccaaatatagataatagtattgataaaaggaaaatttatacccccatacagtatttttcattttttttaccgttatacaataataattacttttaaactttattgttttttctctttatactgttgtatactttattttttaaagccaatttttatcttttttattgttacatgtgctatctcagggttcattcatatcttttatatatttttttagaatttataaagtgttgatttgatacttactgtcactacatctccagttccttccaaaagaaaattagttggtgaaactgtaaagaagaggatatccaaacgtcctcgccctattttagaaaattcgaactctgattttgagttggagctagagtttttacaggtgctcaaagttgataaggtaatttttagttatttttgtgttattttaggggttttatttcaattttttttcttacagatatctttgtttgtgatttttttttattttctatgtcattttttgttatattttgtttgaataaagtatcatttgtttaacagttatcttcttgttgttttttgttgttttgaatttgtcgtaggggaagggtaaatccccagtcaacaaggttgaatctgatgatgcgtttgaggatatcactggaaaaagggtttgttgaggtgtgtactttttttatttttgttttagtgtttattttatgcctgagtgtaggtacgggctcacctgattaggtaatgtaattatgtgatatgtgggtagcaggttatggcacgagcttacctgattaggtaatgcaatgcaggattatcggactaaagcatcgacttgcttgattaagcaatgtgatgtaacaaagatggttactatatgaggtaacatatatataatttatattattaaatgaatataatttctattattggtataatggtttgtattaacaaatatttgaatattgatgcttatttatggcagatgccagtaatgatttggatttcatcttatgaacaatgtgtgatagtttgattctgattgtgtataaatgataatattcgaatagtaaactaaatgattattatcattgcttttcttgctgagtccttgtgactcacgggtgctatgtggtgcaggtaagggcaaggaaaagttagagctgccatgaggtgactaccttctc

SEQ ID NO: 16349 - DNA, 5457 bp, Cannabis sativa
tgttgttccagtatttgtatctgtaaatctttcttaatacttagtttagtcttcttttatgtttctgctctagccagataaatgttgggcaggaatttgtttacttggggtaactagtcaagaatgcagttctgatcgtttcttggcatcatactcggattggtttcagaagcttctatcgcgcattcaggtatactgataaaaacctgccttgtgtatatgtctacttccaaaaatcatggagttgagagttttattatctttcgcaaaagttcaaatccagcagaatagtccaattttctattttgtggcatttgggatactactatggttaacgcattagcatctcatttgaatatgtcttaatgctttctttggaggttattaatattatttaaatcttgcacttaaaggatagatacttcgtgattccataatatcaaatttagtaatttctcgtggtgaagttgctttacattgcaaaaagttttaaaagttcatttgttaagcatatagtttaatttcttacttaaatttatgaatatatttcattcacgtttattttcttacgatgtagctgagcataacctgctttgttttatgtaataaaccagttttcagcagcatctcattttgtgaaggtggcatcgtgtgcctcattatcagatttactcataaggtacacttgtttcacgtctctctaattatgatgaaatttatatgaattaaagatgtgtgcaaaggattaattataacttccattactttatttcatgtatatccctttctttcttacacacgaacaagtgaccatggtaaacagagatgtgcagaaccacaccactctatctcatcataagaatctctattgtataaatttgtataattgacaaataatctccacatatacgtttcatttcaatgtcatcactcatcaatatttaagcatcataataaaaattattgctaatatcatagtacatcgaatacatgatcaccattcattttaagtccctgtttgtctttttgtttacttccaaatgttaaatgacttttgacatttcactgatccatggcatctgcatgatgtaaaaagtctgttattgcacaacttggtcttgcaaaacttatgcttgttctgttacacttgacctgtgcatatattagtaccattactgctttcaagactgttgaagcctttgctgattttaggttgggaggattttcaaatgtgaagaaagatgggacagcccatgctgggaaacttattcaaccagttctgaagttgttaagtgatgataattcagaggcaatttgggtaagttgctgaagttcacaatcattcgctatgctattgaactatcatgtgtcaattattgaaaattgattattttcaggctttcagcaacatttatattgaatcgttctgctgaaccctactttttttaaaggagggaaacttaaagactataataggtagatacccctgggttgttccgatgcaaaagagtgtcttatttggctttaccaaatttagaagtactgtctcatgcacaagcccattacttgcatatacaaagctaggctcctctgtgcatttcatgttattggatacataggagggatgctgttttttttggggggtcttaacattggtcttttttttggttatctacctctcatgtgcaggatggagcagttcatttgctatgcaccattataactttctttccattttccattggtcgccattatgaaagcgtaagtactaatactagtattacaaaattttagcatcattgtaacctaaccttatgattccacataaactgtgctaaaatgttattggcatatggaaaagcaaagtatattataaatttttaactgtgttctacatggaacctttgcttgcaggttgaagctgctattgcttcaaaaattttatcgggtacctgcagttttgatatgctcaaggtaatgattttttgtttatttatcaagctgtgtcttcaacaaaatcacaacatgcatattaacttatcttgggttcaactttcagaaatttgccaattgtttagcattgcttccaaaatcaagaggagacgaggacagttggtctttaatgatgcagaaaatactgatatggataaataatcacctgaatgacacctttcaaggttttgaagaaggtgtgtcttcacagtacctatttattcttgtgctgatctgaggactataaatgaccctttcttcttttctttctttcagaaactaggcattatagtgaagccatgagattattgttaccaccaggaaaggatgttcctcctccatttggagggcttactgtgttaggagaacaacagcacaacatgcagaagaggtccgagcatgtactaacatccagtgtctctgcattgatgattttctgctctaccatgctcacaagttcataccctgctcaggtgctcttcaattttgtagctgttttgagaagttttccgtagagttcacagtgtctcttttctcctgctgtattaaatagagtgctggtgctcttcaattttgtagctatcttggaggggctttctttaaaattgagctgattgtctctgtgtgcttctattgtgtatttgtcttgttaatggctttctatacaacgggagtaatattgcataaaagtttagtaaatatgagttattcaataatatgatgtttgaattaataataggtcactgtgcctgttcgatctttgctggctcttgttgaaagagtgctcatggtggacgcgtccctgccacatagccagcggccttttgtcactgctctgcaacaagaattcctttcttcagaacttcctgttttacacctctatagtctggaacttcttgctgcaatcataaagggggtgcggaggtaagtttgaattgtattaatcttaatttcttatcctgttaagagcctgactggaggtttttgattcattttagtatggggagacctatccattggggtttggtatagaagtccttctcgtgggttgctcccatgagattttggggtgtaattcattatgggtacgtatttaggaattttctagagtttcctaccttccaagattgcagggtttagcattcagactagtgtaaagtatatttctatgtgtaatgtatatataagggaggaaaaaaatgtttaaggtattctcttttcatttgggtggtttgttcttacaaggtctaagtctaatgtttaagaggcacctatatagcaattactatcatttcatagtttgaaatattgttgggtttggcagcaggggtctttttttccttttctgtttacaaaaaaaagagaagaattggagtgaacacatgatgtaattgataggtcccttattttttcttatggtttatcagcaacaaaaataaaaataaatcataataagcagagaattctttcttgtacttgttatccactaattggtgattttgcttactttgatttatttgaatcagatactagggtaccacctgaataatataaaatataatcttaattttatcagatctatgaatgttgatgctgctcttataggatatcattttccagcatgtttatttcaagagatttcccttgtattattttagttttttgttgtctttttataaatggatgcataacttttgtttatttaaatgcttttttcttttcttttctttttaatgtttaatacagccaactattacctcatgctgcatccatagtgcgcctcatttcagtttacttttcaaagtgtgcccttccagagttgagggcaaagatctactcaattacgaagatactattgttatccatgggtgttggtatgaagtagttccttcacatattttccatctagttttagttaattgctgtcagtttctaacagcttggtccagttgttgagaagtggtataatttgatacacgttaataatttcttaattgtgtgaaagatgaagtctttttctctatcaccccgtaaatatacttgggttatttaattctctttctaggctgatatacgatatatattttatggaagttgtatgtgtatatagttatctagatattttatgtgaagtatcacacataaaaaaaagattttgagtagacacattagttgcagcttgccagttgcaagttgacatcaaacactgaaaatgctatgcctaatggcttgaacaaacaattgtacttctaaattgaagacaaaccaatctcttaacttttattattataaagttatcaacaattcaaaggtttcagtgtgagagagagggaggtagggagagaagagatgatactttattaagattgattgagggatggagagagtaagtagattttccttctaggattgattaaagggaatagtaagatggagaagaaatagatagtaaaaaagaggagttcatgttaataacgactgaattgaatcaatcaataaatatgttaaagagggactttgttcatttcatttatcttcgtctgcaaaacaatgaatgtaatcaggccttccatttctcatgctcttaattgtttgttgtaaagttcaatgttgttattatttgaagttggaaaacagagcagtcttcaataagtttttgtttgttagtttctatattattttgatacatatcagttaaaacaaagttgacagtgaaaatgccttatccaatattaatatcagttaaaacaaagttgacaatgaaaattatacttcccttaaaatgtctgaagaaaacaagaagcgtgctttttgatagtttcttgaatttgcataaatgtgattttcttgatctgcagatgttatcagcatcttgtcccgtattaatattatgagaatcaatttatggtactttgcaattgcttatgcattcctattacttgcttacttttggttgtgcatggtgtcttcacatatcacatgttatcatttttgtcttgaactttcagtatctcaccactagaaatcatatttgaaggtttcattaattctgtcaattctgtatcaggaatgggactttgtcttgaacaggacgttctcaagaatgcatttcttgatttgagtcccatttatgagaatggtggaatgtcgtcaattaactcaaagccttctactgaaacattaccacggccaagtcataaaaaaagaaaacatggttccacaactggatctcttgaagaggggcatgacggtaatttagaagtggagtctcagaagaaccattccacagctctgatttctttgaggatagctgcacttgaggcattagaagctcttcttactgtggtatatgtagtactcataagaagttatatatttggtcattgcatctaatgttgccttagaattaaatttactcttacttcaagagtgatctctttgaagtttatacttgtgtgtgtttgc

SEQ ID NO: 16350 - DNA, 4322 bp, Cannabis sativa
ttactaaaattggaaaaaagtcctcaaatccaacaatctaaatagttcaggagacattttcaacaatcttaaaagttaagagagcatgatttggtacatatcaaagttcagggggcaaaaatcctaattaacttaaaaataaatagcctagaccctaatttaaacagaaaaatatatatggtaacacccattagagttgctctaaccaccaggggagcagggagttgctattctgtcaaaaccaaacgaatttgcaataactgagaaaagtgcctagtacaacttttgcactacaccattattatgtagagattgaatttgacagataaaaacttatttgtatgtaaatatcaaagtactataagagcaaacatagccggacacacgaatcatacaaaaagatcacataatttagcatgaaactctgttgaacattactgatcttcttgcagattactctacacaaagtaagctgtggactttgctaatttgatctcatattgaaatatcctgtccaaagagttgagctattccctttccagggtcatcttgtttcacaattgattctccaaccaaaacctgcaaaatcagttataaaaatgcttgcattgatctaaattaagcatttgttcaaatatttgtctatctatctctatacaactataactactttttttgctgcaaaaaaagaaagtacagttttcagtgaagctgaatgcagtcggcatcttgaagtgtgatttttcaatcttaccgctttaacaccggctgcttgcacataagcaatatcttcaggagtaaacagtccagactctccaactacctgaaaatattgaaaggaaaagactttaacatcactaatcactaaagaccaaatctccatccaaccacataatataagttgcataagaaattgtgtctgctctgagtatgtaatgaagatggtcgacaagccccttacaataatgtctctttcacggatcaattcgccacgctttccttcaagaagccgctttgtgacacttgtatcaacctcaaaagtttctgtgatataaatatacaaaagaaaagaaatctcattgcatagaaagactatacaataatacaaacccttcaaatttatataatgttgaactctgttgacctttccactaagaggaaataattgataatatagtcaacccaaaccttcattcaaagtgtctactatctatgaaaacttaaataaagtatgtgaccaaagcaaacattgaaatttgttcttatcctgtgaaacaaatacaagaatacgagaaatagtaaccctctaattgccacattaccaagattgcggttgttgatgccaataagctcaataccctctatcccaagaacacgatccatctccctttcatcatgcacctgaaagattatcaagttaattcaaatgacaagctcaatataaaatagggtgacaacaaacagagaagaatactgagaacacccaaagaagtcttgtttcaaaattgaaaaacctgatgtttgaaacatatgacatggccacaaatcaggacttaaaataaaaatgaacactaacaatgctctaaacatcttcgaatcattgtttaaatcaaaacttaattggatgaccttttatctacactgacattaaacagcagcaaaataaaaatccacacttatcaatgaagagtttcaaatcgattatggcaagagctattttgataattacctcaactagagttgctaaaccaagcatcttgcagatcttaaccatgtatttgatgtcaagatcgggcaaaacagcagcaatcaaaagaatggcatctgcacctttacttctagcatagtagatctgccatgcttcaatgatgaattctttgcacaatagagggcactgcataatttgtgaattttagacatatcagttatgccaattaaccactatcatgctttcaacaatgaagattacgaaagaagatgcgtgcagaacaaaccttcactcctgcatttcttattgcctctatattttcgtaacttccctgtagaggaagcaagtccagtgaagtgaattcattggcttcaatgctaaagaagtcttcaatgtgattgcagaaagaaaattgaaactgattgttacctgaaaatacttccgatctgccaaaacactaagacaagctgcaccacctttctcataagcttgagcaatttcaacctgcaaaattgtttttagtaatagtgacaaatccaatatcaaagaaagagaatagagaaaaaaggcctcataatgttaggacagttacaagttcttgcaacattgaatacgggatcaaaacagaaacaaatccttcatagcaagaatcaagaataatttataaatcacatcagtctccaacttcttacacatgctatttttctttctgcatacaagattttcaattatccaagcatttttcaggcaaaacagctcgcaaacaataaaaacttatgatcttcagtaatatctatttcatccattaggatatgttagaatattagttgtaaaatattaggctaaattgatttagtagtttctcttttatattcagtaatttcccattcaatctcctagctttgtatataagtatatactattctatggaatacaacacacaattctcttcaccattctctacatggtattagagccttgtgatccgttgtgagctcaaactcaaagtgtcgccggtctaaaagacgagccaaactataaacttcccctttaacctccctccatttgggaccttcggccaatgtgtgcccattttcagtgttggggtcttcgacctgtttcaaaattcacaaattttccgacgtgtacacttacaaatttctcgatatttgcgcttgtgagattctttcaaatgttacattcggtcctgtggtctcttaaaagtcgttcgttatacatgaggagggtgtattagaattaatctcccattactaatgtgtgaaaataaattatcatatataacatgaatggactactcctctcattgccaattggttttgagataaaacctcattcatcttattccaaattctaacaagatacaatacacaaccattcaagagcttgtaaaagataaaatatgttgaagaactgaataatgtaacatgatacaatgatagaaaggcaactaataacaggctaaaaaggaggcagacttactggatcaaaattctcttttatgactcctctgcttggggaagcctttttcacttcagctatcaaacctggcagaccagttcgtgaataggcctccttgagagctcctacaaagtctctaggaggagcaacattgtccaaggctttcttcagtgacccaagaggtttcctctcttttaactggaaacccaacacatattatttttatatatacttcaaaaacatattatctttaaaacgaaaagaacttaaaagaaaagcatatcatttgtgaatcaagtcagcaaaatcacttgagcaacttcaacatctttgttccaaatgatttcctccaaaatattccgaggtgtgtttccctcattctgcaaacgaaactcaaagggccccacgtagtgcaaagggggtccagttgggggtcttcttctgattcttatgccctggcttttagctacttcatcacggaacatacccacttcccattccgttatcttcacaggatctggttcaggttcagattcactcacaggagtaacagtggctgaaccatctttagagtccatctgtaagaacgacaagcacccaattgataaaaatgagcatcataatatagattgcactaaaaattcaatttcgggataatgtaaagaaacatatttgatgaggtcatgcacagaatgatgaaacatcaaatgggtaatcttcatattacacaacaaagcattgggtcattcaatgaatcataaaactccaaatgggtaatcttcaaaactggagaaagattgctcaactcaaagcattagagagtgaaaaaaaaaagggttaaaaatcaaacctcttgggctcgaatggaaaaggacgaagatgaagaggagattgaggaggagccaaacgagaacgagttgcctcctcttcgaaggtccaaggaggaagatgaagtcgacctcaagcatgaaaatttgggcatgcgagagacgggtggcaccgccttaaatgaaaccaatccctccattgttaacacttaaaaagaaaaaaaacagaccaaagctctggctctggctagctctgtggtgtggcgaactgaattgctttgaagttctatggtgtctaaatatcttat

SEQ ID NO: 16351 - DNA, 4423 bp, Cannabis sativa
  modified_base (27)..(30): a, c, t, g, unknown or other
actaatcagattgtaaagagttttatnnnnggcataaaacccaacagtaccatctagagtgatttattacttatgaacaactgatttgaagagggagcttgggtatccagacatggtatgttacaccgtccaaccagcatctactttgcatttagctcacatgcaccagccagaggagaagcggttggaaaatcttcagagataccttcactaaatttctaagcatacaaatcccgatcacgtccttgattttgttggatagactcacactgatagaagagaagatgaaacctacatagtttctctttttatttctcttgatttaggaaagtaattgagtttccctatttatttaatttttttttttggaaaccaaattgatgtaattattttctataaatagttgagccatttcactattaaagcatccaaaatcattcattcaaaagagcatttaagctgctaaaaccattgtcagagtttttgaagaagatcaagaacctcttgcttcttttcccttaagtcaatataagtaaaaatggagtaggttattactacgatcacgggatcgaacttctatactaatctatgtgttctctttgcttagtcattattactaatcatttctaatcgctttaattgactcattgtcgttggctaaaagcaaggtcaacactaccttacccccttggtcaagtagacaattcaacctcttcctctatctccactcaccctacaccctctaaaactgtcaataacaattccatggttatcaggtaaaaggctggagtgttcaaaccaaagaatttcctcttataagtaacactaagttagaacaaaccactgtaaaaaaattctcttgctcacaattactggaaacaagtaatgcaacaagagttcaatgtcttacagagaatttacacttgaattttggttccccctaatcaatatgtgaaaattatcatgaacaaactgaattttttgagttaaatatcatgcacatggcactcttaagatgtgtaaaaatttgttagtcaaaaggtgtttccaacaaacacctagcctgtacttctttgaaactttcagtccttttctcaagcctcgcacaattagaatcattttctctcttccaactacaaaatgatgggatatttaacaagtggatgtcattaatcttaaatggacaactaaaagaaaatgttttcatgtagcaaccaaaggttttatggatcttaactttttagatcatgtgtgcaagttttataaggctctctatggcctaatgagatttaacaagctcaagtcatctctaattcaatgggggtttactaatttgaaaattttcccaagcttgtttttcacaagtactaacgggaaagggatgataaatctaaacctcgcacaaccttacaatatacatatcgacttcgaaagatctaataattgagaaataatacttgaaattaaatacatacattcaattcatacataaatatacgcaatgtgtcattgtttataaccacaaaattttgaatataagtctcacaattggtgatatgtgaacacacaaggacaattctagttggggagctcaaaaggaattgctgcaggcctcttgagttgagttttgatcctgaacaatttttcttaatttcttcttttcaaactagaaaaagttgatgtaaatgtctctatttagttacattttgttcagtttttttttttaaataattttcttatgtgacttacaatcacatattgcagtatgagaatttatttaacgtaattaagctagttgaaattcaatttatattgacactaattaaatatacaaacattgtacataaaaatctaaatatatattctcaaaatttgttattagacttctatttatacatgttttgttacatctgtactcttgaattacatgagattatagtcatgttaatgctacatatttacatgttattttaaaaaaatgaacaaaatgtaatccaactaagatattaataataatttgttatatgatttaaatgaaatttttttactaaaaaaaaaaactaagtttatgagagaaaaatttacaagaatcatggttcaaaaatcatatttatttatgtaaattttgatactctcgtaaaatgattattcaattaagctacttcttcttttgattttttttttcttttctcagcaagctatttttttatttatttttaaatatctcagcaagctattgattaataaagttagctatgttttgttatttcattgatttaatttttttttagagaacacgtatttttgttcggtggaagaaataaatgtttcagctcaccaacacgataatatccttttgtttggtagtcggtagatgtaataaataatctttctaaaaaaaacaaataataaattcacgcaaaaaaaaaataataataaataaataataagctggccaatatcaatatcaatatcaatcaatatatttatataaaacagagttaaaaagtgatgatgtgacattttatatttttttcctagtatttttatcattttgtgagagttttaagttttgtctaataaaaaaaaatttactaactttgtaaaaaatcccacattgtttagaagtagtgtagttttctatatccaaactataaacaagctatattttgccatttttattagtccaatcattattatttgatatagtgtagaaagtattatagcaaataaatatttttttagtatgttatttttttttttttgactaattaataaaattagtcttatccaattagttacatatttttaattttgttttaatattatgtatttttattatttatatatttcttagtcatacaataattttaatttaatgtcacataatttaaagttaaatattaaatttaaatggtgtctttaattttcaaacaaaatttttttttaaaaaaaaaaaaacaaaaaacataacacaatatatatataatcaatatatttatgtaaaagagagtttaaaagtgatgatgtggcatctcatatatttttttcatagtatttttaccattttgtgagagcttcaagttttgtctaataaaaaaaaatatacaaactttgtaaaaaatttcacattatttagaaagtagtgtggttttcaatatcaatatatttatataaagaagaatttaaaagtgatgatgtggtatctcatattttttctatagtatttttactattttgtgagagcttcaagttttgtctaatgaaaaaaaaaatctattaattttgtaaaaaatctcacattgtttagaagtagtgtggttttctatatctaaattataaataagctatactttgccacattcaatagtcaaattattattatttgttgtagtatagaaagtattatagaaataatattttcttagtgtgttatttttttgactatttaataaaattagtcttatctaattagcaatatatttttagttttatttttatattatatatttttattatttatatagtttttagtcatatgataattttattttaatgtcacatagttaaatatttaattcaaatggtgtctttaattttcaaacaaaatatttttttctttaaaaaaaaaacaaacgaaaaaaataacacaatatatttatataaaagagtttaaaagtgatgatgtggcatcttatatttcttttcatagtatttttaccatttttgtgagagcttcaagttttgttgaatgaaaaaaaatctactaattttgtaaaaaatttcacattatttagaaagtagtgtggttttcaatatcaatatatttatataaaggagaattcaaaagtgatgatgtggtatcccatatttttttccatattaattttaccattttgtgagagattcaagttttgtctaatgaaaaaaaatctactaattttgtaaaaaatcccacattgtttagaagtggtgtggttttctatatccaaattataaataagctatactttgccaccttcaagtgtccaattattattatttgttatagtataaaaagtattattgcaaataaatattttctttgtatgttattttttttgattaattaataaaattagtcttatctaattagctatatatttttagttttgttttaatattatatatttttattatttatatggtttttagtcatatgataattttatattaatgtcacatagttaaatatttaattcaaatggtgtctttaattttcaaacaaaatattttttttttaaaagaaaataaacaaaaaatataacacactatatataattaatatattattagggatatgattttgtcctgtgatgtactttcacggaatgtattccgtgatacattagatgggtctcagggtacattaaatgagtgtcag

SEQ ID NO: 16352 - DNA, 2962 bp, Cannabis sativa
tatatatatatatattaagcaaaatgtaactaattttgattgatggtattctttttttttttgtttttcttctcttttttaaaattgagctaaaaaaaatcaaaagctttttgagagtaaatagattggtccccaaaatatttgtctatcaattacacaaaatatttacatcaaataataatggcttttggttggatgctactacgtacgtacaaggaccaaatctggtttatgacattaatctctgcatgtcatttctctgcaaacaaaaacaaatgaaaataaacacatttaaataaataatggacattcattgtcttcaactagccaaattcagtttttcctatctatttttacctctttcaaaccttgtttttcgagcagcttgccgtatttgattctcattcttatgtaaatgatcatccattctatgtggttgcatcagtagaggccccgaaaactcgatatggtctcccccatgattgtaatcctatacatggattcaacatacaggttcatattcaaaccagaaagactaagcacaataactacaattgagtttgtttttcttactcaccacatgatttgctgaagcaatcttttggtaaacatgatcttgggagtgatataaatcaggtgtatcgaaaaactctgtttgatggcttagactccgctgctgctgctgctgctgctgctttcgaacacccttgggatttactattcgcgcaaagtcttgagtcccttgctttggtaacacataggtggattttgcgaatgaggggtctaatgcactgaattggctctttgaaccgtctgatactgctgatgtgacatcgtcttttcgccttgttcctgctgcagcccatgcaaagccacttgatgctgagactggaactggccctgagaaagtagtgtccccaccgctttggttagtacccgaatcatggtactggtaattctctgatactgtatcgaatgatggtttgaacaactctctacgcagatgacctcctttttctttaacaactggcccatcatcattatttctgcgcccagtttgagcgttttcttgggtctcctgctcataaaaaacaaatcaaacagtttaaggccaattatacattagcttaaagctgattagtttatacaattgtgtgtaatagagacctcttttggtgcaaatttattgactccattctgttgttgataggctttacgagctctccttggtttccttgttgctcctgactgtctaactccgggctttcttctggcaattgaaaaacaaaagttactttttttcgttcgaattgtcctatttcttatgccagagaatctcatgacactaaaatggttttaaagaaagaattaccttaggacatcctcgcgatttttagcatcaatttccttgttaggtggatattttggcagggttgatggatcacaggcgtacggttgtgttctgaagtactgtgaataggaaagacgaagcatattagttgagacaatagaggaagatgacataataatgagcttgagctattaaagtatgctctccatattagagatacctgagaaataagtgcagaagaggcagtcccgcgatcttgaggatcaaccgaaagaaaggtttcaatcaagtccacagcagtagatgggaattctttacatctctctcttaaggatctgtcataaggatgttgaggtttgaacatggtcgcgtgtggaagcttagattttttccagtattcttcagggggagaaccgcagagtttgaaaattttatgcaattgttcaacctgtaatttgtgacccccacaaaaatgacaaacttgaaattccatacacatctatgaaaagcatcaaaatacataacaatttgagtacctcagttcttcctttaagaataggtctccttagaaaaagctctgcaaatacacaaccaacactccagagatccacagatactccataactcgtcgaccccatcaagagttcgggagggcgataccataaggtaacaacccggctggttagtgagtgtttgttctttgcattgacaatgtttgccaaaccaaaatctcctagttttaaaatcccttcattgttcaccaaaatattggacaccttaatatctctatgcattatacctcttaaatggcaatgctcaattgcagataatagctgcctcatataacattttacctatacaaatgcagatctctccatcacatcacagatttaaaagaaaatgaataattaacaatttcacccctgaactttttacactacaaagttgtgtcccctttcgtcacactctactcaattttatcataaaatgagtgatcataaaataaaatgtcgattctttagttctttgggagcccttattcttcgacttagcaatgcttttattccccattatcaacttcagcacctctaagccaaaccaccacctcactcactctgaccatattacagaaggagcacaattcggtagtgtaaaaagttcaagaggcaaaaatatgaataattcaaagaaaaataacaaagtagataactaaagaagacaaacaaaaaaactaacctgagcttcagagaatttaatctcaggagaagagactagaccagcaagatcatgttccatgtattcaaacacaaggtatatgctagttgatgatccagaagtaatgagaccctccaatttcatgatgtttggatggtcaagtcttcttaagattaatatttctcttgccataaacctaatgctttctggttgaaaattgtcaaaccggactttctttagtgcaaccattttcccagattctacttctcgagctctgaacacactactgtatgtaccttgtccaatctacattgcattcccagatgaataatacaattaaattattcattacaaatctataatgaatttcaacaattcacaagttacccaacaaaa

SEQ ID NO: 16353 - DNA, 5950 bp, Cannabis sativa
taatttaaaagttaaattaaaaatacataaaaataaataaatcacgtttttataagagtagcatccaaagttgccatacactattaaatttaaatgagactattcaaatattttctcagtgcaattttttttatctatttattatctattttttctttgacaaaatatattattcaattttatataatcataacttttcatttttgttattattgcatatgttattttattgttcactaatataatatatgtaataaaatcgtcaatatatattaagaaagaaaaattaaaaacttcccaccacaataattaaaaactttaaattattataatataaaaattgttccatattaataaaaaaaatattaaaaacatgtaaattgttgtttagaaaaaattaaattattaaattaattaaaaaacttaaattaaaaataaaaaaaattatgtctttataaatgattgaacttatgagattatagttgatgtaagagaagtttacaacttacatcataattatattgttggttgtatttgtattgattattttaaaattaaataacttgaatattttgtacttttttagctataattattgtcgagtagaaaataaaataatatataaatttaaaattaaaaaataataaattaaacttataaaaaattataatataaataaataagaaaaaatatatgtttggagttagctttggagtattgttagttggatctaattattaatatttaaaattaattttaaataaaaaattattaattatgatgtaatttttaagagttaatttatgtcatttgattaaattgactataaattattatacctatcaataggtaaaaaatataataccttttatgttagcttccaaacaatatggtatttgaaaacttaattacaataatatggcatagaaaaatgcatacaaatgtaaaaagaacaaaaaaaaaaaaaatctaaaaccctaatacattaaaaaattatgccatgaaaaagttaaatcttaaatttttcccaatgtaatttctacaaattggtaaaagaagatttgttttggagaatggaaatgttcttctaatggttatttctgctgtgttagtaaatatgactttccttttgtagcattgattgtactgattttttctttcttaatttatttatatgtatatatattaaaactttgatgaccaaaacagtaaaagtagcataataattcagatcctaaagtgtaaaatactctaaaattatgtataggacccataaaagggcatgtaactattttgggaagcaagttatcaataatgaaataaatatatataaactattttgggaagcatcccttcaaaaattgagaaaacataacttaattaaataaatgtaaaaaaaaaagaaaatgcagattacagagaaggaattatagcctggacttacatataaattcatgtataaatatataatttctactcaccccactaccttacacacgatctataggttaagaactcaaatcaaattacatgtgaaataattatttatacctaccatttaattaaagatagaacaaaagaacatcccttgcatttgaaggtagttaaataatcaataatttatttatttattcattaaaaaaattaattatttatttgcttattaaaaaatacaataattgatgctagaataagtaatcgagatgcaaacaaaatttaaaattaattaaaaactgacaaaacaaaataataactatatatatataaaaaataataataatgatgtgttttataatttaattttaattaaaatttaccaagtaaaccaaagatataaaataaaagagagagacaactgtgttttcctgcagcctaagccttattatgactcattctttcattagggcacaccacaaaagtcaggtaattttcccgggaaaattaactgtagcacctttactagatttcccgggaaaattgacagcatctggttcggttcttctctcttttcatctaatctaaatcttcttcatcacatcacaatctcacatctctcattctctctctccctcgatctattttgctgttcctccatggaggaacctactactgtagcaccgcttagcaaccaatcgcctatcagaagccttaattcttcctcttcgcagattaatcttccttccaccatgactcggacctctcttgctctcgaaaccctaactccatctcgccaaatcgaccgtatgattaactcgaaccattcccaatcaccgtctcgaactatttattctgataggtttatacccagtagatctggttcgaactttgctctatttgatatctcaccgtcggctaattctccgtccgagggccgggaggaccaatctagcgcatatactactcttctgcggacagcgctttttgggccagattcaggaggagtagtggctcctgctacaccggagaagcggagcttgctgatgagcccgcctagccggaatatattccgatataagaccgagactcgccaatcaatgcattcgctctcaccgtttgggttcgatgatgcggttcctggagttaatcatagccctgttaagactcctaggaaggttcccaggtcaccatataaggtgaatgggtgaatatttgggcttttgtttttctgatttgatcagaagtgatgtgctttttagatatatttggggttttacggaatgtttttgtggtttgggtaggtactggatgcccctgcattgcaagacgacttttatctgaatcttgtggattggtctccgaacaatgtgttagctgttggattgggtaactgtgtttacttatggaatgcctgcagtagcaaggtgggttctgttgttataatgctcatcttcttatttgaattataaaaaatgcttggtttggtcttcttttggtctgctttattcattatcacatttgttttacaggtaactaagttatgtgatttggggatggatgacagtgtctgctcagtgggctgggctcagcgtggaacgcatcttgctgtcggtactagcaagggaaaagtccaggtttgagatctttcttattcaacagatcgttatataattgttggaaattatcgatgtgggagtttcaacctgtcaacagagaagagttcgtgaatccaaccagcaacaagattatagaactagtatgtagaatgactatccagttagaacaatgataggaaactatgattttataaatttaagtttgaatagctgataatgaaaactatgtgaagagttgcattgggtttttctagaggatgaaacagtgaatcatactaacgataattcacatcttatcactgtgctcatccgaacaagaagaaattctaaaatcagtacttgattctaaattaggcttggcccagtcctgagttaatcttgatatgtttatgagcttatgcttctattagtttttcgacatttgtataattagattatttgatgtcttgtaaactttcccggatgcatttgtcatcttctatatagatttgggatgcatctcgctgtaggaaggttagaaatatggagggccatagattgcgggttggggccttggcctggagttcaactatgctgtcttctggtagccgagacaagagtattcttctccgagatatacgtgcgcaagaagattttgttagtaaactttctggacacaaatcagaggtcagactcctcatcttcagcttgattaaacttccatgtttaaccataaatctttatttttgcctttaacttgtctagtcttcatgttatattataaattgtatgtactatctttactgttgataacccagcttgatggcgaattatttgtctttcaggtttgtggattaaagtggtcatatgataaccgcgagttagcatcaggcggaaatgataatcgggtatgtgattctattcatttaaaaaaaatgtgtgcttttctttttctgtggatacaataactttgttaattatatttaatttttgactcatatcttattgatcattgatgtacagctatttgtctggaatcaacattcaactcaaccagtgttgaaatactgtgagcatacagccgccgtgaaagctattgcatggtctccccatcttcatggccttctggcatcaggtggaggaactgcagacagatgtattcgattttggaacaccaccactaactcacacttgagttgcatggacaccggaagtcaggttacttattgactttggctatactcaagcctcttttgatttatttggaaacttgtatggactattaaagcaagttattgttgatagtcaatattggaagtaaaatttacttgatatgcattttgtgagtaccatggattcctttgttaagtagcccatggtggtccagtatctgacatctggtactcttttttttttttttaaaaaataaattataataattcgtccatgtctgaaaaacctatgtgattcataatcatatcttcgatactgttagatcaagtgtgaaacttgccttaaaatatccttgaacttaacatttgcaggtgtgcaatcttgtgtggtctaaaaatgtgaatgagcttgtcagcacccatggatactcacagaaccaaattatagtttggagatatccaaccatgtcgaaggtatgaaagtctgtaactacattttcatataacaaacctcattcggtgctactagtttctaatttttactctgttctggatatgcagttggccactctaactggccattcatacagagttttgtatcttgccatttcacccgatggacaggtttgtgctttcagtttaaattttcaaattttcgtagcttttcaaactctagccaagcatgcctgtttatctcttaactatttctgcgtgtacttcttcagacaattgtcacaggagcaggggatgaaacacttagattttggaacgtattcccttctcctaaatcccaggtaaataatgcttgagaagatgaagagaactgaaataaattctactcttaattgcatctatagctttatatttctcaagtacattgttgattgttcttgagacctgttttctccattcttgactcccttggtcaacattcaagaaaaaagtagtcctgtcataaggtggcgtttggttggtaggaatgaaaacataggaataggaatgagaataagaaaaagaatgaaatggaataaaatttgaaatgcataaaaaaattgataaaaaaattattaaattttttcttattatgcattagaatggtttttcattccctttcaaaatggaatagtcattggtggaagggccattccattggaatgacattccaatactttaatatacaaacaaagaaatagaatgaaatgaaaattgtttccattttatttcattacctccaatcaaacgccaccttagtgttgtgctaaatatttgaactgcataatgtttgtagctctctactaattgactctaccatagaatggaaaaatttaactagtgaacaattttttatctgcagaacacagaaagtgaaatcggagcatcatctcttgggagaactgttattcggtaactgccagaatttggcattttgtctgggcaaccttataaagttttttgagccttcacgggatggcaaatagattatttcacgcacctaaaattgatcagggtcctgaagctccttcaaattgttgtgcctaaaacataattatgctttgaccatggattctgctgggacctgaaaggctataggagttaaagtgaaacttgctttgttccacttgaattagatgattcttactaagttttctcaatagagttatgtatagagggaggtggttaataattacttataccttctccattcccttgtatatttcaaagagagaaatactgcaaattttttgg

SEQ ID NO: 16354 - DNA, 6207 bp, Cannabis sativa
gaaaaatcaccggaaaaatcatcaagaaaccagtttcttggtaattttttcggcgattatgccaattctgatgacttttctgaacttttttgtcagtgctagaaaagtcttcggagtagctgctagcgtcagaaaagtcatcagaattggcattgtcaacgggaaaatcaccaagaaagtagtttcttcatcaagaaaccggtttcttgaagaagaaatcggtttcttagtgattttttcaatgatttttcctgcgataatgccaatttcgacgaattttctggcgccggcaacaactctgatgacttttccagcaccgactgctactccgacaacttttccggcaccgaccgctactccaacgacttttccgacaccaacagcaaactccgttgacttttccggcatcagtgacaaataaaacttcctaaacaaataaaaacattaaatatgggatttgaaaacctaattacatatatatggcatattaaatactataaaaagacctaaaaacaaaaaaataccatataaattagtcaaacttaaatgtgtcatatttatcataagaacctttaaaatcccatagtaaaactctcattttgatattatatagactgaggttgttctatccgctataaagaaaataataataataaattagtcatgataaaataaatattgagttttacttaaatatttttcatataaacttatttttgatgtagtgtaaaaaaaatgtattttttcatattttctttaattaagtagctaatttaagcatagaaatttaaatttctcttttattattcgccatctatcaaaatctaataactatatatttttaaaattaatatttatagttaaatttatttaattacagtcagttaatacccattgaaaagtgttcagccctttgaaacaattactcttgaatacaacctggtgggtctaaaagcaataagctttgacaaaggttgttgttatgttggccaagactttgtacttgtagcccagacacaccaccgtggggtcattcacaagcgtttgcttcctttgagatttgttaatagccatggagaaggtaaatatcttctacttactattcacctttacttcttgggttgtatataacagtctcaactttattctttctttggtccttcaagaattggagcagaagatctctcctggataggaagttgttgattcccaatcgagaaagaaaattggtgctataacgaccatggttggatgtcgagggatggacgtgtcttgcggctggaggaggccttgaaaggatcaagtgcattgaccagattggtaggccagattggtggcctgctgaatggtttaaaattatcaacagggcagggcagtatatgaacatttcttagataaaagccaaaataatgctcatagaaagacgtatgaattttgtcttttagatcaaattttgtttatttcactgcgtaccaaagctttgttgtacatatcttgtttctggtcaatgtagttatcattgtttaagaaagaaaaatatgagaaaagaatgtaaagaaaaataaagcttagttgaaaagaacaaactttcaagctgcaatacatgaacgtgtaactgtcatcaattaatgttagttgaagtttacaagcttggtagctaagctactcttattgatgttgagactgtaatcaataactacatatttttcttaatagtaaaagttaagagcagcatagtatatatgtaattaattaacaataggttaaaggtgaaaaaaattattacaattataaaaaagggaagcctcgttctctaagatactcctctttccatatccaatttacatgaatgagggaacattttatcttgtttcttgttaagcctcaagtcatcaaaaactgaagctaatcttgctgagctcttctacaacctcatcaacattcggtctttcctcaggaagttcatgagtacaagctagtccaagttctcccagcttagcagcctcagattcagagaactctcctttcagattggcatcaacgaaatcttcaaatatcaaagattttgctcctgctcgaattgagcttgtgagcatacactgcccagatacaacttgcaggacaatgactccaaaggcgtatatgtcgcttttctgagtgaatcggccggtgtttatgtactctggtgcaagatatcccatggcagcgcttgtcttaagagctgagaagacaatgtcatcagcaagaagcttaggaagcccggaatctgatatcaacgggttgaattggtgatcaatgagaactttctctgtagatatattttggtggaccatggcaggtctgtttgcttcattgctgtgtaagtactgaatacctggtttaggaaaaaaaccagtcagctgcactgaaagaaagcatggatacggtgtaactcaactaaataaattctatcaagaaaaagtcaactgaccttttgcaatgccagtaatgatggagaccctcttggaccagtcaagaacttggtcacttccttctcttatgtcaagataactggaaagggttcctttaggaacaaaatcatagatgagaaagcactcacttctactttttgagcaacaaaaacctctaagcttaacaatgttctcatgttttagtgaaaacaataaacttaaccctttaacaaactcagcttcctcagacttacagctagtgatactaatgcttctaatggctacagcagaaccatctctaagaatccccttatagacagcagaaaatttgctcttcccaagtaaattagcctcagaaaagtattgagttgcagactcaatctcttccatattgaatctataatcattaagatattcttgggaagacccaagtccatttccaccatctcctactggatcccatccattacaatactcaagtctcacaagtggagaggcactcctgctatgaaactgaacctccttggcctgatcaatgctaagccgaccgtcggaaggatcacaagtactgccaatcttttgttttcgccaccggtatctgataataatcagacacactatcccagtcattgtgatagtcactacaattacccctgcaacaactgcagcctgtgaaaatcttgctgactttgaacaatgtgtttggttacaatgtcctttgacatttgcatattcagggttgtgtgttggatcaccactgtcatttctgtttggtatgatagcaccaaatccatctccatccacatcagaaaagtcataagctgtgcagactcttaatctagaaaacccaactccacacaagcctggattgttctcaaatttaaagccctcatttaatcttcgaaaaccttcatttttttccgtaagtataatcagtgtaattctgagaaaaaaaagaacaaaaatccatattttatggaaaatatataaaaagggactgaacaaaataaacagacataccagaagagacaactccagaaagagaattatttgtgacatctagtaattccaatgattgaatactagatagtctagagggaatttgaccagagaatctattaaagctcaaatcaagcctttttagcatccccaaatctcctatgctaggaggtattgcatcaattaatctgttatgctgtagagcaagaaccattagtctcttcaaggaccccattaccggaggtagttctcctgtcagctggttacagcaaagctgtagaactatacaagagagagagaagtatgcgttaaaaaccttcaaagttgctttcaatacagaaaattatggaaattaatcgaattgaattacacaatatttcacttatatgctgtcttaaatgcaattaatggcttaaaatggagccaatatagatcaaatacataacttttatgtttatctactctactcagattgcattgaagagcagagttttagtataataagaaaaaggaaaaaaagaaagaaaagaaaaaagtctgattttttttggttattatattgtgtacttataacaacaagtaccttgaagactagccatgctgccgatctcagaaggtatggcacctgagagattattcacattgagatagagatcagtcaactcagtaagattggaaatttctcttggtatctctccagacagattattgtaatgcaagtaaagaccagacaagcatttgagcttggccaccgccggagatagcttgccggagagtcccttcccttgaagagaaatgttagccactttcctgtgctcattgcaggccactccttcgaatgagccactacaagggtcaccaccaccctctttagtccatgttctcagaaacttgttatctgggtctaaagaggacttcaactccagtagagcttcaagctctgaattcccataaacatgactagaagtataaaaagctagcgaaagagaaagataaatcacaatggaaagaaaacccatctcagatatgaaatcaaaattgtgatccttgaccaaagtcttaatctttttcttctttttatgtttatggtgagaaagagaaagagaaaaccatgtctgtttattaagactcttcttctggggactaaccaagagaatgaaatgaatgaagaattaagactaaaataaccacttttgttggggttgatgacagagagttttcacacatggtttttgggtttagattttagcatcatcatcataattaagattaaaataatattaacccatttggggggccatggaccatggtttgaattggctgtgccgttagtgagtattgtttgggatcagttgtttggagtcttggatacgaaggtgtaaaggtcattgaagatttttcttttggaacaaagggtcccactgctatgactttctttgccttccttccatttaaatataaagtagcattgaagaaaatgggctccagcttcagtctctgttgaaatctttatgggtctgctgctatttctttttttttgttcttttcttcattatctcaaccttatcttcctttacacctaaaaaagtgttccagaaaagtttgtaagaaatgctttgaatattcagtcttaaaatatttatgccacttcatgcaaatttagtattaaatatcactcattataccatgactactgaagtttcaatcatataattctgagaacgagtcaagtaatagtttttcaatatttattaaggtgtaataaatattttgacatttgactcgggttgtttaaccatgctaaacatcatttttcgtatatgttagggaaagaatctattgtatttattattctatttataactcagttgaagaattaaagttcagtgagtcaaaaacaacacttccaaagttcaaattgtgaaaatgctaattttcttttctttctttctttgcgttttatgtagaacaataatgagttaagttggtgcttctgccattgttgatttataatgccaccttaccaatttgagattcttttatagaaagaaaaaaggtatagtaatatattatagttagttcctgacattttcgatctaatatgaaaagtctttagggttaataatgtggtgggaaacctaactctgtcttccaaaatacaatattccacatgggtttgactattttcttgttcccattgaaaaaatacaatacaaggacaaatcagttattgccatatatgcttcctcataaatcatttataagtatgtcaatttatctttttcattcgttataattttcagaaacagctaagttgaacctttttttctcagtggatgaaaataaaatgtcactgtttctttgtccttggattccctatcttcacaacaaaaattacatacacactagtaaataactataaatgctttttttaatcataaccataacataattaatttcctactaaccactttattgggagcaggttctaaattagttgctttgtctaaacatatagcatgaacttttgtttgaaaaaaatttgattactagttgaacttgatagtgaaaatgatcaacattcctaattaattaaaaaaaaaagtagcaattcttcatcacaaagaagtaatttctgcaagtgttctttatgataaacttttatacttttttaaagatataaagcattattatcatctttatagctttatagatgataattaaattagatctctagttttttcttcttctttttttt

SEQ ID NO: 16355 - DNA, 6361 bp, Cannabis sativa
  modified_base (6334)..(6335): a, c, t, g, unknown or other
aaaaaattaaaaaattatatatgtataaggtatttcggtcggtttacggtccaaaaaaaaaaccaaccaactactggcggttcaaaccgttatcgattttttcgtttttcggttcggccggtttcggttccagcggtgttcagtaggtcggtttgaacggtttttgtcggttctctggattttatgcttagccctaacgactaatgctgagtgcactgaaaattttgaagaggatgttgaaaggctcatcgatgatgaggaggtgcaagaggtggaggactagggtgaggtccatgcaattgccactgaaaaggaagaagaagaggtttctcttgtggctatacccctcagagggtatatgaggttgaggagcccatctcgcagcttacggacaacctgattgagggccaggactatgttaccaaagagctcaaagaagctattcttgctaggatccaagagaaaggttaagctcggtgggtttctcctccgtccaccctcacactgaagaggttaggaacttggaggccaaaggccttcttagggacgtggaggtatttcttcctcatgttggacaacttgccacaaacccagaggaaggtctctgagcatggcctcgaccacatgctcagtagggtgcgctcttgcctctacatccttactttaaaagggtgcctaactattacaagatttgcccgatgcaagttacgccaaaggtgattaaatatttagttgcattgtttgttttgtacgcgaagcaacaatggggcatgccatcccctcacgacaccaattggctatttgacttgaagtctagcctgggacataaccattcaggttatttttattctcccaactgtattgcttatggctgactaacactaatgacaccgaagtaatgaagataggtggttacataaaagactattacatcgtgcaagcaatggatgccaaccacctatctttccagctagctaagacatattgttgtccttatttcacgccggggctaaagttaagggctcagaccattcttcgactttcgtacagggctcaaaatatttttttgttaacttcaataagaaattttgttcagtactggttatacccttctgaagaggttgaggaagaagttcatgtggctaaggcccctaacctgaacaagaagtgtcggagaaggaaaagaagagccaagagaaaaaataaggttcgtttgagcatcccattttgataagggaagtcgttgagcaagtttcatgtctgaccgtacaggttgttgctgggaaagggaaggggttgtcgaggaagaattgaacgaggattcttcgaatgacgatgccccttcattcttaatccgggaaagtgctcctccagagatatagggtagaattttaatagtacttttcttacttctgttatgtattttttattaatattgaccaagtctttttgtctgtacagccatgtcttctaaagctagaggctatgctgaagaggaaagctggaagttcttctggacaggaaagtctgaccaaagtgtagaagaaggatgagaaaactttctctagcaggaatgttcccaagattccacctccacctcctccgaccaacaaaggtaccatggtgataattgatgcaactcatcccataacaacttctctagtctaggccaaaaagaatattggacctcctcgtgctcctccgagcaagaaattaaaagacaaagaggttactcatgtttccctaagatgaaaaaggcaaaggaggtgaccaatggttaccaagaccgtgtttagcccgagctgaatatgaagttgaaggggtcggatacaatgcccatagagtttttagctgtcggcctcctgaaggatcacactaaggtaatttttatcccttatttatttttagttccgattgcactattttggtcttctaacttgattgttatattttagattgatcttcaacttgagtatctatactcctaaactaaggccatagccatccagcccactaggaaaagatctggattggaaaaggtctaaggccaactcaaagataaagagactaccttaggtgaagttaacaagaagctggatgagacaacaaaaaaattgaagagttgcaaaagtagatagcttatatgccccgagttgaaaagctaaaggtcgatctggatgtagagttcaagcgagctcacaggctacttgaagagagggacactttttggaggcttcttcaaaatatggaccagcaagtcaaagacctaactactgaagtggccagggaaaagaacgccataacttccaaggaagaagccttgaataaagagatcgaggtttgtactgaagactttgcgccttatccagtgattgacacaaagatctgttacgagttctagaaggccaatcctgaaggtaactatgattatataaagctagaggctcatgattccttgttttggaagaggccaacaaatgaaagttgaagaagaagccaaagtaggcagagcaggccagtgaatctattgatgaagttagtcgtgggaacatcgagcaagctgaagcagtcgatcttgatttctcagttgctgatcaagatggttctgcgaccatcgaagacttgaatacgaccactccaatggattgatctcctttcctgatcaagagcctcttttatcttcttttttatttttgtttggtcttcgggcctttattttaatacatcatagtcgaccaatcatcttttaaacttagttttatttttattttattcaaacacacaactattcgggcaatcattaatctcgaactctaatctagcttttggtatatttaaccaacgcatatatacttagctttttcaaattttttcaaatttggcttaagtattttccatgccaacttaccaataatgtatgagtgtaggtgtcccctaagtaaccgagaaagctttatactcttggtcacttgcaaattaaccagagtatttcatattttcatatttgaaccttatacttggatgaacctatttgtatacatgttaggtagttcctgactttaaatataaatcactaaatatttgcaaccaatcatgtataaaattgacacaatttgaatgacaattaatcactttattcatttattggtcggaatgtattgttactgaagtaacttacatttatttgataataaaaagctattatgtgatcagttcagattttaattaattaagaataatgattgttacaagatgtggtgctttaaaaatggtcattgggaccttagcactaaaaccttttcaagcctttgaatggtgaccgttaagaaggccatcacttaagagtgatgtttgagcattatgcaattacatggtcttctgacctttgtatttattggtagtattttcttagatatttattattctatcattgtggtactattatcaattccatattttcatcatactggcccaatttataagctcatggtgttgtaacttcagttacttggtacgaatcttcctaatttggtatgagcacacctgatccactttctttcgtattaaggaacattcttatgagtaccatgcccccccaaaaaaatttcatttcctttacttgcttgttgaagtatctcaatgtttagaattgcgattgtattgcgcgcctcaatttgaggctaaaaaaaaacacgattgcgtgcgcctcagtatttacgcctgaggcgtacgcctcagacttgcttgttgaagtatctcaatgcttaaaattgcagttgtattgcgtgcctcaaggcgcgcctcaatttgaggcgaaaaaaaaatgcacgattgtgtatgcctcagacttgtgaggcggtcaaaaaatgattgaggcgtaaaaacatgtgacgtgcacgcctcaaggaaaaaacaatgctattgggtgttttcagcccatttcatttaataacttaaaaaaagctatataacacaacttaagaaaaaggcccaataaaacataataaaaatccaataaaacttaaacaaataacttaaaaaaagcccaactcaaaactaaacctacaccaatatttctttagggtttaaagtagccgacctcctccttcatcaaccttcataattcttctaaaatttcaatcactgctcaggaaaaaaaagagagagagaaaacttgctgctgcctttcctccttcatcgttctttttcctttcttctttctagctatttggtgaagctctcttcatgctcccttgctgctgctcttaggtaaatattaattagttttttttttatctagattactagttagatacataaatttcaatatgtatttattattttagttatatttgtgttgtatagatagtagaatggttaaaagatcggagaagagttgtggtggaggaactagtggtaataatgggagaggtaatgttagtactacgagtagagggaatggcagccatggaaataaaaaagatccagcttgaaaacatggtaaggaggttgatatttcaggaggagatgctgaaaaaaagaaaacttatgtttatcttgagtgtaactattgcaagcaaattattaagggtggtgtgacaagattaaaacaacaccttgctcaaactagaaaagatgttaaaccatgtccggaggttccaaaagaagtaaaggatgaatttgtggagcacttgaaacaaaaaactttggcaaagcatgtgagtcaaatgaattttgaagttactattctcaaaaggattctgcccccatgcgtagtagaggtgtaagaggcccaatagataggtttttgagcagcgatggtggagggacaaaaactgaacaaacccaagtaactcctaaaaatgcaaaagaattacatgataaagtttggatggacattgggaggtgtttctttgagaatgctttgccttttcacttggttaagagtccttctttcatcagtatgtgtcgctcaattagagattatgggaggggattgaaaactcctagtatgtatgagcttaggacatggataatgaaggaggagatgaatactacaaatgctatagttgaggatattaagcagtcatggccactaacgggagtttcaataatatctgatggctggtcagacattagaaatcgaggcataatcaacattttagtcaataatcccaagggcactgtgtttcttaaaagtattgatggctcttcatttagtaaggatgcaccaaggttatttaaaatgttggatgatgtcattgaagaaattggagagcatctagttgttcaagtggtcactgataatgctagtgcctacaaagcggcgggcacattgttaatggagaaaagaaagcatctatattggactccatgtgcagcacattaccttgatttgatgcttgaaaaaattggtgaattgccgcaacaccaaagtgctttgtccaaaggaaaaagattgagtaagttccttcacaatcatcaatggttgttaaacttaacaaggaaatattgcaaaagagatattataagacctgctgccactagatttgcaacaacatttcttacattgcaaagcatatatcaagtgaggcaacctttggaagctgtgtttacttctgaagagtgggaaacttgtccttgggcatctaaagctaatggaaaggaggcaaaacacacgattttgaaagacacatatttttgggcaagtgtgtcttatgccattaagaccataaaacctttagttgaagtgttgaggctagttgatggtgataaagagccaactatgggttatctctacaatgctatggatacagcaaaagaaaaaatagcaatagctttgggtggagaagaaaaggattacaaatagatatgggaaatcatagatgagaaatgggaatttcagttgcatagacatttgcatgccgctgcgtactttttgaatccccgttgtcattattcacaaggattttccaaccatccagagatcaagttgggtttgtttccttgtatggacagacttataccggaccccgaagacagaataaaagctgaccttcaatgtagcaattttcacaacaaggtagggttctttggactcaccttagctcaacaaacatttcaaaaacgatcagtaggtaattaaatgtctaaatctatttctaatattttttttttcaaaatgtgtagtagtatgaataataaagataagtaattattctttcttttagtggaatggtggactcaatatggagatcatgaacccatttcaatataatcaggtttactaattaataaagatcagaaatcacatttttgttgcatggttcacatnntttatttcatgattgtttaatgtata

SEQ ID NO: 16356 - DNA, 15383 bp, Cannabis sativa
aactttaagtacttatggcgctatttacccttattaaaacaactactttagatttcttacatcaaataaaagaaaatttaaccatagaataaaattatacaaattaattttttttttaactagaataatgattgtgccatacttaaataaaattaattctaaacgtaaggtcaactttctagcgtctagtcaaactttcgattttaaagagccaatgtatctttgcaaaaaaaagagccaatgtataagtactgaaaaaaaaagccagtgtatcatgactcatgagcaagatgtattttcattttttcttttctatttgaaaaaaaaaaaatatgttgaaagcttaagttgagggtgcttgatatccatgaaatgaaagttgaccaaaatccaaacacctacaagtgttccaattcgagaagtttaacactcgagagggtgctctataagttgaacacgcattagagtgctcaacatttatacatttatgaaggttatgccttatcattaacattagttttaccacaaaattttccattaatttatatatataataataacaatagatgatcatatgatggagacaaacccattcattcatatatattgtactcgtcacaacactatcctcaactaactccaatgatcatatgaatggatgaagcacaagcttattatttttaacaatggatggagcacaagctttttgacaaatatcacagccatatatacctttaatgtcatgcttttttttttctttctttctttttgaatgaataacgtgtggaaactttgacattcagcgagaaggaaaagtcagggaagcaagaacaaaagtagttgcttgaatgcatctttaagaagaaagcagaataagtcaatttttggctaattacatgaacaaacatcatggacatttgttttgctaattcctcatgttaaaatgctcacaaggcttcataaaacttggaatcttgtaaatttattgtacacccacccagatcaaagttttataagagaaagcaaacaaatacagaaagacggaccgtcgtctgttcttcaattagcccctccaattgtccttcctcttccttatctcgtggatggcttccacagctgagtcacacccaaccttctcctgtaaaagatccagaatttaccataagaaaatgacatagaatactgggaaattacgtgattacctttgagctgttgtgttggactaaaggatgataatgataactatgcgaacctgaatctctggcagatcaacccgaatgaatgggtttgtctccatctcctcctcgatcgtcgaaggaattgtggggaggcctgctttgcgctgctgctgggcccatgatagtttttgctgtattttcacattttctggttcaactgtgacagcaaactgcaagttcttgacagtgtactgaggcaacacaaagtgcaattgtcaattatgatctggaagagaaaggtttgcagcaaaagatgcaactagaactagagaaattatattccatcacagaaataaagtgatcagaacaacgggaatgtatcctgccagtgccagcaacaagttcctcaatactatgtgaaaattcattcaacaacaaagaagggtgaaaaactgatgacatctaatgaccattagatcctaaatttctcttataatatatgacatagtttgatcaaagaacaattacaatgatccatattcactgacaacaggtattcagcgagtctcgtggatatgttagaaaacttacaaatgtgaaggaagattatggttctgataaagtaaataacaattttaactcttaagctctgccgcaaacatttatttcttttgtggcacaccaacatttattttcaattacactttgaaataaagttccatcagttatatttcaagtgaaagaacacttgcaagtgaaattctaaacaagaaaggaaaaataccataaatatatatcagatgtcaaaaaccatatataagataaatgggataccactccatcaccaattggaataattctccatccatctcaccatcacttcatcccatcctactttctaacaacgcttccacattctaccataaatattagagtaaagaaaacaaatctgtaacaagtaactgatccaaatctaaataatttactcattgccaactaattttaagatgaaacctcatccatcttatcatacacttcaccctatcctactttctaaccacacttccacattctaacacatacccaacttgttgtccacaggtacaagtttagaataagaaagatcacatacgctacctcatgaccacagtaaactcgagttggcttaggcaatgaagctagtgtcacacatagggagtgatgcatctgctctgctgtcccttcaaaaaatttcccgcagccagctacaaactgcatgtagaggaataatatgtaacacaacataatttgctaaaagaaacactgatttacaaatccttgcatgcctacgtcattcataataacccatgaagagagaaaaaattcttctagaatcagaataatcagtagccaaaaaagttttgagtatagggaataaggatctgatcgtccaagctttaagcaattgtttatagtttcatattagtttgttgcagaatcaatttttcttataaacccaatatatgagaagtacccatcccgaagctgtttattctttttatttcatatttatctcccaatgccaatctaaatacaagcatcccatccggtgcttgtaattattttcaattcctctgcacccatattagtgaggaactgtaatgcaaagtcatacaaatatttttgacaagacaaaggtagtgacaatgttatttgatttgttcccactatcccatgacaatttgatttcggaaactagaggagtaaaaggaataaaatacaatattccaattaacttacaagagtatctccagtaaaaacagctggatcctgtccctctttgccagttacgtaataactaatatgaccattggtgtggctgaagaaattagataaggaagagaatttagttaagacttaagagtacagaatgaaggaattccgaagaaaattctacataaaataccaaacagcagaaaaattaatgtgtaaattaaaaaatttcagtccaaagaagtatcacaagtaaacatgcaagctgaaaaatctcacaaaccttcaactttaatgttttgtggagtacagtttaacttaggaacttgttatgggaaaaaaataataattggaatttctacaatctatttctcatcataactacaacaatgaaaatctatattcatactaagagacacaatcacaatatatatgctaaaaacaataccaaggagtgtgaagcgccaatatactaatatcagctccaagtgaaattttatcaccattgtctacaatatcagtgcagcccttcacattgtccttagaaccgccatacaccttaatcccagggactaattgccttagcttttcatttccaccagcatgatccctattcatttcaacataagaaaacagttacataaatgctatgatgactttcacatcaactactacagtataccattatacaattcagaaatgcaagtcaatccacaatgaagatcatatgaagcagcaattttctatgaaaacaaagccaggagagagcctttctttgagctaacatggacaaacaaccagaaagttccatagctcctcattcacaccaaggaaacttaatactaaaactgtaaagcatgatatattatgatcaatcaaaatctaaagaatgaaaaaacaaagggaatatccaaagaataaccagtggtgatgagtggtgagaacaagcttaagaacgacgccatgttgttgagcaacgttgagaaccttctcgggctctacaggatcaactgctgcggcttccttggtgctctcatcgataatcctgcaaaattagccgaaacccaccaaaattcatacgaaggaaaaactctatatataatccttaacataaagatgaaaaatttcagaaatatatgaaattgagaaaaagggggaaaaagattgcgtattacaagtaagagtagttgtcctccaaacatggaatgtgatgaatcttcatttctccgttcgctttgacctttgacttttcttcttgaagctcttgaaatggcggtagttatggcggagaggagaccggttcagctgcttttctttggatgtcaccacgtcggcttctagcttgtactattggaccgggcctttgggtctgatgtatagagtggcccaacgattacttgggcttgagcttagatctcttaaggcccgttatgggtaatccatcgcccgactatataataatcgctttaattagggtttgcattttggaacaatcaccaccaagtgggagctgaagttgaagccgaggccacgccatgggtagacgtaagtaattatccaatactctgaattttctatattttaatttcaacagtaaaatcttcatattcctatggatatggttttcaatattttacccttttgaatgctctgtcactgattttgtgttggaaagagagaacaataataaaaaaagaaaacatctttgtcgtgggcacaatttaatgtattaaattgatgtgtgtattataatttactgaaaattttgttcttttggcaaaatcaatcttagaagaattttccgtgtctggttaataaatgaattttccagtaataaaaacttgatgtgatttaaaatgttgttctgttgcaagtagtttgtattgtaattcatgagaaatatgtattttttattgttcataattgtatattagttaaagaaaaaactattgtaacatatctgagtaaaaggttgtctttcttatgcatgtaagtatatattttgtttagattcgaattgtgtaaaaacttacattttcatatacaacaatttgaattggtataggacctgcaaggtgttaccgtcaaatcaagaacaaaccttacccaaagtcaaggttttgccgtggtgttcctgatcctaagatcagaatttacgatgttggaatgaagaagaagggtgttgatgaattcccattctgcgttcacctcgtgagttgggagaaggagaatgtttcgtcagaggcattggaagcagctaggattgcttgcaacaagtacatggctaagtttgccggaaaagatgctttccatttgagggtgagggtgcaccctttccatgttctgcgtattaacaagatgctttcgtgcgctggagctgataggctccagacaggaatgagaggtgctttcgggaaacctcaaggcgtgtgtgccagagtcagcattggtcaggtccttctctccgttcgttgcaaggacagcaacagccatcatgctcaggaggccctccgccgtgctaagttcaagttccctggccgtcaaaagatcattgtcagcaggaagtggtatgatgttttcggaaaatggtggtataactataagccctactaactagttcaggaatattattgttacgtttttttttgcccttatatttttcaggggattcaccaagttcagccgtgctgattatgtgaaattcaagtcagagaacaggattatagcagatggtgtcaatgccaaggtatttatttacatcaagacaataaatgggataattaataatgcaaatttttctttgactactgatatgctgtgctttgattgtgcagcttcttggatgccatggtcgtttagataaccgtcagcctggaaaggccttcctcactgctgtctaaggctaaattcaatagctgttttctcccagtcaggactgaaatttgacgcagaaatgaagaatatttatatatagatttgcattgttttgtgtgttattgccattttactcttactaaataagaccagagatgttgtctttataatttgcactgcacatatcgtgcgtaaataatattaagttactattattttgttggcctaaatttatacttactggttattgataaaagttaatgacatttgatgattctctcagtctctatatactttcaccaaaagtcccaacttcgacagtctttaattttttgtgttttgacaaattaaaattaacccaatgaacgtgaaaagcaatgtaaacgttaacagcacatattatttaacattttttttatttaaaaataattgattttggttcaaactctgcacctcacttgaacaaattcattctactatcagtatttattattattttttatttaattttaaagtaataataatattattgttacaacaactaccccagaatctaaaatttgcataccatgtgtaagaaatgtaatcttcggtaagagcaagagaaaatagctaatgctatagaataaatttagaagaaaaacttcgaccaaattctactacttcttcttcttcaaaaatattatatatatatatatatatatatttacagaatcttatcgtagaccaatttcttgttgttgtacttgcgatctgagtttgtgtgtttgtgaatctaatctgtatacgtaggatatacatacatatataatataaactgatatacacctgaatcatcaaatgtccaaagcttcaaccagactcgtccatggttttctcaggcttcacaattatcattcctctcacatcgcgaaaccctcttccccaaatcccggtactacggctgcttctttgttccgagattcgctcagtcgtgcgcaccattccgcccctgctccgccacgttttgctcgaatcggagtaccgggttcgtccaatgcggtgttgacccgaattccttcgtctccctctagggctggagttgggctcaggttcttctccttggggaaagctaatgtcaatacggattttgcgaagaaggtctttgagaagccggcgtcagccgttgcttccaccttctcgaggtaccgggaggccatagggttgcagattgaggctttttttagaaggaactatctcttcgtgttaggtgctgttggtgtggtggcttgtgctttactatggaggattatgtttggcattgccaatacctttattgggttctccgaaggaatggccaagtatgggtttcttgctctttcatctgccatcgtcgcttttgctgtgagttctaagtgtttaatttttgtttaaagctctaattaattaccgtttcctcttatgaggggcatttgaattttctgcaagttaaatttaagtcttgatatttgatagtaatgtggaattttatatggagagatcaccatgtccaattgttcattatagctggagtgcattcccagattaaattagagttttgtttcatggaaattttgtcatttgtcccacatttctttttctgcgatattggtttgtttatcaagtagaaaattcatttcccattatttggatgtacgagattcttgtgagggtttagtttgtgcactttattgggatttttggttttatcacagaacagttaggcttcttatgtttccattatacatattgaacaggctaagataagatagatggtttctgtacaagactatgcttagttcaaatttgataccttcagcttcttgtcctagactgtgtttcattatgtatcaatatgtatatgactgccactgcatcctagttccagcagcagcctgtttgtaatttgtatcatattatattattttctttatatatgggtttgttgttggcatcaatctttggtgaggaaagaagaaatatgctttataatggactgtcatctgagaaatatgtgttcttttgttactgatagggcctttacgtccgcgcacgattcacaattaaccctgatagagtttatagaattgctatgaggaggctaaatacgtctgctgggattcttgaggttatgggagcccctctttcaggatcagatcttagagcctatgtaatgtcaggaggtggacttacaataaaagatttcaagccaagaattaggagcaagcgttgctttctcctcttccctattcgaggttcagagagaaagggtctggtcagtgttgaagtaaagaagaaaaaaggccaggtatcctgttgctttaagtttcctttcgtttatctttttaagtataaattgcgaagttcatgattagacatatgtttgcatttattttgctctgctgtggaagaccaaatagggataaaaatctattaaatttatgatctggcctactttatgaagaaatgaaagtatcaagagcttagtttctttgttaagtatatgcttcggcaatcatatctgctgctgtgttcctcctgcaaattcttctgttagtacaatttaaattttttgcaagtaggcaaaattgatcgagccagcctttacaactagtcaattgttgttagaacctgttactattatagtcattgatgttatgccacaaatgtactttacaatacatgcgcacaccattgaaatggacatagacgtgattgaacttttttaatgacttagtaaattcatgaaacacaaaccatctgtactattttatctagcttctttacaagagcatatcataaactggtgtaagaaaatgaaacaaagcatgtgtactattttatctagtctccttacaagagcttatcataaagaaaactggtgtaagaaaatgaataagaatagactgtttttcagttttgaaatttgaaatctaacctttatgaataaggttttatagacaagtggatcaggaatgaaagaaaaaggaaacagcagaaagtaatttttttatttttattttttctgaatgtttataaaagaaatttgcagggacatagccaagtgattacagaatactaggaacgagtttgaagaaatagagaattttattgatggtctgcttttcctgatctaacaccagtttgatcttttgcagtatgatatgaagcttctggcagttgacattcccatggcatcaggaccggaccagcggttattcttggagggagatgaagtagaatacaaggttggtgggggcctaatatctcaacttagagatcctgtggtaaaagcaatgagtgcggccaaagagtttgacactcttgatcagattgaagaagaggaggatgctgaaagagaactgcagaaggcagagcaaaagaaccgtgatgaaattgagaaacttgagaaagatggccatcagtgattgatccggaaaagaagaaaaaacgaagagaaatttcaatgttgttttttgtttttaacagagaaatgtctatgacaaattacttgaggctttgatcatttcacaaaaaatggggttggttagatctccttgcatatgcccgttctgcaaggcttgtttctcatgtaaaacaagtagccattgtgggaaatcccatggtagagaaaagctccattagataaaaataaagctcactcacactttggaatttacatgcctgacttgacttgatctcagaatcattttgtgttttgcaatgctcaccttgtcaaaccaatactttggaaaatttatctctcatcacgtttgagtagtcatattctcattctcaatgcttaaatataaacatcacctatgaggctatgatgctaacattgaaggtggcaacttttcaagcttttgtatattatttatctaataaattaaacaacaatccccattatattttatgtaggagaaagtacatatatttttcttgatccaagttcaacaaacaactttcatggctttatgggtcataaagaatggcccaaactattccctattcgttctaggtttgtcccaaatttgagtggtcctctttattatcgagtcactaatccatgtattagaaaatgaccctttaacaagaaaagacaacagcatattttcttgccattagttctttacagtcatagatttgtttctacttgttttatgttaagtttccttcattgctacgcatttatattggattaaggctccaaagtaattacgaccccaccatgtgattttaaagcatttttttttacgatttatttcatgtctgactttgaagtcaaaacaaggaataattaacactgacttttttctcctttgtttaaagcttttttttgtttttggtttgaaaaaaaaaacaaaaaagcttagacaaatagtctaagcaactcaacaaattacatttgcctaaacttaactttgatgttattacaaatatgggcaagttaggtgtcattctcaaggccaagggcatatagttggtattataataattaattattttgctataatatatagagatatattcggtgcttgtcttcttttccttttactcatttttacaaataatattagtctatcccaacttcccaaacataaatagggaaatatgaaaacaaaacttcactaacgccttaacaaatatcaactgaaatcccaaattatgactaaatttcctttatattaaagctagatatacatatttattgatgtaaacgtattcatattttcatattatgaaatgatagtgagataacattaatgcgaaaccaccactttagttgggcaaaattctaatgcatataggtgaatatgatggcacatttttaccgtttgccgacactgtattttaaaaagaaaaaaaaaagactatcataactattttgtaactctttttcttaatactattttcttattatagttacttattcgtgataagtgaatgagtaatttgaaacgatttatttatctgaactgtccatacatgtattggacagatggccagatatcatttgtggcatatgaatatgatttccatttctatatggaaaatagccataggcactaggcagcttcttctgtcttcttatatatttttatttttgcatgaaaagggaaaaaaattcacagttaaacagataaaaagtctaactgtccaacaggttatgcacaactcagagagctgcacaaacacaaaaatatcagaagagaaatgacccaaataaaaaccaaactaattacataatgaatggtcatacaaaaagagcaaaatgccagactccacaataaaagagcttgcaaaacaacattgttacagcatccaacaaaccaaacatgtagtaaaatcagatttacttgggtttttgatgtttgttttgttttatttgcatgaactttctttccatcatttttctactccattttttttatcaaacttactgtaaaattgtaatctttcacagagactagtaagatttaataattatattttgcaatgaagttgcttttcggattcttatacttacaattatacatagtttggtagcatatataagaacttttacagtcatacagtgttttgtagcatttataaaaacttttggtgaataataatttagcttaatattttcttagacaaatagtggacaaggaaagggctactgaagagagacaaagctgaattctctacagataaagctcactgtcttattcctttttcttggtttgatatttttctctttcatttggttttgttttatttgtttatttatttttttgcttattactctttaccaatttccatctttgcccttgttttaccaaattatcttatgtaatgtccctgttattcaatccttaagtactagatcttaagtataatctttaaagaagcctgtcccattaaattccctcctcttttataaagaacaaaagaaaaaatttaactttaactttttctttataaccacttttccttttctgtattcccttgctctctctcttttttatcacttctttacaatcttttaagtgcttattataagtgtgaagagtttttgtgattaagctccttttccttaatgggtttgcttttattttcctttatggctcttttaggataaaattataaaataaagagtgcactttgctttcccaatgtaaaaaaagttagtagtaaggaaaagctttttcttctactcattttcgtttttattatggagtgggagtatggacattatttgaaaccagatcccattttatacataaacaatttcattaaataccaactttcacaataatacaaaccttcaatgtcacaccttcgatattgaagatagggaatatcagattccttgacatattcatctaggcactgagtctttttcacaatcgagttctttccatcttagtggtgagcctgggcatattgggttgttattaataataacaaattacaatgctcaagaatttcacctccactactgagggcagagtatgatactttatttttttcttcttccaagattgctaaacagaatctttttccaccatacagtacacaatttcagctaatgttttcatgtttcttcactgaaccaggaaagaaacaagagcagcttgagttaggactctcatagaacaatcccatgaagctgttgcattcatccattgccgggctttctttcattctctttataccattcatcttttccccagtcttagctgatctcaactctgatagacaagctctccttcactttgcatcctctgtttctcatacaaaaagactcaactggagtgattctgacccagtttgttcttggattggagtcacctgccatggaagccgagttacttcagttcgtcttcccggtattgggcttgctggactcattccacccaacagtataggaaagcttgatgctttaagggtcttgagccttcgttccaacctcctcagtggaaacattcctactgatattccatctattcctactttacaatttctctaccttcaacaaaataacttgtctggtaactttcctcattctctctcacacaatctgattgttttagatttatcctgcaactccatttctggaaacattccaaccacagttcaaaatctgacacggctcgccaagttaaagcttcaaaataattccatctcaggagtcatccccagtctgagtctctcacatctcaaacttttgaatttgagctacaacagtcttaatggctcaataccttattccctccaaaagtatccaaattcttcatttgttggaaactctctattgtgcggaccacccttaaagccttgtcatacaagctcctcctcttctccagctccagctctatctccttctaactcaacattgctaccaacagttgtaagaaatgctccaccaaagagaaaaaaactgggcctagattccatcattgcaatggtaattgggtgctctgcagttatatttctcattgttctggcaatatacatatactgtaacaaaaaaagagatgctgaagccagtggcacacttaaagcaaaagcctcctccacagctgggaaaactgagaaacctaaggattttggaagtggagtgcatgatgcagagaaaaacaagttgttcttctttccaggctgctcatatagttttgatcttgaggatttactgagggcatcagctgaaattcttggtaaagggaataatggaacaacctataaggctgttctggatgaagggtcgaccacagtggttgtgaaaagattaaaggaagtaatagtgggaaaaagagagtttgagctgcagatggaggttgtagaaaggatcggacatcacccaaatattgttccacttcgtgcttattactattcaaaggacgagaagctcttagtctataattacatgccagccggcagcttatttacaagcttacatggtatgcttttggccctcaatcttatggaaaactaccatttttacttcttaagaaatctccagaaacataacatgcatttctttagtcaacttaaagtgtaatgttccataaatatataaggaggaattcagtgaggcatttcagcaaacactttataatcatatcaagcaactatcagtaacatctcaaaacataaccaaatcattctgttccactaaattttgcaggcttcagaggtgcagaaagaacccctcttaactgggattcaagagttaagatctctctcggagctgccaaaggaattgcccacatccactccgacggcggacccaaatccatacacggtaacatcaagtcttcaaacgtcctcctcaaccaagaccttgaagcctccataaccgacgtggggttggcccagatagttaacttccctccaataatctcccgaatcatcgggtaccgagctccggaggctatcgaaacccgaaaactcacccaaaaatccgacgtttacagctacggagtcctcctactggaaatgctaactgggaaaatcccaatccgatatccgggtcacgacgaggtggtggacttgcccagatgggttcgatcggtggttcgtgaggaatggacagcagaagtgtttgatgtggagcttctgagacagagccatgtagaggaggaaatggttcaaatgcttcaaattgctctggcttgcgtgtccaaggtgccggagaaccgacccaccatggaacaagtcgtgaaaatgatcgaagatcttcggcagccacagatcaaaacttgggcttcttctgaatctgattactctaatgtccaaaccccaaccccatgagttcatgaccctctttgcctttttttttttttttggatttaaatgtgttagagattctcactctatccatttttgttttctctgaataatataagttcttttttaactaaattctactacgattgtatttgcatgtcatgcatggttaggcttgtatttttagctacagtgtcaataatataaggaatgaattaagaaaaaatcatataaattactatattatatatgtcttatcaacataataaaatattgaaaaatttaagagcatctaggtattactttctgttttttattttcaaaaaattattttaaaaaatgagaataaaaaatagtttttgaagtttttaaaacacaagttacatttagttactattttttaaaaacaatattgaccaaaattgaattagtttttaaaacaaaaaattcaaaattcttgttttttgtaactttattttgtgaaaactgttttcaaaaaacaaggtcaattgttttcaaaaaacaattttttagttatgatgccaaacgtaccctaagattcattttccatggctgagctccatgacaatttttgctatcccacttagccatcttgacaattaatgaatatacattccatatttggcacaagagattcaagaacaattgggagtgaaagtcctaattactacagattcagttcaattaatctaaacaaattatttccgtgaattaaacaaagagtaaatcaaagaacacagaatttacaagcttcctctgcat

SEQ ID NO: 16357 - DNA, 2706 bp, Cannabis sativa
tctctctctctctctctaagtcttattcctcttacttgaatgaatagaaagatgagctttatatatgttagtggttgacaatcccagcacttaacagctcaagaaactaaccctaacaaccataacagactttccaatttgggaaaggttgtaactaaaaaacagttaaaaaaaaatcaggtttagtttttaatggattatattccacaggaagtttgctctgatcattgttattgcatggtgaagtaggtaaaaattgggaatgtgggaattaaacttttaggttcttaaatttctagatggatcattctcaatttaaagaaactattattcggaattgggatcagaaaatagcgggaaatggtctaaattatgttatgggaaaataaatagactgaaacattgtttaaaaaagttaagtagaagggagcttagggatattctgctggaatatatgtaatatcttgaaaatttagttatgattatttaagcatattttatcaaacatgaaatctcatatgtcagagcaattgatgagtaagattatgatattactagttttagtgtgagaaattaagcctatatttagaaataggtaaattagacgtattttattaattacggagaatttattagattatatgtgtaatatatatgttatatgtgaaataaaatattttcaaggccaacaacaatagaaacttgattgtttggccagaaattaagcctataatttatgtatagaaaatggtaatactaataaactactggaataagttacaagtcctaggaggtaaccaaagtagattttggatattgttctaaatccatgtgcttaaggcatcttataaatatacttaccaatctagccatccatctctactccattgcgtattatgtttttaagatgttatttgttcatttagaatcaattattggcctagttaaccaaatatgtgataataacgcatcaggactacaattggtgatcgaaaacgataagtgtcattctcttctaaatcttatgagaaagatcggtgaaaaccattttaaccattttcaattcaccccaagaaacaaagtttaagaaatggtggtgaaagaagtcagaaaagaattgttcaaaatgcctcatagttgttccaatgctttactaaagtactttgcctctaccatagacacagaaagttatggttgagttagttgagtaaaagatgatcaaagatgatatgatcaattcactgcaacctcagcagacaagtgaatggggctgttgttggacttagagttggagttggagttggagttggactctgacacactcttaagaacctccacagcttccttcactttggtaaccaatgagtctggtgactccagcaatagcagcagctctgcattgtccatatccagaagcattccagtgattttcgaagccagatccggctgtgcatatacaacacaaacattcaacaattcaacactctttcatttcacaaagaagagtatgtaaaagtgaaagtaaagtttattatacctggtatttgctgaccattggaaagagacgatctccaagcatacgcttctgattctgaggagaagcagcagagagcatgctgctcaaaatttctagcccttgaggatgatgaagatgggatgagaatccagatgatcccctgttagtgtctcttacacgcccatttggcaaatattttgattgcccattacgctgccacatgtaatattggattacattaatggaattgattaattaactgatcaagaaaaaagaaagaaaaagtaagcaaacctgctgattagttgaatcttttggatacatcaatggcagctgttgttgcaagtgtgacacactcggaagaatgtgtccattcatcctacccctgtttggcctgtggtgtctacaagcatttggatgaatctgcaagtgtgcattataaacagtggaataatttgagattaaatatcaacaaacacaccacagtataatcatttaaggtaattaagttgcacttacaggaagtggtgatggtggctggaaggggggtctggatgaagtagcaaaaccattaaccctccaatctggtctgaaacctggagatggatatagtaaccctggcccagaaggcacttgcggaacaacaccagaaggaggagcagagtagtagaaaggagaataccctccagcagtgccaacagaagctgaaggtgcagatagtcctgacagacgatgcatatggtgaagctgctgcaggtgggcttgtctatcctcctttctctgagcaatagacacgtataaaggtttccgatgaaacattgaccctgtgagaaattcgtcaacaataaaatctcagtaatggtggggtttcctttctaaaaactctagtctcactgcactcaacttaccattgaaagtattaacagcactgtaggcctcttcaggagtagagaagcaaacaaacccgaaccctttgttaattcctttgtcattcgtcattaattttacagaggttatagtaccacactgactaaagtgttctttcagctcttcctcagtcacatcatcatcgatattctttatgtacacgttagagttctgtttacagaaacaatatgattagaacaaagctataaacaggtaagagagaacagctaggagggaacttaccttgtacttcttaattttct

SEQ ID NO: 16358 - DNA, 3773 bp, Cannabis sativa
acatgattaagatttatgagtaatagattagattaacctggtcagtcccattttcattcaatatatcagtcaatagagaaataatattaggaattaaaggttgagcaaatgtggaccttgatgttcagaattttctaaggctgctaaaatttaaaatcatatcctaagcttgctaaattgacttaaaaagcaggttaaaagagttggtagttaattcatcaaaactgtgtttgacacaataaaaaagaataaagaactaacatttcaacaaaaacaaaaaattagtaatagtattaataatgaaaatccaaatgtacttaactaaaataagaccacaatgatcttggaaacaaaatgaataagtaaaaaatactaaagattccaacagccggaatctgactcaaattaaacaattaacaaaaccaactaataatagtagaaggacctccataattaatagaaatcacaaagattaatcaaaatagtaataatagggttgcaacagcagaactgcaaccggtgccattacaaacgagccaagcgatacagaggccaaaacggctgcattgtgtgctggtggagacgcagtagaaaagggttctggcggaaaagcaggagacagaggattatggcggtgaggagacatgacatcaacaatcattttcagcccatttctgcagtgatcaggagagccactgatgaaataaaagagaccagacctgtccagggtgacagtgctattcccattgttaaaggctacgattggcttgcttgcatcgcagtggtagtagccccatttctccaccaaaacaactgaatcgttctggtactcgaaaactgacacaacaacatggccaaaaacaaaaaagcatagtatgagacagagagaaaagatgagaactttcaacatgtttagtactaacatacataaatgcaacaagattcactcaccaagagaatctccaattcgaaagcgattccttgaagcccactgattatagagggaagtcttgtttgtgggtgaaggcaccatccagcccaactcgtctcccactttaaattccttgacagcttcaagtgttggagcgttgatgatgaggaccaaggagatcaccatccaagcgcagagaactttaatggaagaagccatttgtaaggatgatgctctgttgctgatgataactttgttctcttgcaaagcttttgcaccgaatgctgaatgtttgagctcaaaattgtggtgtgaaacttcgaagggaggaacagtactatatatacatgatgtaagtggaaatgcagtaaaatcgtggggtggccaaaggaaacgtggtctgttgtaaaataataataataataaaaaaaaaaaatagaaacgtggcagcatcatttggcggttattatgtgacttagtaactttgtaacgttggtgaaaacgtgttgtttgaggttagtggtgagtggagacgatatatcatgctggaaatcaggacccctattaccttagctactttaaataataataataataataatatttatcaaaataataataataggaactctcttgaagagtttatcttaattatttttcgaataagataaattttaagatatttttttccaggtaagatttcttaaatataattactatcactgtgtatgacttctacgatcactatgttctgtttgtagtcaaacaaaccaactgaatgaagataccagtagtacactgcagaattcaggatagagaaacaagtagaaatcagttgctggaacaacgggggtaaaaagaatgaaatatatatttcttcaaaaaaattgtcaaaattttgactacgatttccaataaatgtatatatatataaatacattatttataaaaaataaaaataaatgaaaacacccccaaaacgcctaagatttacgtcgttttccgaggcccacttcagttagaaactaaggattagccatccttctggttcattataagatcttggtactggttacgcttagcgatcctgagatcaagtatacttggcggcagaggtttgaggcagccatacaactctactaggcgcacgaaatcctgtttcgtcaaacttttcttctcaactagttcatccaccaaagcctccatgagctttctgttttggttcagaatctgatatggtggaagacaatgttatcttagttaatatcaatcagtattcaaaagagatatttccccataaaatgagtgaatcttcatgtatagatacctcttttgcacgttcataacacatgttgacaattttcaatgcctcggtatcaagatcctgcaaatttatatgaaaagtgcaacttatttagtacattaataactaaatagaaacttgaaatctgcttctaatagaaggaaaataaggagttcaattacgttgattcgatctgcaacccatgagttagatacaccatgatgtttgtcagaaagaccaccaagaacaaaagttctcgctgctgaacgagcattgtcagccgtttcagcccatattgtgctcaactgaatatcagagacatcaataaattggatcacataacagatactaaccatataaatctgctcacagcaaactatcacaatcttggcatacaaagagaaaaggtcttgttaattttattccatattttctatttattgttcagtccattgattaaatgttacaggttttcatacctgatcctccccaaaccaaatttcatctgctgcgcgaggtgctagttgaacagtgatgtgatccagtagggattgtcgactgacacggatcaaggaaacacaacgaaattaagaaaaagagaacaataggaaataatgacatggtttcccagaaaagtaacaatgaagaaagaacaaaaatgcatacgttagaaacccgtcattgaacttaacagaatccattttcatccgaacatagcccaattccctaccagctctaggagcaatagtgagctgcaagcaaatcaatatattgttactttttacccttaacacttgcgggaatctttattttgagagagtgccaatcaagttcaaaaaatcttaatttgcaacaaagtgcacgcatcaatgagacattcgatccacaaaatttcagtcaaataaggctttaggatcatacaaactcgacgtttttaagatcttggaagtttgcagctacaacagccattgctgcttcattaatagctacttgcttccaagtctcaaagcttctctcttttctgtccagcattcctcgttcttccatttgtgcagcttgtaagagatcatcagtagtaatctgcaaatgtcgaacaaaaattactacactaagacaagtactgttatcagttatcacatgtttctcaggcaactatacgtacacaccattactgaaaaacatcactttcagaagccaaaatagagcatgtaaaagaaatgtgtttgatatataaacttgttcttttcactgttttgagtccaaatagtctatagatgtactctccttctcaaacataaatattacattagaggagaatatcaattctacagaagaaggtattacctcagttcttccatcacgtatcatattaatagcagcaacctcaactatgttagctagctctgctccaaccattccatcagtcatactagcaacagccatatagtccacatcttcggccattggtttcttacgagcatgaacctataaccaggaaatgaaaacaaataagaagtaaaatccagtgggaaaatttgt

SEQ ID NO: 16359 - DNA, 10495 bp, Cannabis sativa
  modified_base (1122)..(1128): a, c, t, g, unknown or other
  modified_base (9434)..(9434): a, c, t, g, unknown or other
ttgtgagaagatctaagatcctggtaaaataattccaacagttccccccatcaccaataaggcatcttgagcctccttgtactaatgcatcaccaccacctcaacttacccagaagcaaatgtcacgacctaaggaggcacctcccaaatcaacacttacctcaacctccttgagacaagtgaaaggaatcacaaaatgactatgctcgccaggagcctcaacctaggggacatggacgggtaaatggtgcaccatctcccatgataactatgtttacttgggatagtactaagggagactggaacacaacatgtgcaacctcgtccaccacaagatgatagttacttatcaaggtctcaaactactaccacgcaatcatcgctatacaggggcctacacctctgggacactagcagtaaaggacagttagcttcatggaggataattactattctaattcaagaagtcaatcagtgagtgttcatgactaggggtgggtaacatttaatccaatccaattaaaccgaactgatccaatctaatctaattataaaaaaaaatagatattcaattataattggattggattggatgctaaaagttagattctaattagatcggatcagttattggatgtcaatcttaaaattcaattaaaaatcgatccaatccaattatatttatatatatacattaaaaaattatttatattaatttatataataaaaactaataaaataaaaaaaatatatattaattatatttttagtaattttttttgtgaaatttgtaacacttagttgttttatatatttattttcataatattttgttatattttattacttggacatattattattttagttatttcaaacgtttagttttattacgcttgtaacaatgatatttttatagaatattaaacttaaatataaatggaaatattttatttttacgtatttatttttcatatttttaagttaatgttaaaaattaaatgtgtagttggatatccaattaaaaaactgatccaatccaattactttggatcgaattggataggattttgaggtctaattaaattggatcggatgatgatttttcaaattcaattactnnnnnnnttggatcggatgaggaaaaaaaagttagattcgatcggatgcccacccctattcatggcaatgctctacccctatactacgagaagcaccctcgatgtcccccagatgacacaagggactcaaacttgcattaatcttatctctagacgtgacatgtggactagtaatatccaaaaaaatattgataccccgtataaaaatttcatgtgtaattttactttacacaacttatttaattcatcaagtctagtttatgttaaatcaagttgtattttcgttcaacaacttattcacaatttcgcatttaataagttgtttatataattaagtaggtaattataaaaaatagaatttcatcgtacatcctccaaaatcccaacatcaacccccgatcccaccctcttccgaagaccacttttaataaaagcttgagactccaaaatgctcctccaaataaaatttggattggcacccaacttagcattcaaaaacgaaccatgagaataatatctgactttatagattcagccaacaagagaattggtctgcgtaagtagtcgccaagcttgttttttcaataatgttaagttaaaatccctcatattttgaaaccccataccaccgatcagtttatgagcactcaactgatcctaactcatctattgaatacccttagacctcgagttcgacaaaattttttaccaatacttattcttaaaatgcaccatatccgcacatatataattttttataatatttaatttattaaatttgtgtgaagtaatgagaccatgtcacttatactcattaaaagtttcaatcaacatttaacagatgtatttaacaaacgtcatacgtgttaaatttacaaacagaaataaaaattagtgagtattaccaagaaaaaaaaattaagagttaagtacataaaaatataaatataagacaagatttaaccacaaattacccttaaaaaaattattacttttaatttattaaaatttgttgtgtattaaaatagataggataaaagccattagactatgctctcatacttcaaataaacttcaatcttccataaaagtatctctaagagcagatttttttttcgctcaaaaaaaaaagtaaattgtggataacgaaatagaaatacaacacaaaagattcgtttatttatactttgccctgatttatttaatttatgttttttaaaaatgaaatttatttatttataatttcatgcttaaaaaaaattgatggtgaagtggtcaatttgcaaagccgcttttgtacactcggaattggaccatgttacatagtgactgaaatctaaattgttgtatggaatattggaatttgggagtaatctctgaataatctctaagcagcctctctcgattgacaagctaagctaagctaagctttatccccataggtgtatgtaaattaccacatttacatcacataatttacaacattggaataaaccttctgcaatcgagctataacatacacatcacttgactttgactttctttctttctttctaaaacaactcaaactccagaagctctcctgtggctttgcattccaaatacttgctctctgtttctggaggagctaagctcgggatttcaaaatccggaaactctgggatttctggtggaactgcacatcgaattaatgcccagttcaggccctcaaagaaaggatgctgcttaatctctgcagctcctttctccgatccaaaccgatactcgggttctttaaccaacaaccgtttgatgagatccatcgcctgaaaactaacgatagaggtgtcgggaaacttaagggtttgcaacaccacattggctaatgtttcttcattgttgaggcctttgaaaggtgtcttgccgtagagaagctcgtaaaggaatattccaaaggtccaccaatcaactgcagctccatggccctctcctttgatgatctcaggagccaagtactcgtgggtccctacaaatgaattcgaccgggcatctgtaggctccgccacaagctgtggcaatgatcttaccagggcggcatggtcaatcttggcctttcttgcttttgcactggcaggtagaaaccttggactaaagcacgggacttgacaggtcggttctatgcaaaaaggattgacacagctagaatctgtacaaggaccagaaatcctcactggatctacatcggaagaagattttaatagtgttggactgacgctacaacgaagcgaaagatcaaaatctgtgagcataatgtgaccatcctcccgaacaagaacattctctggtttcagatcccggtaaacaactccaagcatgtgcaaatactccaaagcaagtagaacttcagcaacataaaacctacaaaacataacaagattcagagttaaaaccaagaatgatttgatatagatatacatgaatagaaagaaccatccatatttcactttagcctattttttctcatattagagtctagcccttagctttgacgatagaagcaatagacaaacgttggtttcaatttcccattgaaaaacgaaatacttggcaattgattttgagatggaaccccatgattctcaacatggatgtgcagctcacaaaaagcaacacaagaactgaatcttaaacgacaaaataacgagtttaagccccgcttgcaaatgcataaacaaacataaagatatggttatctatacataaagacatacatacataatacatataaagtttttaacttaaatgaagacagttttccatatgtgttgcttgcctttaatatattgcttcattgcatataatatcacatagagtatttgtaaagacacaaataagaattgtatggaattgcaccttgctgctgcttcagaatagtttctaccaggctgcttctgccgaaggacatgcagatctccaccagggcagtactccataactaaacatgataaattatctgatgtaaactgagcatatagtgtaggaagaaaagggtgatccagcattctcaagatttctcgctcggtttgagctctaggcatcttcttccgcctcgccaaaaattcattgtccattacctttatcgcaaacagacaattggtaccaattagctctgcaagataaacagtaccaatgtccccacaaccaagcttctttataagattgaattgattcaggcccaagactccatcctgtatcacagcatgacgaactgcttcccacctcacatccttcgacatgtgaggcctgttgccacaacttgacccactaagaatgctctcatcactcatggttgtactactactatactccccttgactgctttgtgagaactcaccaatgtctcttgatttagagttctttttcgctttaataattccagctccacttttaacacggttatcagaagtaaggcctggtttgtttgtgctggagttcacagtagtagaattcacttcggaattaaaactggtagattgaggtgacaaggaaacttgactggactttttgcctgcattcttcaaggtacagtgacatctctcgcaaactagctggcctgatgaaggaccggactttgtagctgattcgttaaatccgctagatgcactcgcaggagagcttaaatcttgcttaattttcttcttaattacattcttgcttctgctgactggtctcaccaagcgtgcattatttcttgatatcttgcttactctgctcacactgactgtgctcgaagaagaccctgaatgcaacctgactttctgccctgccttttgagctgatggcttatttcttaacctagttgactctggaattttttcaaccgaatccaaacttttgtcgccatgatgagaagatgatgaaagttgttcacaagtttcgtcctcttcttccattagcgcagacttaattgtttgaatcccaacattctttgatgtggaagtactttcattttgtgttgatgtagccccagaaatattttgggttgcggcggaagcagttttacccgattctaaactgtcaacaccacaatcagaacaagatggagaaggttctgatgcagccatctctttctgcaccagctttgtctgaattccaactttcctgggtgtggaaacactttcatttggtactggggtactcccaacactctgtattgctgcaaagcgaggagaagaatcaacactcatgtttggagatttcatcttggaaattcgaagatggtctgcagttttcgctaaagcatttgacatactttcttctggcacaagagatatctcaaccatatttccccgaccttcaccaaaccgaggactagatttacccgattcaagtacaaccgaattgtacaatgtcttgatccttccagcttcagaggttccagtagagccgcctgtcatctttgataaccgtttcatagcagccatttctgatgctttagtaagggaaagttcccttagtgcttgtttcaaagtcactggctcagaattcccatatcctggggaacgaggtacacccatagttataggcttctttgaggcattcttgttcattgggcttgatcctgcttggcttgaaagacccaaacctttggaagttttaagattgatagcatcaaagagtttgttaatatcatcttcaagtgaatccttgtatccaaattttagaacaggaagcttcagatctttgtctcttgcactatatccagaattcgataaatatgaacctttggtgtgttgacttgaactaggctcctcttctgcttcaacaatttcagaattaccaggaaatgaacccattattcacttcaatagattattcaaatgtagaactggaagagtgtaacataagtataaattatttgttttgtggtctaactgctcaacttctttcaatcaaaagaagatccaaaccctgaaaagatcaccaaaaaggaaaacattagggaatcttattttataaaaaacaacaaaaagaaacagaaaattaagaaatcaaacgcagattgcaatacaatagtacaagactgagtcctttgtttgtggacatttactcatatatcaaaattttcagcattaaaacacagtgaaaacaatcctttaaggctatatatataaaagtaaagtatcacaagaactcaaaatattaaagagacaaaatattccaccagaatccaatctcaacacttatttcttacaagtcaatactattcaatcaatcccaaactgacatctgcttggaaatgattttgtagctaaataaagttaaagcaataataagaaaagcaccaataattttaaggtgaagaaaaaaatcaataaagataaatcttaactatacattgtgaagcgggaccctgttattccttctacatattttcttagaaattaaattaagaagaagaagaagaaaaaaaaaagactactttgatagattcaatgcaaatgagcttgccgcttacccataatattttaccaacttcccttaaaaaaaaaatcctcaaacgaaagcattaacttcccaagtgcaaatcattagaagttaattaaaatcaagaagaaaaaaggaatatatgtaatacaaaaaaatataataaagcaaataaaaaaagcaactttgatgagcaaaacagtaggaagctcaaaccaaatcgtaaagctaaaatctgaacagtttcaactttactcaaaactcttacacagtacatgtatgtatacatttatacaagcatatgcagatcggagaagttgaaaggtaccagattcaagctgaggctttgagctacggttgaagttgagcaaatacatctgagggagaaaaaacaatacaaaaaaggtgtcttcggagatgggaaagttagagaaaagaaaatgcaaaaccctagattttggattggggtttgagagcttcaatggagaaagctgtagagagagagagaggtatagtagcttgtaaacaaagatgagagagaaaccgctttctgaaactctgtgttttctctttccatactggctctgattattttgaagccataatagtggacccaccaccgtatattttccaatggggcccactgtaatttttttatttattttttttttcattttttaaataatttttttatatatttttaagaaaatttaaataaaaactgaaaatcaacttaaatcgtaaccaaaatctacatatcaaaccacatataaattatcgagcaaataaaattaaaaatttttaaaaaattaaaaatagtatataaaataatggatgcttttacaatatattatatatcactttaaaaggattatactgatgcaacctctacctattttagtagtcagaataatttttttgtccaatttttttatattcctgtacgttatagttatttaagatattttacaaaattttaaaaaatttaaaataatttacgatatagaaacagtgttcaaatattttagttcgcacatatataaaataaaatagacacgtgtgcaatacactatttaaactatattttcagcgtattaattttttttttattttttaaacttttacagggtgtcttaataggtatagcatacaaaaaaatttgactaaaaattattttaaatgtaaaagagataaaagtacattaatatatcttttaaagaggtgtagtgtagaagttttttaaaataattattttttttaattttagttataaataagaaaaatgtgctggtgaataatttatgactgtcactgtcctttttcttcattttttgaaagaaaaaaaaataatataatataataaattttaaacagaagcaattattagtttcaaaaaaaaaacagaagcaattattttggattgtgaaatttatgataaatatagtcaaaatgagcaggaattttttattaaattcagtagaagaaaaaaaatgtgttaagagatataattacaggtctgttatgtagtggatgtcacttcaagagtctccaactaaccccaactaacctctgtaatcagtggtaatcattttaattggtagattaattgtccaaaattataattaactattttttattttatattatttctttttgaaatgcaatttttgttatttactagggtgtaagtttgttttgtgaattaatttaattaaatatatatttactttttgtattaataattttgtttagaagatagaaacaatatgccaagaaagcaaaaataacattaatttgtttattataagaatatacttttgaattgacttgtgggatcaatataatgattgatatggtaaaccataatttaaaataatgttacccattttttaaagcaattttggatgaatgaaaattgtcaattttatgatggaaactctaaaagaagaataagatgaaagaatgaaagaaaaaaagaaaagaaaaaaaaaaggttggatttactgaaatatcattttcaaaaattcaacaagtgactattgtttgagaaacattgtgcaaatcaatagggacatgtcacatgttcaataaataatgtatatataacataacccttatatattctcagatagtgacgattttttatacatatattctacataaataagaaagacatagtaataatactaacaaagaacaatctcaataataacacctcaaaaaaaaatgagtacttaataagtttcattaaatatatcaacagtggaacaattcaaagaaactataataatattaagagcattaatattaagagcattgttatttgttagtgagtagtagtggtgtccaacactttctataagtgttactttataattatttagcggtattctctaaaatttattttcttaagttatatgagacccactatttaattacactaatattaatataaccctaagaaaaatactaagcaccaataatactctttaataattctttaatattaagtaccaataatagtttcgaaaaaaataataataatattaatagtccaatataccaaccaaaatatttgatcgaattaatggtgctccacaacttatacatatattaatttttttttgttatttcatatatgattacatacaaataaatctccacgtctaaaaccttaatgcattattgtcacacacgcgtatacatttgaatcaatatatatggtaatttattgggtaaggttttagtattcttaaagaatggtttggtaaattgtttatgattttttttcataattcaatatgttgtagttatttaaattttaattttttttgaataatttataanattaaaaataaaatttaaatatttgttgcttatgatctttttatatgtataataagtaattgtttgaatattatttttgatattgtaagtcactaagtcatttaaatttttttaaaaatatacaaataatcctaaatgtctaaaacgttaaatatacactatcatgaaaaatattgattaaaaaaatcttttaaatatagaaaacatatggagatatactattacactctatgaaaaataaataatttaagagtattactattaggtatcagcagtgttcaatattttccataagtaaagtaggattttacgattagttagcaatattctttaattattttttaaattatataaatttgatacttaattatactaataagtaataacagtaatacactcacgaagatactggacacaatatactttttaacaattctcatcaacaaatttttgagaaccacaatgagataggttttcttttcttaatttcctttttcattttttaatgctttttttggttacaaataaaagttgtttgaatcaataattgctgaatgaaggatatgagagtgggtaagagtggagggtttatgaggtgcaaatgagaaatgagaaatgaacaaaagagtttctgaccaaatctggcttctttcgaattatgtgttcccccaatgactcttctttgttatggtctcaatatcaaatttgaattgcattgtattgcacccttcagtccctaccccaatatgggttccattttctaaccactaaccagggcagggcccctatctattcttatatataatataccctattataaatatctgtctttagattactatgaccttttaaaaacctttaccattttgttcaattaatgtatgtctctaatattgtcgttttttgaagtaaatgagatttgtttttcttcattggaatatcatgttactatcatagcacataaaatgtaaatgatatgcaaatctatttataatttttctactcaagacacttcatgaagaacatctataatagaataagtgtctacatgttagggtgga

SEQ ID NO: 16360 - DNA, 3337 bp, Cannabis sativa
ttcatgggtacatacaaagtcaagccgatcacactatgttttacaaacactcaacagaaggaaaggtagccattcttatagtatatgttgatgacattgtactaattggggatgattaattagagagactaaaagagaagcttggtgaaaaattaatttgaaatcaaagatttgggtgggtgttctaaaatactttcttggaatggaatccgctcaatccaaggctggtacttttgtaagtcagcgtaagtatattctagatttactaagtgagacaggtatgttaagttgcaaacctgttgaaactcctattaaacccaacattaaattacacaaccaacataattagttaatgtgaaggatcgggagcgttaccaaagattggttggaagacttatctatttaactcacacttgtcccaatataacattttctgtgagtatggttagtcaatttatgcattcaccatattcagaatactttgatgttgtctacagatttctatagatatctcaaagggacaccagtaagagacctcttatttgaggcacgtggacatttgaaaattaaagcctaatgttgcttgggctgaaagcataattttgtaggtggtaatttggtcacatggcacaacaagaagcaaaatgttgtaacaagaagtagtgctgaagctgagttcaaggttgtggctcatggcatgcgtgaaactttgtggataagaagattacctcaagaactaaagtcattacaagtatcacctatgaattcatactgcgataataaagttgcgattgtaattgctcacaatctgatgcttcatgaccgtactaactgttgaagtggacaaacacttcattaaagaaaaaattgaacaaggcttggtgtgcatgtctatattccaaccagtgaacaagtacaaaatatcttcacaaagggactctacaaaaatatagtttgattttcttaacggcaaactagctatgggagatatttttagaccagcttaaggggagtgtaaaaaaatcagtatttattaggaatgaatcttgtaaagctgtaatatagatttttaggaaagagatcattttcctctttattctttgatttgtttctttttgtatagactcttgaaatctttatatacatgtttaatgtatagaattcaatatcagaaaatataccttggccatttttgacttctataagaagtagaccatttgcctaagattagctcaaagcaaagtaagtcaaacattccaaaacaaatcatgaaagtgtcccaaagaagagttttttttgggtcaaaagcccaaagaataaatgaactgagcatatttacaaactcaactagagacacagatcctctatctgtttatttgtccatctaataaattgctcactaaatcatattattttaaaacgtaataattgttatcaaattgtaatataagaatatacatttgaatagacagaatcagacaacaaaattgtacagaattttctttctttctacagctatttcataaatctctctaatgattaaataaggaggcaataaaacttgattgtggtaattggagagctcaaaacttctgtcttttctatggctctttgtttttttatgcatcacagaaaatgtttgatgcataaaaaactggattaatcagcctatgctaaacttctaaactacttgaattgaaatcttgggattctccactaggcaatatcacagacattttaacacttaactagaataagattatcatggtcttgctaatcctgtttttttcttcttcgtgttacttcatctatttcagcagtatctttataatattatataattatatccattaagtcaaaatttgtttatttgtatgtataccaataagttctgtccaagcctcaaaattaacaaacaaaagaacaattgtgagatgacacataagagtaatttctatcaaagaacctgagatttgtgctggcatctctaacaacttcaccatcaattgttatctgcagattaaaggagctgagaattaccttaaatgcggatttgaacactaaaaaaaacactttccaatttttcaattatcgaacctgtccattctgaattcgctgcaaccaactgtttgttattagtaattagttcaacatgaacaattgaaaacaaagaaaatgcacaaaaaaaaaagtaagtaagaaaaaacatagtaaacgtgcataaggatatcatataaatatatttatatacttcacaaaaaggattttcatatacttagttcatcttctccagtgaaattttttggaggaggcaaacagatcatattttctgagcaaccaaacagacagctgtacgaatcggagcagtgaagacttacccttgaagaggagcagaattcttgtatttcttggagtagaactggatcaatgtcaactctgtaatttaaaacaaccaagagacaacaaaattcactttccttagtttccattttcatctacatttctcgacaaccaaacaaatatgtatatatatatatatatatattatgtatttataaatgaacaaaaatgaaacaatacctgaatcggtggcgcgaacgacatcattgtagaataaaccgtcgttaagatcgggccaaggtaaaccgaatgttaattgcgaagcatgagatccttgggaagggttagacataagacctctgcataaggtggtacggaataatctaaaacgcaggtaaaactcccttccctctttccttttcttctttcagaaaattgttagaattaaaatggtgtctgatacataagtataatatgttatatgtattaatgtttatataatgtgtgattccatcccaaaaagtcttttcctgagttgtttttttttttttatttttgtctttcagtgttatttattttaacaaattaattaaaaattcacagcttattgttgtttagtgtgctaataacttttttactttatctatttatcctgataaaaatttcagaaaatatatcagcataccatatcatcatctatatataggatctcaatcaaatgtggggcaacaagctccttccatggaatggaagtctatgataggccagttctgaactaattctatttttttgttggtgagattagaaacaccataaaattcccagttaaggattccaaaacaaatcatgaaagtatcccaaagaaaaggtttttttcgggtcagaagtagggatgcacacggggcggggagtgtcatccccctcctcgccccgtttaacattcgggaacaaaatttaattcccgttcccgccttattccccatttagacggggaatc

SEQ ID NO: 16361 - DNA, 5019 bp, Cannabis sativa
aatatattttgtatattataaattaattttttagacttaactcaaattttctcagtaaccaaacagaggccaggtaggatgaaaacgacatagctgcttccctcagcatatttgatttcctcaatcttatatatctgtgtaacttctttaattataccattggctgattcaaggttactgagaatctctaattacttaacctctattcatcagatggctcaaaagtgtgatttagtattgatcatctttttgtcataatgaatttttaattcaatttcttatggtactcattgtagagatatcccaggcagacaaatattgacctcctttgtctctttgttgtattggttattattttatcttgttggtgggaggagctttttgtgtagcataagttcttggtaaaggttctattttgttactttgcattagcttttctctgcaacactccaaaactctttaaatttacttgaaattagttgcagttggagtatagccaaaatgaaacaactgtaatgtttcttattactattgctagttacatcatctcttgtactggccatcttttgacttgcatattgatggataggaatggttagggtgtatattgtcacctttgaaataatcattagaatataatgtctttaaaccaactataagttgtgaccctttttgctccttattttgtcagggtactttactcacggatccaaaaagtcggtcacgcttgtgcagtcttgtccttttagcttctttgctttgcggtgcttactttattggcaatgctttcattgaaaagcaatacaaagaagtatgtataatttctttaatatcactagaatatggtgtttcttagtgacatgatttcctataaattgtgcttgtattatgctataacctgtacaagtctacatgttagattagcttttgtggacatggaaaaagaaatatccataatgtattatttattatgtgagtttggggcatcttcatgatatctaattataaaaagagcacttactggttataggtaattctgcatctcaatctgtttccagttcaaattgctaaaataaataaaaatctcagcaataattgagatcgtatctcagttatttttacaagggactgctcctcatgctcttttatattttggtcacatgggaatatgaatttgtatttgttttgagtgtttatggtttctactcagttgtgaatttagtaacttagaaattataataatcttcctggtcataactatgcaaatctcgcatgcagagattggcacagtggaaatttagttatggattgcagaataatagaccggattgtcgggtttgtctcttgtctctattggattgaatttttttttatttcatagtacttttaaatgatttcatctttttctgtttttgatgtatcttctcctctcaggatcactgttttcctttggaaactgttgcactaccgaaaggaattattgccaaaacttcaaacttgcaaatgcaacccttgtggggctctactataaacagtgtatgcataacttgctgaatttctgggcaaattgaagtgttggattgtgggacattgactttctttttgaaaagaaaaaagagaaccaacaacaaaagataaaacttgagagattaataataataataatggtgtaactaataagcaatttcctaaagatatggcaggttcaggttttattgttcatgatctgtatttatttatacctactctctaagtcaaagcattattgtttcagaaaggctcaaaatcttcattgagcttgctggccattgctgttggaattaatcagaaagaagtagtgaacaacattgttaaaaaggtgctgctcactcttttgatgccttttctgtatccagaacttattgtcatgattctgattagtatctgttctatattgcagtttccttccagtgattttgtggtgatgctttttcactatgatggtttcatggacgagtggagggacttatcatggagtgatcaagcgatacatgtgtctgcagtgaatcagacaaaatggtaatgttaattctttcaaactaaaaatttttgaaactaaggtcaatcatgggaatttaccactatactgaatgaaacttcaaacaagtctagttgttttgcgattttttttgatatagtgattttgtaggtggtttgccaaacgtttcttacacccagatatagttgctgagtatagatatatatttctctgggatgaggaccttggggtagagaattttaacccaaaacggtaagcatgaccagtattaactgctctgcgataaacttaactggctactgtaaatgttgacaattagaattttctgccttgacgtacagtactactgctcatatacaaatgtacatatatgtgtgggatctttgaaaatgtttacaagtctaaccaacaaactgtgataaatcaactttagttaatggctcttttttgtttttcaccaataattttcaaaatctctactataataagtcaagagttagttaaatctgatgcaacttgttgcctagatacctaggagacacttgatgttaaaggatacagcagtctggagtatttccacctagacacccaattgagtccaagcactgcatgcaatctttatatcaatttcaatttttgaacacataatttaagttttcttcagtgatgattaagtctaatattatattacaagttgaatttattgcagatatttatctattgttcaaaatgaaggactcgaaatatcacagccagcacttgatactgttaagtcagcggtgtatcatccaattactgcccgacagaggggaaaagtgcacaggttggtataatgtttttttgggatataggaaattaaatagagtaggattgcacaacttctatgattgataacatctgttttggaactcatgtcaagtaattatggaatttttactttcacgtgagagtcaatcttaaacttcatttaagtttggattgtctatgtggtaccaaacacttagcagctgtagtgtaaaagtgataggttttttttgctcttaaggttaacagaatggtttctggtcactcagaagcacacgatttactacttgcatgttataatgtatccattttcccaatatattttacagaaggtactataaatttaaaggcagtggaaggtgtgatgacgaaagctcttctcctccatgtgttgggtaaataatcagcattatttagcttctgattgatatataattacgttagattgtgtttgattgtaatatgaccaagaaatttcattttataaaacctgtaaacagttgggtcgaaatgatggcacctgttttttctcaggcagcttggcgatgtgtatggcatatgatacaggtatggaatttactgtgagactcaattacaaaccaaagttaagaagtcagtatttcttggtacaaaacaaaccaaagaagcattgagtctgtttcttctttagatatttaatgtttttgctgcaaatttttgctctacaaattttacttgttgagtttatcatatcattgtaaggaacttgtgttttggtgacttgtttaatattctgtatgtcaagattgcccttcaaaaaaaaaaaaaatgcataaagtttcagcataccaaatatattccagtgtatacaaggaaaacagtatttcttggtagcaagagttattaaaatgcataaagtttcaactaaacattttgatctctgcattgctttaatcaatatagtgattattctttatttgtttattattcctgcagaatgatttgatccatgcatggggccttgacatccagctaggttattgttcacaggtaaatttccattctacaaaatttcattcatgggctcacttgatcgtacttaataatgattggacttccattcagggtgatcgattgaagaaagttggtgtggttgatgctgaatatgtggttcatctcgcccttccaacactcggtgtatcaaatgcccataaggcaagtgttgctgtcataaaagaactccttaatattttgtgctttagagtttatttgaattgcatctatagttgggggacatgtaaattcttttcaagccaagcaattctcttctataaatgtattcaaatgtgaacaatgttaaaaatcgttacctggaaccttgtaccaaaagcattgtcggtactctttgtaagtggtgctgcaatagcctcgtgtgcttgcgatgcagcaatcaagcatagaaagtaatagtaagacattgtttcatctatctcattctcatctgtattttttaattgcaggctgcatctggcttggaaaaggttgataacagaggcaaggtatatatatatatacttgttgatattccaaatacttgttgatgctctcagaacttttacctgacacttttttttattatgttctcaggtcaggatgcaatcttctgttgaaatgaagatctttaaggacagatgggacaatgcggttaaggatgatagttgttgggtcgatccgtatcagttgtcagtaaatcgaactagcccttaattttatttatgacttccatccactgagaactcaaggttggtagttatcctgcataaaagtgaaatgcggaaatctgcacagatagaaatacactattgttctgacaaaagagaaactcaaacagctgtgacaaacacttttaaggcttacaagaaacattgcaatgaataactgactgaagcgctgtatttgagagtgcggaagtattatctgacatccaccgtgagcagccattaaacatgttgcaacttctcatgtattctttgtaaagtacataaaatttactttatagataggtgaatcctgcaaggtgagagtgagaaatagaagatctatcattattttatttatttatttggaacttttggtgttctgattgtacaatttctgtgtatagaaccctatatctgttcaaatgaagattcttgttt

SEQ ID NO: 16362 - DNA, 1785 bp, Cannabis sativa
aacaatctcaatagttcatggacaatttttaacggccaaaaaaattcagagggcatgatttggtatatgtgaaaatttcgggggaaaaattattagccaatatatttaatgaaaaagagcatgatgctttatacctggaaaaacttacctaaaaggtagggattgatgggattgggccacaactagtaagataatagtgtaaacacttttagatgaaatgaaatggttggagcttcaatgaaccacaggtcaagagtttgttgtggaatcttgggtggtttggtacagtttagtccacatacaacataccatatccccctatggtccctaggattaatggttgtgaatgtgatgttgatacctaactacacattgtctttggattggtcccatgccatctcttcccaaaccaacccagcagccaccagagaagtactaagataatgatcagactatttataggggttagttagttggatctgcaatgcatgattgattgcagtaagtaaatttggtggcctaaattttactctacaacatcaaattttagcacttatattctttattcatcttctataaatgtgtcccaaatcagttgggtttctacaaaatattaaaaaattaaatatgctttatatatcatctatctaaaaaaaatagtgttttatcaatttttgtaaaatgcaaaatgttcacatttttgctacaattattctacaaaatatagaatatattttctttaaaatattttaacttaattcatctttcgtttcctcattcttttgtataatatttaagaagctaatgtgagtggtataaattaggcaaaaagagcaattatatatgagtgttactaagttgaattttatacgattgaaaatgttatgattaatcaatttataatgtagtctcacactttacttgcacgataatataattgctgaataaaaaatgacgggaaattgtaatattgttgggcatatattcccacaaacaacgaaatgattaccaatcaaaactttggagtctgtattcaaagaacaaatatcttctgcattaaggaagaatttatataaattaaactaaagaaataaattaaggccattatttcaaatatatatactatttttctcttttcagatattattaaacaactaaattaataaaggctgctgaaggatcggaccgatacccttcctacatttgccattttaaagctaatttcgtagaatttttattataattctttaattcaaataaatgttttttaatgaggaaaagaaaaaccatactaattgattgattgaaactcattcattcaatgtaatgattaggaaaaacttgtttaaaacattttctttttcaagattagaaaaaaaaaaaaaaaaattgctaagcatttagagataaatccgaaaatcgaacaacacacctgggagaaaatcatattcaaatgagaattcattcagaaagaagaagaaaaaatatacaggaacatgtacaactgagttgtgtgctattagaattgagaataaatacaaacaaatagtgtacattatgttatttttgctgtatatttataaaaaaagtccttaatgttacagaaaagaaaatgtccgattcaaatttattacctcataataacacaatttgtagtatcataattttatatcatgcttgatgatgattattgttaatttagttagtgttatttacttttctttgaccgcagtatatttgatgatgagagtaattctccaacttacgtaaaaaaaaaaaaaaaaa

SEQ ID NO: 16363 - DNA, 6533 bp, Cannabis sativa
actccactgctatacttccttaggatctcaaaagctgctaatgaaatcggacactctttctccttcttggattcaacatctgaatccacatctgggatttcactaatcctgctatctcctccaaacatgtctatagtgagggcaaatctgtttgaaaagacttttatcaaatgatgtttaagtgaattgaaaatcaacaccaaagctaacttcttaaactatataagaataaagaaatgaaaagcacataggaaaattccttaccttattgacttggtcagaaagtaattcaagatgatttctcatctgatgcacatttatgctgttataaccaattataatccttggttttttaccatgaaggtgaccaatagtttgattataatattacattccataacagtattttaggtacattcaacagctttgtcacttagtcttagttactatcaccacattttttgtactttgcagtgtcctactcactcactacaccttttacagtgttcggctttgtacaccttaaaaacaaaaacaaactactctttaggtgagagcaaactttttagtttctaacaacaggccaaggtgtgtcattattctacatagtacacagtttttttgtcttcttggtttctcattctctaactgtttcatcatcatttttaagtgctaattattatgtaaaaatgatgaataaataaaagggaaaaaccccatcatataacaaactttcaagagcagtatctattggtaactatgatcattacaaaactgattaaatgatgatcaagcagatattgaaacatgaaattaggaatctagagctaatatctattggtaactacgatcattacacaataaccttggagcagaatctatcaattcgaaagctctataaccttttaaactagtttatattgttacatcgatggaatctccaaacagaaagagattgaactggtgtacctttccaacccatcattagacattttccattaatttcaagattacagtgagtcccacttgggaatctgtcagcaatgagattagcttggtatatagacgaaggactcaactcgagttcttccattccaaacctggcaaagaaagctctccatacatcaatctttacaattcttatcttcctctcctctccctcagtggccacaatgtttctgatagcctcaaaacaataagttgcttcaaacagcattcgattaggatcattcctttccatacaagtttcaaagcaatcaaacattgtgccatagaagaaaagggcttcaacaaatcggttaacaaaaactggcgagttatggttaccttccatttcaattaaaaccatcacacatggatttaagttccttaccactttcattaaatgctccaattgatctggctctgaaagaaagatcctaagtgaatatgaagagtagacagctactgtttcattacaatctagctcgaaaaggtcttctttaagatgggacatgtctggtaccatcactatcttaaaagacaaaggtatattcattgtcttggcgaaactcaacaacctctctcctgtttcctcaattgcagatcttgcagaagttcccacagcagtaatcttgagaagctcgagttgagattcatgacaagaagaagcaagagcttgcattaggacagtccagtgtgaaccgctccttattcctagatcaattatgtgaaccttcttcgctttcctgacattctcaataatggcttggattcctgcaaaaatagccagctgacagaacggaatattctggtgataggcatggagagagggatttagagtcatgagcgccttatcaatatcaaaccgctcaacggtcagctgaacagtcttcaaacttaacactataagtcgtccggtttctttgtcaatcctttctctaagagcttgacataaatagtaaaccactctttgaactggatttcctgttgcagaacataacagctcacattggccgagcaatttgctcccaagttcaaactttttacagtctactctcgcagcacaagaaagaagcaactccacaagctcaacgtttttagtttcttctatggaaagaccataaaaagatgattcaaaagggtgcctgagcatcatggaaggagcattgtcagcagcatgctgggaatcaaaacatcgaataaattttgttcctgcaattctcaaaatgtcatctgttgacaatttcatccctacattgctagctgtattaccataacttggttcctccataactctctctctcttcttcatcttctttactacactactactactgccccttaagatctcagaagaagttaaggaaatggaacattgtttcttcttcttcttcttcttcttggattcaacatctgaaaccacaactgggatttctccaaacatgtctcaagtgacaacagcaacactgtttaaaagcaaaatagttttataaacttcattatatgcttaaaatggtgtttaaggaaatgaacaattgacatcaaatctagctacttaaaatataagaaagaagaattgaaaagcacatagaaaaatttgttaccttgattgacttggtgagaaagtaagcagagacagagaggctctctaatgcatatgatcatgttgttatataactgatataatccttgttttttactataagagtggccaatagtttgatcactatattatattatataatgtaaagccttaagttgaaattgatgttttggaggagtgttcaaacgatttctccaaagaattattttttgtccaataaaagaaaacaagagctttagttcagtcaacaactataaaataaactctgtataattctttagtaagaaagaaggtataaagactaaaatttctctaacttcatgtacaatacgcgttttgacagaaaagaaagccacagcttttttctttcatatacttacatataaaaatatatactatacagggtaccactatagtattattttagaggaagaaatactgtgtaattttaggatgtcgaaatcatgattcaaacagtttattctacgcttgtgtaataaaacaagcgtcctgcaattagttgtttgaatcataatttcagtattttaaattattcgggattttttgaaaatttattaagaaaatactaaaaataggtgatagtgacaaaagacaatcactatccccacagttttttctattatttgtatatgtatatatatatgacaaatccacaggcacagggcgatattttcagttggtcaaacagctctttctagggacatttgtcatttctgtaattcctaatattttattgctcttgatctcattcattcattagtaagctttttgttttgttatggtctttgtttgcatcgtttgtcactctcatatcatcttttttaggtgctaatttttatgtaaaaataaattaaagaaagagaaaacaaacacatatacacacacatcatacaataattgtattctcagttgttatgatgtggtctaattatggcaatttaagaacataaattgaaaaaatcaaattgtacaaactttgattaaatgatcattataatcaagcagatattggaaaatgaaatcagaaatgtagagctactatctaatggtatcattacacaatgaacatggagctgaatttattatgtgaactgtaaatgtaaatatatgtcaaatttgaaagctctgtaacattttgaactggtttctatttgctacatcattaatggaatctccaaacagaaagagattgaagtggtgtacctttccaacccatcataaggcattttccattcattccaagagtacagtaagtcccacttgggaatcggttgacaatgagattagcttggtatatagatgatggactcagttcaagctcttccattccaaacctggcaaagaatgctctccacacatcaatcttcacatttcttatatttctttcttttccttcagtggccacaatgtttctgattgccttaaaacaataagttgcttcaacctcagttcgattcggttcattcctcttcatgaaagattcaaggcaatcaaatagtgttccataaaagaaaagagcttcaatgaatctgttcacaaaggctggtgagttatggtttgcttcaacttcagtgattaccataacacatggattcaagcttttgatcactctcatgagtgactccaattcagctggctgtgctatcattcccctcaatgcaaaagaagagtagactgcgattgtttcatcgttgtccaattcgaaactatcttctttgagctcaaacatgtttgataccataattatattgaatgagaatggtatttttagagtattagcaaagttggtcaaccacttaccagtctcctccataacatgctttgaagaggttgcaatgactgttattttgaaactttcaatggggaagtactcatggcgagttgctagagcttgcattaaggctatccattgaacaccattcgcgattcgaaaatcaatcacatgaactttctttgattcagaaactttctctatgatggcttggattcctgcaaacttttccacttgagaaagaggaagtccttggtgaaatgcaagcttaggctcatctggtaccatcattgccttgtctagatcaaaagattcaaggattctccccaaaccctttgatgtatttcttccactttctttatcaatcttctctctaagagcttcacagaaatagtatgcagccctttgaactggattacccgaattcgaagccaaatcatcacaaaaatggagtaatctgcaggcactatcatattgttgacacccaattttctcagcagaagctagaagcaacccaactagctcaacatccttggtctgttcaaagttaaggccagagaaagaccaattgaaaggatggcttaccacctgttgcttggaataggactgaatgaatctttcaccagcaaacctcaaaatctcttcagttgataatattctgtgatctgcagcagcaacatcagccacttgattaatattattatcattacttggctcaatgattctttccccattcaatcgtttaaaccccttttcatgattgtttaagagctcaaaagctgcaaaagagaaaggatactccttcttatccctcttgcctccaacaactgagatcacagttgggatatcatcactaacctcctctatgcatttttcaaaggattttaagacagattcatattgaggaatttcatcaaacatgtcatagacagaaaatgattgttgttgttgttgaagctgctgctgttctggtacctgagacttggataaaattaatccttgttcaaagtactcatctgggtaataaccataatctggagaaaatgaatgaatcccaactgggtcataatcataaccccattgatcttcagctccataaagctgaactttttccacaattttattatcagtggaacaaaagttatcttgaatgtccccataactaaaatcctcagggaagaacatagaatcatgcaattcaaaattgaaatccattcctttctgggttctcttctgtctaatcaactaaataattattatgataataaaacagattatatatacacataatattttatatgtataaattataataaacacatcaatgcaattagtgtgacaatgataatgatgtttttgatgttatcaaagacaaagatggcctgctttatgttgtttcaatagtttatttatgtgaatccaattggattaagattgagtatcaaactatatttttttaattagtaaataaatttgaatttacttaaatattgaagagattaattatgttgaacttgtcaaccgatgtcaccaatggggattcagacaataaattgttttaagaagagtgtaacgtgaagctgctattacaatctcttaattagtttttatatccgaaaatatatgttggaattctttttaaaattttttttttataacagtatttgttatagttacaatattattcttataaatttttgaaaaatttaaaataatttaccgtgtcgaaaatatgtttaaagttttttaaacatgtgataaattggaatattaacaactttacttcagtactattacagagatgattttgtaactataaccaatactgtcatgaaatattataaaaatagttaattgcggcaaaatccttaatactttcactttacttgcacttaactcccaaaactcaaattttaatggtaaaattcgcaaaactaacaaacggttaataatttaccgtttccatccattttaagtgttaaatgtcatattggactgtacatgtgtatgtctatatagatacagtgtacacatggtacaattttattgatctacgtaaaaaattatttaaaaaaaactatactattagtggtgcaggatgaagaaaaatatggtagaatttgtatcccgaaaattactttaaaaaaacaaaaaata

SEQ ID NO: 16364 - DNA, 4412 bp, Cannabis sativa
  modified_base (1074)..(1091): a, c, t, g, unknown or other
ggatcattagttttgtattccattactctagatgaataattaagaactagctaataagaatgaatgtccattaacaaaaacagaagaaacatcattacagacgtagtacgcacttgaaataatgagtgaaattatatgattttgatggtgatggtatgtctaattgggttcctagatggccaaaaaatactttattttattggtctaccttatgtaattgatatttttctttccttgaaatttaggaacatgatggaaccagctgttgttttggtatgcctgtttgtaggagctctttttgtaaagttcactgttcttgagaactaggtaaatgaacgcttcgtaaacgggagaagtttggtgtgccctttttctaaagagtttttttctttttcctcattaaaaaaaagtttcttttgaattctttctatgtagtctccttttacatgtttcaagataatcaaggtatatataccagacagatagtcttaagtactgaaaataaaatttagcatagcattcgattctattatcattcttattgatacttgttgccgaacataggaagacaacctcacgtgtaattggattaaaagatatgagtcaaaacgtacaagcaggaatgaaagaaattaggagaaaacaaggtgaatcaaagttgtaaaaaataattgtttaaaaaaaaattgttaaagaaaaatagaaaaattactattggaacagcgaagatggagataattgggcatgtttggcttagtttctaggcttagtttctatacgcttttttaaaaaaaaaaaaaaaaaaaatagcattaaaaagatccttttaggactgtttcgataaaaaaatgaaaagataagtatttttggaaggagttaagatttgtaactttctcaaaatgatttctagaaaatattttaaaaattaaaataatttgcatattttttatataaaagaattttttttttaatgatatccaaatacttagaaaaacacttatacttttagctataaggtggaatttttcccaaacgatataataactttctacattattattattattactattnnnnnnnnnnnnnnnnnnattattattattattttgaaataagcgtgcataaatatcattaaacattgcaatcgttacaaaaaatattgttcggaaagaaagaaacaggcacacaataatatcgattgtgggtaaaggcccacttaaccacattatgggcgataaaattacagtttctactaacaaaagaaaaattacactagtaaaatactgagagagtctaatacaaaatgcaaagtagttactaatctcccaacgaacctcctgtccgctgagcgagttgataaccacccttaatcactctccactataataaaactccagcctttatctttagctactttcatagccaagcagcaggctgcaacttctccacacagagcatcagtaaactccatccttgtcgtatgcaccccacacaccacaccaaggtggtttctcgccacaaccgcgatacacgtgctttctagacctactttaacatcacaatttagcttaaaccacctgagaggaggaggctgccattcctctactaggattggagatggagaagggaaaagagagtatcaatgctctggaacttagtgattaaactcgacctacggagaagctcgatcgtcactaagccttcaaccttcagttgctctttggagaaggccttgtattggccctctttcctagctatctctttcgtcctgatgctttgtgggggaagctcagcagtaaataaaaaaagaaaaatgctgagtcacacgcaagaagtagcagaatccaaaaacgagtgagacttgtagtaaattgttaaaatacctggtagttggaagctcaactaaagagacggcaccctattgatagggaacccggaagaaaagaaccaatattcccggagatcgtgggaacgctccgtttggaaaacgggacaataagagttcgaacgcttatctagtcggaaaaaccctaacttggacatgtccgtcctcatgggattggccttaacacaataaaagtagaggatttcctccggggaaggaacttccagtttattaatcttgcaaaatacataccacccagccaagagtctataagacaaggggattagctggaaggacataatcccaatttttgcaattatatgagcaaagtaagtccttaaagggatatgggcgccgctagaaatgtgggaccaactccatgcgctaaaaccatcaacactcgtggacgcagattctccaaaaatggagagcctgcgccacatcagaccaggaatgttacgaaggcctgcgacatcggagtatgcttgtggtccatctggtcttctgaaagcagttggccttttagtccatatcccacacagattcaaaacaaactcgggccggtgaaggaaacctccctcttctggtaattgtggataaatgttcctccgcaatagacccatcttcagggatggttcccaaaatctccacaagctgaggtgttgctattgagacttcggtttggtcttgtcctacaagaggtattccggcgatctgtacggagtccttagcggcggacatgactttgtccacaagagggtcttggttcaaatccatgggaggaagggtaaactttttcaagaaaaaaggtaaacgaatgaaaaggcgggatcttctttcatatgctcacagtctcgccgtaccacccaagttcggccctgactctaacctagaccaaaccctttcttgtcctagaaagaaaatgccaagaaacccagacaggaggttagagtacttggcaaaacagaaggaatagttagcgattccaaaaagttcactctaaaactctagccagttgatacaacgatcgcaaccagcctggaagctaaaagcctcctctgacgaagaactttttcggtttagctaaaggggaacaacatttgaaaaaagcttgatgcgaatgaggggtagacattgaatcaaaccctctaattctttctacatgcaaaagatggcaagaggaaaggaaaagaaaaggagttgtagagaaaaagtgagactttgaataaaaaggataaaaaataaggatgccgccacagacgatttgtatgttgaaaaggaaaaagagctccaaaagatcaacagcttggagaggtcataaagaatcttatgactaagaaaacgagaggtcccatatgctgatcctgggacccgtgaatatcgagatcgatcttcctcatgtcatccagccgtcagaggcactcttcctttcttgctaggcacgttttgccaagtaagaaggggagaaaggagcaacttcaagcgtattgcgtggtcaccacacgaaagatagtaaaaaccacgagtacccctcacaaggtacaagtcacttgtggaggcgtatgtgatcgcaagattatgacacgtgtccgcgaccaatattcaaaacaatagcaagcttccgcgacctaaagtctcttggaagaagaaaaaacaaaatgttgtgtccagatccagtgcaaaatcaaaatataaagctatgaaaatttatgtgagataatatggatatatcagcttttgactgaagtagaatttaagactttagtactagcaaaattgtagtgtgataataaagttgctcttcatacttgaaatcctctgttccatgagccaactaaacgcattgagattgattattattttgtttatgaaaaaattcaagaagacttgatctctacagaatatgtgaaaactgcataacaattaagagacatttctacacagattttaaattgggtacgagttaattatctttgtaacaagctagacatgattaacatcgatcaattttatttaaatgtattaacaatgttcgctcttcttttgcagtttatcatacttctttctttccagacgtgcctccgcgtcagatggacgcttggcaaccccccactggactggataaagcttaactgtgacgttagagtggggttggatcgcatgtgtgtggcggttgttgctagagaccatcttggtagggccatctgggtccatacatcttttttggagtttgccgatgctctgtgtggtgaagcggtggcttgctgcgttgccttggacaccgcgaggaaacgagaaccatgtctcattttgtttgcaatcctcttctaattttgttagttgtatcttttcgaatattagtagaaattgtaactatgctgcccataatgtggctaagtgggcgtttacccacaaaaagttcggttgtatcccaattttctctatcccggaacaattattttataatgactatgaggtctaactgctactaattctaatatatttacgcttttcttaaaaaaaaaaa

SEQ ID NO: 16365 - DNA, 10053 bp, Cannabis sativa
ccccagtaatcaatccaaaggactttttttttctaaaactaacgtattttgtatttttaaaactttaaaatctatcttttttaatatattttatttacacacgatatatatatatatttttgcaattatataaatttatttaaaaaaattacgattttaaagttttaaaaatacaaaatacgttagttttagaaaaataatagtgtaaaaaaataactaaaaaataatcagaaaataacctcacaacagtcaacaacatatataatctataaaaaataaaaaataaaaataactagaaaatcaatcacaacaactataaaataactaataaaaatgattgaatagcttattattttattattttttaaatttttagtgtattatgtgaaactttttaataaataatcaaacgagcccctataaaataatttaattaaagcgtgtttaagcatagctaactgatatggaatatcacatgttgctcaaatttattagaggtagtcaaccttgattatactgattttgttgtaaatcagtaaaaataaaaagttaggaaagttaggtctgtctataaaaatgaaatagaaagaaattgtcacttgggaaatctaaacatttatttacaaagtcaaaaacttgtaagttgtatacacaagaaaagaaattggttagatcaggggaaaactgaaagaattgtgaatgtttgttggattgtacactagtagtttgtttgtatgtagggacataagtataaacaatgaaggatctcatatgatgaaatcaattccgctggtacaaaatctccacactagggtagggagagagttcaattatccttcttttgattgttgatttccttttaccatttatttgctgtacaggaaactcatccttcggatggagttgtttaatatggtgtaggaattattgttttttgaccgattctagttaccctaatgaaagagcgaacctccatcagaaacccaacttccaaatttctcaagcaattcatctaagtcgggtttagcttgctcattttcctacacaatcataaggagtaagcataaattacataccacaatgcagaatagtgtttgaacataatttgagtttcataattaggtagttgaaatctcttttactaattggagaggacaataaaattaaattatcaagtaaaaaaatgaaacagctactcactttaacagtggacattccactagattttcttgctggttcattcatatcaatgtttagtccattcacaacgttctctattgaaaggctgccaagagacctatataacaacagagaccagtcgcttgtcagatattaggacttgagagagtgagtcaaagataaagactaaaggagtgtaaaagctacaaaaatgtggaaacatgacaatcacctttcatttatatctccttcacaagaatttcctgaggaagacagccaatccgcatccataaaatttgagaagttacactcatcgtcttcatcacaagaaatggggtcacgtccaagcaattgcccatcgtgcatgaatttgaaaaactgtttttgaatcactgaagggatatacctagaaaaaggcagagcaaatcttaaacaaacaattgtgaacaccaaaagatcacctgcctctgatcacttagaggagactacattaaacaataacactaaactgactgttgtggcaggaagtactagaaaataaaaaagaagacaacaaagcaaatgcaagttgtaatactgcatacctgcaagcagctatactatcctcattagttggaattagtggtgtagactccgatataccatcgttcgctgctgctactatttcagatagaggctgattgcacccaagtatagggtcggcctcaggcgtgtcacttggaatacttccagctgaaagtgatcttttcatactaaccctacaaatacagcaactttcaccataagatgtttttggaggataatttaattgttcctcaagagacaaggaaatagtttattgtggctttctctaaacaagtcttacaatacattagacagcttcttacctaacattctcattaggaaaattagaatcacgtttcccaacattgtaatgttggtctgaacccaattcccatagtgcaggttttccttgttgtggttggaagtgacccaaaaatctgaaaaatcaaacattaagatggctttcacttcctctgtcatttgtcaataaaccttgcaacagattgccaaagaatcatatgcaatagactgacagtaacaatgcaagtattgcctggttaattaattggaggacaaattcaacttacacatttatagcatcttgtttatcacgatcaaagtaggcattattacaataccgttgtagagttctaatgagttcttgcgactgtgctgcgggcttccattgacctcttctctcagaaaatatctgtttgtttggacataatgtggaatttacataaatttttgtatgggatgaaagatatgacaaagaacaaactacataaaaataacttagccagcagttgggtaggtaggtaggggtgatttggctaatccaactcctatctattttcactttcataacacaagcaaagcaattaagtaaaaaattaccttattgtgtgctgcagaaccaccatattggaatgcaagtgtgtctcccatgatctcataaattgtcattagctcatcagccaaaggctcaccaagattaatttttggagattctgtaaatcccaaagtaaatagctgagttccaagacaaactaaaccatagacatattgggcaacattagtacgatctagacagtcgatgcaattggtcctcaaaacccctttctgattcaataagggtttgacattgtggcttctattggaatcaccaggacatctagtattgcaaagttctatttccacgttatcggcactctcatttcgaatggataagttctctgaagagaagttatcggttttattgatcctaaatcacattttagtgtaacaattataagaataagaacatcaagcaaaaaagacgaaattatgccttttaagatatacaggttctaatacggtaaggtggatcaaccacaaacgtttagaaccaagaaaacacaaagagataagtaataagctggtgacctttggatataacttactcaatatctggagattccaggggccttgaatttggggctacttgacaatagaagatcccagttaagcttaaagcatatgcagacatgtttgctagttgcctcagaacattagttgctttgctgcaaagacaaaatccaattcaatcacactaaacttgcagaaatttctactcattatgtgaaaagcaaaaaaaaaaaaaaaagcgcattacctcttagaatgtctatgcaaatcccactgaaaaaacatgagacgattctcccttggcagacttgtatttatatgccttacagcatctgcaaattctgcacgaagaatggtctctctaggcttcgtctcgcgtgtctattattagttatacaattgtaacaaaaacaagagaatttttttttactaattaggggttggcatattcataggaaagaagagaaagtaccatccattgctcagtattttaatggttcttcaagtaatgagaaaaaatttaccttaatcaaatttaaaatgatgattggatttccatatctcttgactagattctcaaaatgaagtcttgtagcctcataatttacgtcctttttgtatactgaggggaacccaaagagaaaaaaaatcagaaaaaaagtatggagaaaaaactgctaaaaaggggattttgcaattcatacatataatgtcaggttttatgtttattcgtgatgtttcctgtgaccagaaaagtggaattgagccccgaatctgtaccacagaactaatttgagtcgggcaatcttcagtagcatttgcaattacaatctgttctgtctcaacgtcattggcgactctacccttctcatttacacctcgtttcaagtatctgcacagggaagtggaaacaatcattgaaagcattctagaaaatgtgtatatgctgtaatgatttgaaaattttctacgaaagaaattgaaacaaaactgacatctgagacaggcagtacaatttccatgtaagattaagccagctatcccaatcagccatttacgtgtgtgtgtgtgttttagggggaaatgcattcaaacctggtgccagcataatggcgtgagcgtctagcaatgagaattaatttgaagatccgatcagaaatagagagctcaacctagatggaatgaaaaagaaagaaaaacttcagtaaaattccaaactgagaaaacatactgaatattaaggattggtcactatacaataattcttagcaagcattcgaatattataaaagcagtaagctataagatttcagcagctttccctcattcattttcaaattccaaaattctcacacaaacaatccaactaaaatcaatattcagattattatttcatagagagtaacctgttatcaaattttcttaaacacatacctgtttaaagaaaccatacactaaggcaactgtccataaagtattattaagattatttcggattccacgagtcaagtactcattccaaacaaacatcgattcataaagaaactgtcctgctttacagtcattcaaattcctttgaagactatgcatgacattgtatgagtagctgtaatagaaatcttttgtgagatccactgtggatagcagcttcttgtatctaagccaacaagaaaaagaaaaaggacaaatctatattagtaaaaaaagaatcaatcaatccaataaaaaaatggagatgaataactataagcattaaatataaatgaacaaagaaaattataaaaacaaaaccaatagaatatagttagtgttttcccccagcaaaaccctgtcgataccttgtctcattcaaggtgttatttttttacatcataacagctctgtccctgtcaatattgcaggaaaacaccagaactatacaaacaataataacaatgaaggattaagatttggaagatgtactaagtgtttcatctataggcggaaaactaatgtaccagagtaacttgagctggttatgattctgagaacccaactcatcatcacattcacattgcagaagtctcaacaaatacagtacaaagttacttgtgtactactgaaatgatataaattataaaaccaaaccaattaatgtacccccaaacaatgaaattcaaaccaaaaagaaataaccatatatactagaatactgttatatgtacaattaaagaatgtctgtctagttctcgatgctactctcttattttctctttaaaagtactatgtacatattacatttacaagcgtaatggactagagacctgttctcatccttagagtaaggcaagtttgaccgcactgtagaatttggtactggaatcattttgcttttggaaattccatatattgtatgaccacaaattgttccaagctttcttcgttttgtgataacaagcatgtaataaggtcccagaaatctaacaaagcctagaaccaaaggataacttatttagttccatatcaaagagaaaaaaaaagatgtaaaattatgaaaaatacagtaaattgtaccaattattccataacatattgctataagcttaagtccaccgacagctttgtttccttcatgtaaccgtctcagaagatcatggcaatcatgttctgagtaagtagtggaatcttcgaaaattgtaagctcagttggctctaaccggtcaatttttaatactctccaatgtgttctgctcttgtctcttccaatcatataaaagttctgttgaaatatgaatgatttgttagtgctgcatcataagtttcttaataacaatcatttaagatagatgaacaagaatgaccaaaatataaaatatttgagctaaaaaaatccttaaataacacatcaaaaattggaaaaacgcattatgtctgatacccaacggaacaaaaatcaagatattgcttcaatcaaagtcaattcaaaaccattcacgctaagttaaaaaaaaaaacccttctctaatcaaaggaatgccaaaaagtcactaatcaatatccaaaaaagattatgtataattcaaatacataaatgaattggaacaaaaactctaagaaaagaaaaagaagaagaagagatcagaaaatacaggaacaataacagaaccaaaaaaaaaaaggagagagacaataccgagggcgtttcatagagtttgaatttcttcaaatagcaattgtcacggttaagtttctgacagaggacttctccagacgccattgatttaggatttgaatcacccccgagcctcaaagtgctcgggttttgtttatataacttagcagtaacacaattctcccccagaaaaacaaaaaacaatttttttccttttactgtatgctgaacctatacatacatgaaacgcataaatctatctatataaacgcagatacatacaacaatgacacagactcaaaaaaggaaaaaaaaaaaacaataataaagactgacagaaaaaccagatagtgaacagttccagaaagcaaatcagaatacgtcgaaaggtgggagacgaataaggaaggagaataagaaggtcagatcgtcgtccccggaagcttagaatggcattgacagctatggcctctgtatccacacaaaaataaaaattgaacgaaaatagtttgtatttgtttttatagtcacactaatacttaaattaacattaaattaaatatcattatagatatttaccgtgcggaattttatgcaatatttatctttttttttttctttaaattcaaaacttattcatttaaattttatattgtgttgttaaaaaaattacactccttaaaaaacttatcttttttttttttttttttgaatgatttagagtgtaaatacgaagttattattcacgtgttattttttaataatatatttaaataaaaaataaaaatttaatagtctgaatcaattagaaactgacacgtgcagtgaggttcttggtatttaaactctcaagaattaaattactattaagctctaacacatatttaatattatgagtattattatttattttattactaattatacattaatttttttttttaaaatggtagcctgagtggtggggactaaggcgactgcgtccttagtctcacttcaaggtcgacattgcatatactcattgacgtgacacttaattagcaagtatctacggaagttctacaaatataacttagatattattaccgttaaaatttaaatttagagatttatttgcaactaaaaattaaacttaagtactacaaattaagatttaatcacattaaaataatatatatatttttaaaaaaaatattaataattaatgattaggtataattaacacggaaaaccccctcaatgttgtgggagagatgaaaaaaaagattgactttgaatctaacacctttaaaattttggtaaattgtattactattaaactacactaaaaaaaaatgtataaataatacggttcatcttcttaatcataacaaaataaaaattataaataaattaagtaacacattttaaaaaataactaattttaaaaaaattataatgatttgaagggataatactatttccttttatgatagtgaaattatttgccaaagaagaataacatttaaagatgaaagacacaaatgatttaggaaattttgaatatttttcatgtggtgcattagtttatcaatctatactttttttttcttttaatttttttagaaatagtctaaagtgtttcacatttttcttaaaaaaaggaaaaaagaattattgatgattttagcttaaaattgaaaaggaataaatgaataatataagattaaaaattatgtatcatagtgagtggaagaataccgattatggaattatttgcacaacttgtcgacatgtgataattatttattcccataatttacaggtacctaataatcataatgaaatattacataaaagcagaaacgtttttttagtaaagaatatcgagaagatcttcatgctactactgtttcactaatattaataaatagttctatattattggtggtatcaaatacattcacaacaaaataaaatagttaaattgtatttatggatatcggatctctgtcttgtttttactctctatttttacttttattttgtcagacgtttatattctctattatagtactactgcaatacctcataattaatatattttaatactaaagaatgatgatgaataaaaataaaagttaaaaaatacatataatttgatttagtcagagcccaaattttggtcctacttgctcgaataaatattaccacattaccaccttaatttgtgccaacatgctaatcaaatatttcaatctggaattggaagtaaactcaaatgaataaattttttagttgcaactggcattaaggaaaaaggaataaggtatacagtcagggacaataaatgcatttaaaaaaagaagaagaagaagaaaagaagaaagacttttatgagcaatgtgcatatgttttgggccttttggggctgctttaaatttcaatacttcaataaaaaattgaaaaaaaaaaaatgattgaagcagccacgttaaaggcacctagttgaccctgatattgtatataagcaattaattattattatatggtgtagacaatgataggtggagaataccatttaatcttctctcgcttgactctaattttctccgtgactccactttacggctctattttgaaggttgttgattagtgttactgtatagatctaaaacatacttttttactcttaaaatctagtttagaaggtgaaacatttcattttataacatcaaattgaggatatattgttaaaatataactcattttataaaaaatgaatatctattttaatagtgtcctaaaatttgtttttaatttgcctacagcaaaaattatgtcaaatttaacccactatgatacactttatatttatatcatttttattattatatttgatattaggatttttatagtaataaaattattagtattttatatttttaatagaatattaaaaaagcattaattaaatatttaaattcatatgtactgaaacataacgcaaataaagtttgttaaacattctgctaatcgagttgcacatgttattgcacgtcagtctcggttgtttgctgatcgtacgttcacgaaggatgatgtcccttcggaacttgaaattgtacttttgagcgattgctcttgagttaatgaagttgattatttatttaaaaaaaaaaaaaacataacgcaaatatatatatatttttgaaaattataaaattatttttatttaccaaatataacataacttttatatttggtttagcataattgaacaacaaataattcataattaatttcaattactttactatttggtttagcatatgtgacatgatggtctaataaaataagctacatctttaacgactttatttgctcccctttcaaaaaaaaaaaaaaagactttatttgggggtttgaattcttttcgtaatttcactaaattttgttcaaatcttattattcaacaattaattattttttctttccaaaaaaaaaaattaattattttttgcctactgatcataatttaaatatgaaaaggaattgagctatttagatataacatttgataattgtatctgtataagttacaaaatcttcttataatgagttataatagcgtatctcttaagtataatttctaagtacataactaataagaatgacaatattataatttatgataaggtatttatggttattggattggatttgataatttatggttattatttatattatattaaattaaatatatataa

SEQ ID NO: 16366 - DNA, 3313 bp, Cannabis sativa
agctatagaacaaatgataatagtgatctctgaattgtttaggctttgttttggttattattggttagtatttgattattgaatttccttctaagaaaaaaaactttaaagttgcttaagatcgaagacattaatttagaggagaaaaagttcctattacataataacacgtctaactatatgcttttgctttccactttaaagaaaatttgtaataaatataatttttttttaaaaaaattccaatttccattttataaagtgtgtaaaaagaaaagaaacattatcacactagatgaaaatataattttggaagttgctgtattggtagtcaaaagaatactttgaatcattagaaagccatatatttgaagcttagtttggttaaaggtcaactacttaaacggcagcaagcttcattttcaaacacataaaattcaataaaataaataataaaaggtcagcaaattttctaattattaaatttaaaagccaaatatgccatgccactgaactaatgcctacctctattgggttgactttgacctacacagatggcctgcaaactctttgcactgtttcaaatcttccaaccaagccaagccaaaaacaggcaaaacacaagtctcatagtaataaaggaactgttttaggtgattttgtctttcttcttttccaaaagaaaggatacaaagatcttaaaattaaaaagccaattatccaaataagtgataataatttgttacatatgagaatttaagagatgtgaattcttgaagcagaattatacaaaaactgtctgctaaaatattgtaatattataacatttaaacccttcattaaactgttaactaaaatgttcaatggatagaaacttgaaaaaaaaaaaaaacaaacaaacaatcaaacttaatgtaaatataatcagatcatcatagaggtgaaataaaattcatgatctctaccatccaatattcccatgatgatgaagctgagcagccaccacagccctgtttggatttccatgatcaccaccaacaccagtagtagttgtagtagtaatagtagtctcatgaatcccattcatatagttattattatctccatacccaatattagccattccattaatttctccaatattatagctcttgggacccccaactgaataaaacccaccaacactgaaattctgaaaatcaactttgttatttggaaaagtatgagaaggagtagtagtggtgtgagtaggggagttttcttcttgcctagctatggccatggagttcttctcttcctcaacttctctatatttattgagataaactttaaggggtccaacataattctcaaagcccagagttgtcatggcccacaagaggtcgtctccattaattgtcttccttttttctctttgacacttgtctgaggcttcccctgttatgaagcttatgaactcagagacacattcttggacagtttctttagcttcttttgagattttggcatttgcagggagtgacttcttcatgattctgctaacattggctattggtagaaatttgtcttgctctttggataagctatcaggtgatgatgggcttccaattgggctgctactactactggtttggttccttttggaagacattttttgtgggggagaagggatgagaggaatggaaatgaaagtgaaggtaaacaagagatctttttttaattagtttacttatttgtaaagtaggtgttttttttttaatttctttggaatcttagaagagggggtttgggtttatatgcttggagaagttttgagaaaaagaagaaatatgatataaaatattactagtaataaaatataaaaataaaagtggtaaggcggtttaatgtgtacctgtaaaaagaaatggaaaataaaggaaaacaaaacatacacaagggattgttagtgattggaacaattacaaagaatgaagcggaatcttattttttgaggtgggtataattttgaatttattattttagtatgggtttgtttgtataaatatttaattactgttttatgtaatgggagataagagatgaaaattgacaaatgttactttttgtgtcatggaccaaagtaatgaaatgaaagtatgatgaagtacctctgaaattccaatctcttttcaaaatgtttatttttcactaaaagcaattatctctctattttgactgcagagagtgagatccttaaagggctctagggataattagaggggaatttaatattgttaaaacatatatatcatcaatattgttggcattccggatcacctaactccctctacttattttcttagtcaatattactctgctttgaagcaaagctatatagtttgaagttagtttaaaattgagattctgatgattggaggctaaaactattactgagttttaaccaattaaaacacatatcctacttcatatatataaatctacagactacagccacatgcatttgcatgcttttattcttctagctagcttctagagacagtagaataagaattcactaataatgaaactttgaacaacaaaatagcagacaaggtcccatttagctagagttcacttttttactccatcaatatacagatttgacatccatgtggaagctagcagctatatatataatatatattataatattatatgattctccttatttcaaatttcaagtcttcttcatatactacatataaatattgttgagagacagagagagatattttggtgagtgattcggtttttggggaggattttgaaatttcagttgtaggctgaattcatatataccaatgaacgtggtatctattcaggtctatagataaaaagggatatttgtatatttatatacatgtaaaaatgaaaggagataggcatgcacccagactacctataatgctctctttcctctttgtgtggtttattttgtctctccaagattcttttgatcacatccatgtttggaatgaatgagagagtgtatataaatatatatacatatacttatatttgtatgtgtttgccactttctcatcacaagtggacgtttactttactttattttgtctggtttagaaaggtaaaaagaaaagatacaataaccaatatcatttaggagccatgttcttgtttatattaatttgtaacaagtgaggagtttatatattttatatatatgtagaatgtctttctttgtctaatctaacgatctaagcatatattatataggtgtgttttacataaatatggaaaaaatagagct

SEQ ID NO: 16367 - DNA, 6169 bp, Cannabis sativa
  modified_base (665)..(675): a, c, t, g, unknown or other
aaagctgacgtggcagctggttagaagaacaaacagagggttggtcagcgagtgagccgcacgaggggatcccccctctctctgctcagactcagtcccacattgctgtgttttttttttgagttatctaacttcatttcacaagtggcctatttttaattttttatatataggttagatacaccttattttaaagggctagactctagaccacgtgcaaagcttttcttcccagaaaaataaactagaaagattggttttggttgtggtgattgcctttgttcaagctcattgtgaagtctcacatagctggagagtttatctattaccatagtttctttttttctttaatgcagaatcttcaatcaatggttatgattattttttataataaggttaattaggatttttgctccctaaaatttgacatgtaccaaatcatactttctgaacttttaaggttgttaaaagtgttccatgaactattgagattgttagatttaaggactttttttcaactttagtaaaaaaagtataacatgaatgaaagttcaggggcataatttagtaaatgtcaaagtgcgaggtacatgatttagtatatatcaaagtcttaggagcatagtttagtacataaacaactactgaaatagtaaaattgaatnnnnnnnnnnnaaagtccttaaatccaacaatttcaatagtttatgagtatttttaacgaccttaaaagtataaagagtatgatttgttacatgtcaaacttcaggagtcaaaaatctaattagtcttagaataataaatgaatggtgtcgatttattttcattcaatcaatgatcatgtagtagaccccacaaaattccagagctagttagttggttctccatacatacagattacagagtacagtttaaatttcatgactatatctgtttcgttttttgttttaaatggcgccaaaacaaactatgggtgtgggacaaatatttgtttaaatatatgtgaattaggacaggaccactttgcacatacattagtcaaatcaagctaccgttagagcattccccatgaaatagctaggaggaggtaaaaaagaatagctaaagattaaaacttcttttccaataaatgaaataagcttaaaagatttttgagctatttacttaaaacattgttaactatttactctattttttaaaataacttatcaaaattttatttttttaattttacctcacacttttacattacactatcaagttctctatatttttacctacatcattaaaataatatatttttaatacattaatcatatataaattaataaaaatattatattatatgaaattataaagagttaataaacttaaataaagtagtaataaaacaaataaaaaaaattagcccaatctctctccataactacacatagaaatgtattttattgaagtttgtgcaaatatattataactaagttataaaaaaaaatgatggaatggttaaaataagtttttagccaaaaattttagctattacctattatgaagacaccgaagtgctcttagcttcctttcaaaaaaaaaaaaagggggttcatagctaaatgtagctacaaactattcatgagctaaaatattttattttattataattattttcagaatatttaatttattaaaaagtttgaagatataatattaaaatgatgtagagaaaaatatagagtatttatatttgatgtatatagtaactaaggtaaaataaaaaaaatagtattttgataaggtattttaaaaaatatagtagagtagtcattgagagtgctcttagagtaacagttaaacctgcttatcaatgaagttgttcaataaatatatttttttacgaaatagtgttcattgtgttctaatcacaatgaataaaataacataattgtaatttaattaatatagtactttacatctgccccgggttcatcacctttttcaggtttttgcatttgttgtaggactttatttttattttatattattttgaaatgttttctaaagtaaatgattttacattgtacaacaaataaatggaggaatatgacaacaaaggttgatcatggagaaatggaaatgatattcaattggattcgtacttggtatctatcaaggtttctgagcagaaaacatgatgaaagatttctctactttgcttgaatagttggtaagaccacatgataagcataagtcttcgatctcttcctctgttaaatagctgtacggctggagagccctctgccacatgaacaaatatcttagaatctaatatatcttcatgattcttggatggaatatatgtaaagtaaacaaaacacccttttaaagattctgttatccagtgactgcaaatacagttataatgaggaaccactcatcaataaaccctcaaggtcagcaattactgccaagtcttgtattgggtggactatgcccatatggttagctagatatgttacaattgagtaataaagattagcaacaattacagcttcacatacaagtaggcagagcctaaatgagacaacaatggcatggataaatgagtcagcagaaatcatgtcaattagaatttttaaatcagtgggaggcgttattgtggttgagtggggttttcagtgatttttttttgtcacttcctcttctgctatgtattttcttttcttggtttctgaggtgataaattgattttctctctctctctgctttttgctctccactccatcctcccaaacatagccttaaggtggaatgaaaagagccagaccagtgacagagtaaatcagatttagggcaacaaatatagaccacattatttcagagacaaacatcattaaaattagacactatccctgaaaatatcataagtaacataatttaaatgttgaagtgtttaatcagtataggtggtatattacctcccggagacgccttactatcaagggggtagacgaagtgtatctcagaaatgtggttccaacaaagatcccaccgctccgtaatatacgagtaatttcagcaatctgacatacatatgattttttttaaaaaaccattagttgaaaagaggacgttgtatacatataattgcatctttggtacaaataaggcattaaaagaatgataagatgggggaagttaattagatggaaatatgatatgaaaaaacatttaagtacaaaacaagcgtggagaaaattttatccaatcaccaagaaaaatatatcaatgaaactcagttgccaatgatcacagcacctgaaaaaaatctaaaattactttgatcatagaacaacattgggaacttgaaccattgtggttgatctttctagtgtatggatagaggcaagatgcacaatttccatgaaagaaatctttgtttgctgcagcaattactcagtaattttactatatcactaggacaacacatcaaaaatcacacgagcattactatatcatttgcccaaaccccaaatgctaattcaaaccgtttaaaaaaggtcactgttgagtttaggttggaattataaacttcagatgatgctccatagagggtatggattatggatccgagccaacaaacctataaatttaaaaagttctttgaaagtctaagtgacagatgctagacatgaaaagttttaccatttacagatttgacaagggacacatgaaaatagacagaggactgaaaatttagatggtatgatgacagtttagacagaagaagaatagaatgttacataatatagaacacagtaagactcgtgggtttcatctcaaatccaattgacaatgcatggcataacccatgcttttataagtgatttaatatcctcacatatatttcgatgtgggagactcttacaggaaacataggtatatttataaaactatatttagtctatactggaattctacatccaagtgctaagtaatgagactagattgcattggtttttgaaatgtcgggaaggaaaagataaacagatacaacactttgcatgctcagacagagtttcggctgtccagagtccagttcatattgtaccgaaaagcctagaacaataggacctggttcgcttgaaaaataaaataaacagcaaggtgatcatgcttacagcattggttggagaaggccagcaatgcaaagcggcaccagcatggacggcatcaactgaacctgatgcgaaggggagcctggaaacatctgctctcacaagggcaagattactgcacattgttaaaaatgcataaatcaggataaacctctttcacgtttcatgtttgacactccagaattactccaatataggaacccagaccagtttcatgtttgttaaaccgtttttaattctaataacctaagagaggcactaaaacttacctgtttaaaagcttcccgtctctcttaatgaactcataactctgacgcaacatgttttcagaaaaatcaagtgcaactacagaagagtatgttcccgattctgcaaactttctagtaaataaaccgctcccacagctaacatctacaagaagaccaccttcagcagatttaaagtattcctgggccattttaaactgtagggaagtaaaagcaccttgttaacagaaggaggaaaaaacacattaatagatatagcaggccaacagctatacaatatgcattcagtcagaaacagaaggacagaaacatggttactgtaagtaccaatatacatcacatattgatacaatgtaaatcaaaaaagaacactatatgggagttaacacaacccccataaggaacatcttgaagtaatttatattaagattggggcaaggcattaaaattaaaccacaaaaaagttcccaaagaaagcatatcacctcttcatcaggaccaggaaaaccgctttggctgaagttctgacgccaccctctttcgtataaaaatgaaaccagcggactcctaatgaattgagcaacagaaggaaaacaaatgagcagcgctagcttaaacaaatatatccagtaactcttttgagggttgactaatatcatacaattcatgacacaaacaatgagttgattgttctttttctacaagaagaaagctacaaaaatcattcattgctaattgcaggcaatatctcatcaaaataggacccacatgactaatgttgcgtaaatgggattatgggacccttactaaactaaaagaaaattctacttgacaggcgagtttgcatatgtgtttacagtagaaatcaacaaacaattgcccaaaaatttaacaaatggtaatgaatgatatcttgatgcgaaagggtaacaaaatgaatgaatagagtaataccgaaataactcagtcccagttggtttcacctcagtatagtctctcaatgcagcagttacagtcaagtccaaatatatgtctttgctcgaatacgtcttctcacatttcttgcacttaaacccagacctataaattgcccccctgaaaaagaaatttcaaaaattccctatttttcagaacccacataatccaataccccaaaattcacaaaaaataaataaataataaaaaaaaaaaagagggaaaatataagcaaaaaaaaaaaccatataagaattcgattcaaaacatacaaattaatacccggaggaccttttcttattagaggctcatagcacacagggcaagcaaaaacctcaggagattcggaatttccacttttatcgacgtttgacacctgaaaatacaaaaagggttacttgtattgcgttcaatctccccaaaattacagtgaaagaaaagtacgtaaaggcaataccggtttaacagtaacggcggaggtagcacgaatggtggtggtcctggtggaggaggagtagcggagacgagaagccaaaaggggaattcgattaagttgagagtgttttggggatataaagggtttgtggagagtggaatgaacagaagaagaaatcatcgccatgtaaattggagttgagaatggaggagtagaagagtgtgtgatactatgggggttcatggctcatcgtgtggtggctgagtatgaggcgacgtgtttaacgaccgtacctgaatttggcgcggggcttatatatttta

SEQ ID NO: 16368 - DNA, 11972 bp, Cannabis sativa
agcaactactataataaaaataaaagttacgaactatagaaggtatgactagattggagtggctaatttaaatatattgccaaatatttatagtttcactgcagttgtgagtatatactatggtagcagcatgtccatcaaactttctaacttcctttcccttggatttgctgaagaagagtggctgcaagttgtaaagttgcttgtaagcgtttttgcggatccgagtctgcttcctgtgtactactactactctgctggtgttgattttcctgaggcctattatccctctgaaccaagtgaggcacagctgatgatacatttggtacttgctgcatctgttgaaattgaccatgctgagatgttgacaacatagaattcatctgattattatgtaaaccatgattctgggatcttgagctatcctgccttgaatcgttttcagttaatgtgtttggtagactccctaactgcttctgcccaagaagagatgatgctaactgtacaagttgctctggttgcagaccagcaatatcctgtagagatggtctgttattttcagataccggaaaacctgaagctccgcttgttgagtaactggaatttgtttcttgcgtcgctcttgtcctgactggtggttgtcgctgaattatttcatcagcagcaccaacaagcgcttgagatgatacagttttagtgccagaaaatgagttctgcatatgggaagaaggccagttctgcctaggatctccatgatgtggaaattcgtgcctgttttcaggaaaattgtccgatctactaccaacacgggatgaactagaaacagcaggtttcacatttccgggaaaatatttctgtgaattattagaatgagaaggtgttgatggtttcggatatgatgcattcccaggaaatgacaacaaatttccatcttctctttcgtgttgtcggtgaaaaggacctgcattagaatcaggatgttctaacctcaagataacaccagagatactaagttttccaggtaccttcagtactttctctgagaaatttgatgggggcacaaggaacaaggttgtcttctcatctaacttggcaactgcagcacgttctttctcctccaaataatgcataaactcattgtaaaatccaatatcagaatcactctcagggacaaaaaagacaacccaggcatttgctgcttgataataatgctttgaaagcatgtctaacccagtcctggcagtgcaatctaaaaattcaggcctgcaacatgggatatgattaggaactaccttttgccttcataaaatatcaaatcctgctaatatgcaggctgaaacaacacgtaaaatttcccagaataagagtgagtgatcctgagagatatggaaaataccgacaaacaaatttagcctaaattcaagcataccagcttaattttttatttcacctaattttgggcaccatatcagatatatatttgtataatgatgtcaagactatatatccaatacaagaaaaatcatatattcatacatatatatatatatatttatagagagatggaggaacatgaaattctacccttcccatgaggcacatatacaagagaaagatgtgaaatattttttttgaaaagaaagatgtgaaatattaaatgcatgtaagtcatacaatataatgatgatgaaacttagtgcatactttcgttaaggttaaacacattctaagcatcttgtttcatataaaatacatttatgagagcttcagccacataccacactcatctactcctagtataatttttgatgaggaatcaacagaaggagagattttactacttacaacataatgtcaaggacctttccaacaggaaagcatcgagctcgacagacaggtgttcctcccttagcaatagttccctcccatttccactcattaagagaaggaagacctgattcaggggtcaatcgtttctcttcaacagaattcaatagcaaagaaccagatcctagctgggggctgtcataagattctttccagtgattactcctttctctctgaggtggagcattcaaagtgcgatcatagctctgcttatcactgaaaggtccggcagcaaattttctatttgagcgatcagcttgggatgaatcagagaattgaccagggaaaacatgtctctcatgttcttggtccaagaaaggatattcaggaagctctttttctgatggataatatccagtctttaatttcttggctccatgagaataatgaacatcttctggcaagtcccatggttcttcatttaatgtacttgtctgctgaaacctctgatggaaatcatgtaaatggccacgtttacctcttggactattctgatattcgtacatatcttgagactgtgtaaattcaggccctacttccccaaatctcctctgctcggctatactatttccacccatccataaattaccctttctacttgaactatagggatcgaaatcaccagaatccaaattagagtaatgttgaggagatctagtgtatggatcaccagttgagttcccaaacttcctatcctgccaaaaatgttcagaagatccatggcgaccatttgacttaaattgtggggatggagacatatttaaagaactccttccgttgtttgagccactttcactcttcgcaaaacaaatatgtacacgaggatttccgaatagtttaccatgaagagtatctttagcttcacaagctgatattacactcctgaatcgtacaaaagcataactacgacctggaaatgcagtaattttctcaatctcaccaaatggtgagaatgctctccttaaaattgtttcatctaccattagtgaagctggaaaccctacccataaaacaggactaggttctgcattcttatcatccatactagaatcgtcagcataaatttggtcagaacgagcatgacgagctctaaactccttctgtaaataaggagattctcttgctccagagtattgctcatctcggtactgagagcgatcttcatcatgtaatggtgccggtgacttatcctgtgataaaagttcttatcaacctaacagtaaaaaaaatatttatagatcaaaccactctaacatgtttcgaatttttaaattaaaattgaaataaaatggaactagattctaacttcataaatttgtaacaaaaatgcttaaggtatttcataaggataaagaaagatattaaactactttgcatgtcatagttactatttcaagatgcaaaagatgtcttagattattagcagatgctttatctagcatacaagaaactgtagaatatgctaccctagctgttcctcagtggcaacaatgcaacattgggaccagcccaaggcacatatagtaagtgatgtgtttatcaaaactgtgtacaaggggatgctggcaataccaagtaagtcccaattaattccgtaacatattttgaagtttcaatgctctccaataggtggacattgagggaataaaggacttatctaaactattttgagaagggatgagacggatatagtgcaatttgtctagcgatgttcttcatgtcaaaagaacaaatatttggccacaacttcagcaggactcctacaacccgataaattttattgaaggattgcacaagttagatgggagggatttcatcttagtgcaggtagataaattgagtaaaaatacccattttattgccatagaacatccctacacagcagcaactttggcagctatattcttatgagaagtaataagagtttatggcattccacaaacaattatctcagatcaggatagaacttgtatgagcaagttctggaagtaacccttcaagttacacggacaaccctaaagattaatacaacttatcacccacaaacgatgggcaaagtaaggttgtgaaaagatgtgtcgatacctatttatgttgtttctcataagggaaaccacagcattggatattagttggattgaataattggtatcgcaccaattgtcattcggcagccaaatgcacacccttcaaaactctatgcggacaagaccaccttaggataatcaagtatgattacggtaaagcacaagtatttgaggcttgttcttagaagacagagataccatcttggatgacttgagaatgcatctgatgagagaacaacagaaatgaagtactatgcggaccagaaaagacaatattaatatgagccagaggatttcgcattcttaaggtaccaaccctgtaggcagaagtctctcgctcaactaaactgtcagcaagatattacagaccatttcaggtagaacaaagactgggcaagattgcttacaagctgaaactacctccaacagcagccatttatcttaccttccatgtatcacagctatgtccagctacaccagaccctagcatcacctcacattccagcccaactcacaaaagttgagagtagagcagtattagaattagtcacacattgctaatatatggaaataaaataccatatataagatgaatagaatactcctctcattgttaattggtttgagatgtaaccccatgcgccttaccatacaatcctaaattctaacatggtatcatagcaattaaaagtttctgttgtctctgcctttaacttccattcgggacctttcagccaatgtgtatcagtttctagtattggtatttttgacctttttcaaaaaattcacaaatttcccgacgtgtacacacacaaatttttcgatttggccttgtgggattctttcaaatgttatgttcggccttgtagtctctcaaagtctcattatacccacactttcaaggctcaaatatgaggagagtgtattagaattagtcacattgctaatgtgtggtaataaaaaatcatatataagatgaatggactacttatttcattaccaatcgattttgagatggaacccatgtccttgttatacaatcctaaactctaacaaataggaaccggcccaactcaaaaaagaacttgagttgagagtagaggaggaagaactcccagaagtcagaacaaagctaggaagaaatagaagaaaaaagtattaaaaaagtgggaaaaattgtcatcatcaaagcaacaacttgggaagactcttccaatttccaccttgaggaccaaggtgaaaatttggcagggggagaatgataggcccacaattatatatacttatactaaagtgaataactacgtgtcctggtggaacggtagtatttgttctaatcatttataactcctatgtgtcctagttagtatttgtcaatacgggttctataaataggattagctttggggaagtacaaggaagattgaattttgtaagtttggagagcttagctctttttgggagagatccaaacccgtcaaaagtttggagtatcacttgagtattttcttttttcattttcaataagaattcaaatcaatttcagttcttgaaacaacttgataaaaagaaaatcccatcacatgcttttcaagtcaacttctgtatcattccaacacatcaaagattgactttaaattaaaagtgaggctcatgttcaattatgcccatgggcaaccattgcgccaacaaaccagaagatccacactgctatcttcatgtaaccttcgcctctttttcaaaaatgaaaaaggaaagaaaactattaccctaatccattgtctggtttgagtaaaatccaactgcaaaattatgtgaagtttttatcacaatcatttatttgacagaatttgggtcaatgccaactgtgtgcaagcaagttaatattagaattataaaattagacttttactgttttttcttttgataaaatgtctaatcaatttcgatagcaaaccctatgcatgtatttcacaagtcaatcaaggcttttcttatcaggcaactggcaagtataaatctatctaacaaacacttcttggaataatctagaacttggtagggaagcccattattgccaatgaagttagaggctgatttgttatgagataactgacataataccattacaatgtttgggtcatggcaagaaagctataattgtaggtacgccaaaggcctaagtttgctaaggaagttagatcctaaactgagatagaaataatgtaagaattccaagtccaactcattaaattacagagcatcaagccccaaaaagctcctgtatgccaattaatatgcgtagtaaatgagagttgaaactccaggacaatgggtggcaaaagacagcaaaccagcacaattatttcctcgaaaaaaaaaagtaattatgcctgttcaaggagaatcaaagccagcccagtcccaaacttcttggtttaaagaacaagaaaccaagaaaactttttgcagactaaccatctggaacattggatgcatatcaaagaacataacaaacaagagagatagcaagtgtaacaagatatatatcgaattttaccatgatccctaagtaaagcaaagcactgaaaagaaaatcaaaataagataagcacacgtatttagcaagtgcataatcacaccttcaccacatcagtggaaataatgtcaccataaaccaaaaaaaaaaacttgaaacagttgacgtgatctctcatcctttccacataaacattgtcatatgtctcagataaataaatttaaggatgaaagattaccaatattctatgctgaaagggaatacatgcagcagaagtaacatgtatggaagataaaagtgattaaagaaaagacttacctaagaatgaaggttgaaaaaattcactaattgcatcaagaagaagaagattcgacggaaaattaaagatttgaacttgttagtacttgtcaacagatcaagaaaaagagacttaaaataaatgagatgcaaaaaagctcgatccttgcacaaacatggtcattgtcttcaataaaacataagtacctacaaggaccatgtttatattaagaaacaatcttcaaagagcatgtttctaataaaacgcatcaacaaggagcaaaacaaaaatgaagcctcaaggccagccgatatatgtatacattgcattaaaaggttgtgtatcatctctgaccttttaaaatgcttctatgtatacatttaaatacaaattggtttatgcatgtaaaggaaatcaacagatcatgacttgtatttttaccaaatcaaccgatgatattgaatttgctatcattacttgtatcattaccaactcaacagacattgaaagaaaggaaaacacacacacacaaaaactagcactatcaattcttaattaagtataaaaacaaacaagatatatatataaatatatatatatacatattgctaaaatcaatcaaaacaagatttattttaattgaagaatcaagattaccatacatgttcagttgttcaccacagctcaaaatctacaaagggacaattaacaaattgaaagagatacaaaattagggctcagtaagcctcttaaatgtagttatgatcaaacggcagcaaaatcatgtaccatagtctctccaactttaactatatctatcattggcaaatgcaattgcaaaaaaaaaaaaaaaagataacagacaacatttttttctgcttgtaattcatttcattaaaggtgcttcatgtgtcatctggcatatacacaactacaagtattccaatattatatccaagctaagacatagctattagtaaagatgcatgataacttgaaattatccacaaaatcaccacaattaaacgttttccacctggagttagtgcaagggcttgatccctagtgattattataataaactttcatcgagaatttctacccaacatgatttttattctgggaaggatagaacgtgctcagtaccacaaataaagtatcttgtccaactagaataaacccatcacatttcatcaaataacacaggtctacagtcccaagcccccaaagaattgcaattttaattaaattaacaaaaccgctaaacaacaacccgggcatcattgaattaaaaatttggaatgcatcctcaatttctctttgtaatgaacaagaataagagcatttaagcatatacagagcagaaaagcaatggcaattaggcataatttatatgctgcaggccagatatgatgcagcctccatagagttacacatgcagttacctctgtgcatgaagaatttgaactccctataaatacatatataattaaggttcatatataacattgaaattgatgggtggctgcagtgcatttgaatctgttatatggtgcaggccatgttttttgtatatagggaaaaacaaagggagatgtaagctaatgttattgcaccttatgctggaagtgcagtagtgcaaatttagatttttgattaaaactgcaactcagcactgcataacatgataacatgcttatttccaaaaaggttctttttcccctcttcactcccagcttgagtgctatgatgataattgaagtgactctggtgacagaagtgtaacttaagatggagactgggtctgttaacatttgcacgacttatcacataaaacaaccctatctaaagtggctgattttaagttggaaactttagtaaccttgatttttataaacagtatctcaagtatcaaatgttaaggctaaagattgcatgggtaaacatcatgttaacttcttgcttgtaaatgctcaagcaacaatgtgtgctcacttatttgctttgcaatgtggtagatcaagttttatcattaccaaaagattgttgcttcatttttacttaattcatgaacccagcaccttcacagatgcactctatcatgtccactgaacggtttttcatcataaaccccaacccatggtccaatttagtggtaactgatgatcttgaaaagtcatatgcttacttttgtttccttttacccctgttgcttgttttcttacaagatactttgtctgtgttttatttccatcaaaaagattgctttcgattcatcataaattttcatgataaatttcaagtgacaggctaaagagttgtaccaactgttatattatggtggctatttaacagacttaaaataacagttcatatcactttagttcccattctttttgcttaattactcccctactatcaatcactccaatactccctatattttacaaaacagtaaaatattatcaggctccttattatatatatgaccaacgtattctcaatctctaattttttttttaatatattaggtaatttaagtagagggtacttcggtcacaatcaaaaatagtttgaccaaacaagggtatttaagcaaaatatacattactaaaagtgtataatctcacatagggccatgcaaatacacacacgtcgcctatgtaagtttgttgcagttgatgagaaataaatggtcgattatttatcaaaatcttacgattactttcactttaatggataacttgaagagcaaattcaaatgacaaaagaactacacaaaaatatgtcagctaaatgctaaaactgatctacgagataaatgtgccaaaaatgacttcttaatgatcctacacatcaaaacatttcaaaacttcccttcacataactcagccaaataaatatggtagtatacttcattttctgtataacaaaggaattccaaatacattgctgcaagaaacacagaacattgcttgatgataatgttcaagaatctaagagtctaagacaccaccaaaaaattaggctaattctacaatctatccccagatcactacaaaccaaatgcgaggacattacccaccttttttttttttatgggaacaataacatataagttgcttaggtcttctcagctgtctcttgttacaaaattcaaggcttcccaaatcagttttaatcacttggtgtaaataggatacgacaacctttaaatttcagaattttaacttcaacttcgatattatcaatgtttcagttttcagggaagttcatctcacctcttcttagtgagattatgtaagagatagtgaaaaaggattagaaagtatgcatttttattgttgctaacttcttattatcactacttacacatttagggtctgtttggtaaattgtattgtatagtattatataaaaatatgatacaaaacacaactcaatataatactatacatcacaatacagtgtaccaaacagatcttaaactgctacatatggaccaccaggaaccagaactgaacccaagtggttaagaaaatgtatggatggataatttaccatgtaaacaataaggcttgtgacatttgttggaaatgaagcaatgatttgaaaaatgagtatatgcctcttttctgttcatcatactattatgaaagaaacattctcctacatcaatatttttggaaagtcataaagtaaccaaaccttgcatgcacaatgttaacagaccatttgtcatcagttgggattaagagattagattctattacttattatgccatctgagacactgaacaggtcactattgaagtatgggaccaattaattgtacacttgctgagttgttcatgctcctgctatagatttggtaatgctttacacagtcctaagatttaattttcattaatgggttcagattctgatagtgctggcttcattatgatactctaaacccaaaagtttaattttatggagttgcacttgttttgatttatagactaaagatttttcttttacttttttagatggagttcattgcttacttagataaacaacataagtgggataaccaatgaatcaagcaactgtagagccctctgatgattcacctcaaaaaatggataaaagttataaagaaagatatacaaacacacacataaagtagataatataatagtacaggtataaagagagatatagaagcgaaaggaaagtaaattaagcaagaccaaactaaccgccttagcaaactcaatcctaagtgggttgcccgcaagaggaaagccttgaagagcttcaatggcgtcgattgcgtcttcatccctaacaaagttaaggaaggcatagctacgacctggttgaaaagccacactttcgaggtcaccaaaccgtaagaaatggtgggtcaactcatcctccattaaaccatgagcaaggttcccaacccagaggtgtctcgatggcggggcattgctcttgttgaagaaacctccgcctctgccactaccaccacccccataacgcccaccagacccagaagaatgacctatgttcctctcctccattcggggctgatactccctccggaaccggtctcgcccacctcctcctcctcctcgtcccatctacgaaaaacaccaaccaatccaacaaatattcagcgaatgaaaagaaaaaagtataactgagaagtacatatatgtacatatatagataacgttacacagtgaaattcgaaattaccattgtatcagccactcggagaagctcttcagaccaactataatgaagatcaagagttgttattcgaaaattacaagttgaaaatggggtttagagcttttccgagagtaaacagtatcagatggtcagatcggatggagagaaatacagagtcaagcttgcttttgctttttagggtttttaataatgtctgtcacacccttgcatttaaaagggatgagaatgcttcttcataaattatcatcaattaatatcttttatttaaataataataataataataatataggttttgctcgaagtgtagggatggtaattatacccgagagttcgggtacctgcccctaatgggcgggtacgcgggttgactttcaggggcgggggcgggtatgagtttaaagattcatacccgagt

SEQ ID NO: 16369 - DNA, 9250 bp, Cannabis sativa
  modified_base (4245)..(4247): a, c, t, g, unknown or other
cacaaaggatatacgcttaaagttttgttactaacatattttgtgtatatgatgtggcttttcttatattcttgaaaagcacggattatgacacgttattttagattcaccccttgaaaattgaattgtgggaaagacaagttttgattaatgaaaatgtttcagtcttttgaatcagactatttccaaacaacgtctaaattaccagtaaaaatttctattattttataattagtatggatttttttttttttggtgtattgaagaataagtttttcatcggttattgcttattttcccaaaagtaggatgtttcagcggtacagttgaaaccatatactgcattactagggtttgaagtatagtccccaataatgttgggttgaattaaaaaaaaaaactaccagtgatggttttgtaattgcactttatttttaaccaacttatttcttatcaagagatctcttactcctgtgattctgattcggagaccttttttttttgatatatgaattccaatatccatagaaaaaaaaaagaattatattattgaaggggaaaaaaggggtatggggataatataataaaaagaaaatcaagtatagtttatttgtcatacccacttgttattgaactttgtatcttttttgtataccaggtagtgagggacatatgttagaggaagctaagtctatcaatctatctcttagtgcgctagggaagtgcataaatgctcttgcagagaatagcgctcatgtaccagttcgtgattcaaaactcacaagattgcttagagattcatttggaggtgagatttctcacgtcctagtaaattttacctagagtatcttaatgttacctctgttttggatgtgcatcactggacaattattatggtagtacttaaaatgcatgatatgcacatattgcaacatttgctattctcttgcaggctcagcaaggacttcattaattatcactgttggtccatctccacgccatcgaggagagactacaagtacaattctatttggtcagagggttagttcttgtacgatttcatgtaattgttaagggagtttggttataaagaataaaaaatcagtactgtgattatttgacaggcgatgaaggtggaaaatatgttaaagataaaggaggagtttgattataaaagtttgtccagaaggctcgaaatagagctggataagcacattgtggaaaatgaaaggaggcaaaaatattttgaagatgaaattgaaagaatacacttggaagcacaaaacaggattggtgaagttgaacggaagtttgcagatgcattagaggtttgtctaatcttcatacatctgataaatttgtttataaagtaattaagggttaaataaatcatttcctggtgcttcagtttttactatgtttggtgtaaatatactaattttctaatttctttctgtagaaagagaggctaaagagccaaatggattatatggaaacagttaagaagttagaagagaagttggtgttaaatcaagataaggatgaacgctgtggttctggtggtggtaaatgtaatggagaggtagtaataatttcttgttaatgtcacacttcctttaagatgaatatatgcactccttttaacattttatataaaagatattttgggaaactatttttgatgttccaagctcaattattttgatggtagctctcataagattgtatctattagcttgttcaggtttgtccttgttttgcaagtcatctattggcaaaagaagtatgataaaaagttaacgtttattcactttcatttgttataaacttgcccatcaactttcacatttatagttttccttcactataaggaaatttgatttgttgtagcctgtaggtagttttgcaataatttatcacattttagcttttgaattccaagtgcttccttttttctccctaaaatgtaggaacctgggaattccacttctgacaacattgctgaggtccggaaattgcttgataaagaaataaacctaaggaaggtggctgaggaaaatgttgaaaatctcaaaagccaaatagggtcagaggtattgtttatgaaatttcttaatgttggtaattgcaccgattatatctgttaatttcaaatcattggatttttgatatagagatgattacttttgggtatttagggtggtggagatatagagatgttaaagcttcgaaagagtctagaggaggaggtacaccagaaaaagaagcttgaagaagaagtaatagtcttacgtagtcaattgatgcaactaagttttgaagctgatcaggtatttgctttaatcatactttatcttatatgtttaattttttatggaacctttggaagatgatagcaatgatctttttgctattagttcaattgaagaagtatttgagctttcaaacataaaagcaggaggtatttactttaattattattatacacaactaaagattctaacacgtaaaaagtctgaacgatgtcatgattttttttcagctagttgcaagagcttgcttcttttgtgcccattatccatgatagttttagcttgcaggtcatatatgttcaggatatctagcatcatcttaatctttacatgtaccataatttagttttcaatatatttttaccctatttgattccacatatgcttgtagatgagaaagtgcctggaaagaggtgtgccccgaaatggagtagattctttaacgtctgcagtggggcattttcagcctaaagacatccagaatggagataaggcatcatattctaatctatttgaacaaggtttatacaaaattttcttttaagtattataatgtttatcatcttgttgacagttttttatctttatttttttaatttgttttttaaaatgttattttgacagttggattacaaaagatcttgtcattgcttgagtcagaagatgtgagtgttcgtattcatgctgtaaaagtggtagccaatttagcagctgaaggtaggttaaagtttcagtgagaatttctttttatatttcttctcccatgtattttcaaatttttctgtttcttttctagcaacttatcccaagtgatttcacctttgtcatattttaatgaacatcatatgtttaaattataggatgcactttttttcctctaaattttaacaaaccatcctatctgatgacgttgttttcagcactacaagtaattaatacaagcaaaacccatcaactattttcctgtattccttccctgaagcacaccatatcttagtgtttcatttggtttgctcttttagtgtatatgttttctgagaatcagttttctctcccatgtaataaacagaggcaaatcagaaaaggattgtggaagcaggtggtcttacttccttgctgatgcttcttagaacctatgaggatgaaactattcgtagagtggcagctggtgctatagctaatcttgcaatgaatggtactagttaattatgttgtttacaatcaagtgtggggcctttctttgttgcacttatgtttgaacttatatttggtatttagtttgcttttatctttcgtgattacagaagccaatcaagagcttataatggaccaagggggaattagtttgttatcaataacagcagctgatgctgacgatcctcaaactctccgcatggttgctggagctattgctaatttgtgtggcaacggtatgctcttatcctttgatgtgtcattttttctatcacttgcactcattttgttaatcatgtttactcaaaaataaaataaaatagataagctacaaaccactctaaggaccgaaggtggcattaaggccttgttgggaatcgttagatgtgggcatcctgatgttctttctcaagttgcacgtggtgtagcaaactttgcaaaatgcgagtctcgagcatctacacatggtaagcaaatgtgtttacttgctctttgatggtggcatcaaatgatgtaacttttacactattgtttcacaggcttgaaagctggcagatcatttttaatagaggatggtgcacttccttggattgtacagaatgctaacaatgaggctgcgccaatccgacgccacattgagcttgcactttgtcatttggcacaacatggtatattgcacgttgcgtttgtatataaaatttcacaagcgcttgcagtattattattatttttattattnnnattattattattattttcattgtttgatgatatgccgattctattgatgtcatattttcattattaaaaattataagctgttattgcagttcatgttaaacataacagttagataagagtaaaaaaaggtgaaaaaatagtgttgctaggtgtttaacaccaagttatttttattttctcacaacttagtttcttaactatgggttttctaaattacagaagtaaatgcaaaggacatgattagtggaggtgctctgtgggaactagttcggatttcaagagactgttcccgggaggacattagaactcttgctcgtcgaatattgcattcgagccctaccttccgttctgaaatgcgtcgattaaggatagaatgttgatcattatgtaatttcagatgaatagactctataaaaattcattagtgctgtataggttttggtgcagaactgttagttttgtaattcttatttctaaatgagggtcatggtgaccgtctcattcaattttgttttgtacaaaggaagcttgggcttcaatttgtaattcttgattatctatttattctatcctcattagtacttattacttaagacaaaagacgaaaaaattaagctacagaagaaaaaacgaaacatttgtagctatttgaaggcgagccttatgtttcattcactattttaaaggtagacgcactatgacacattattattatttattgtaatttattttttgaaaatgagtatcaatgttgtgtcttgtatcgaatgagaaatgttaaaagagataaagacaccaaccgtattaagcactatcttgaagaatattattaatctacaaggtgccgtgttttggtgccttgaatagacagaaatgattcataacttaatttgtcacctgtgtcattcaataaagatttacctctatatttcatgtttgaagttgtgttcagcagtaactgtagtagattatttcaaataattctgactaacgaatttttctgttcacatctattagaagaggaatggtgacgtgaagctaataaactctttccttggcagcttgatatatatacatgtctgcaattacaaaggtgaaattgtagaacagaactatggaggtgagttgagttttgctattagttttgggaaaaaagaaaagaaaatgataatggtccattcttcttctacgagattgagtaggttcatctgttgttatatgatatgaccaatgaagccctctataaaagctgttagtttttacttattaggcccatgtaatatcattcagtggttttggtccatttggacacttgctataaacttggtttttcttttctttttgggccatcgaattatatatgtaaatcacatcacaccaaatgcttagtaattgtaaatttagatggagtgcagtgcagagtattaatgtatctccgaatcccatcataactccatagttaaatgtgtttgggagagaatagttttagggtgggtcacctcctgagaaattcttacgttacgttgcatccctaaatattttatttttacctatccaaatgctcatcagacttctcaaacaggaggaggtcacattgccttacctaaggttgtagacagtgatgtttggtatgcaaatttaggagctagcaaccacatcacttcaacagcaggcaatctaaaccaaaaaacagagtatggtggtaagaaaaaattaataataggtgatggtaatcaaatcaatatctcacttatttggatctggttttttacaaactgagtctgattttcttttgatgttaaatgaactgttacatgtacctaagattgctaaaaatttgatcagtgtctctaacttaactagtaacaaaatgtgtttgttgaatttcattctgattgttgttttgtgaaggataaagcaacaagaaaggtggtgcttcaagggacttttaaggatggactataccaactcaacactccagcaactaagtctaattcccatttcatttcaagtcatcaaaccagtagccctacgtttacaggagtttcaagtctaattatattgatcagtttctatatatttccaagtagtgaatctttactttccaagaatgatgtgtggcataggagattaggccattcttaagctagaatcttaaaatatgttttaatctcatctaacgtacctattttacgcaatgaaactttatatttctgtaacgcctgtcaatttaaaaagtcacatgctcttccatttaagttgtcaaattctagagcaactagagtcctagagctaatccacacagatctttggggaccatccctaattgcttccatggtactacatttattttcttgatgacttctgtaggtacacttggttgtatccactgaaaataaaagatgaagcacttgatgctttcattcaatttaaggctttaactgaaaaccaatttgataggaagattaaagctcttaggacagattttggtggtgaataagcatttgctaacattgtcaaaactaatgggcttgaaataaaacacaggcacatagtagaaatgggcctaactctcttggcacaagctacaatgccactaaaattctgggttgatgtttcagacagtagtctatcttatcaatagactgctaacacctgttttgcaactcaaatctccctttaaaacattattccttaagaaaccagaccattcattattgaaagtgtttggttcaacttgtttcccttgtattagaccctaccaaacacacaaattttagtttcattcactcaagtgtgtgaatcttttggattcagctcaactcataaaggatataagtgtcttagttccacagggagagtttacatttcaagaaatgtaacattcagtgaaactgagtttttctttaaacatgggtttctaaataattatgccccaacaaaagaaattataattcataatgcagcttggtctaacttaccttttgtgcctttcacttaattcactcagaacaataattccaattctgttggtacagttctaccatctgattccctcacagcttctaaagcatcatcttccagcaaacacactgatcatctcactggtgaacaagaggtgagtgatcatgatcaccctgtaactgatctaatgcatgacactagtttaggtgctgcagaaatagtgcagacaaactaggaaggagaagaaattaatgtaacataccagaccttgcaaccaaaggtgccaactcatcctatggtcactagagccaagactggcatcttcaaaccaaaggtttatctcaacaaaaaatagaaccctctaactgaagaaccaaggaacttggaggaagctctcagttcaaaggagtgaacaactgccatgtcaaccgaagttgtggcattaaaaaggaagaaaacatagatattggtgccctactcacctaagttcaatttaattgaaaacaaatgggtctataaaataaaactccgaaaagatgggacagttgaaaggcttaaggttaggcttgttgccaaggggtttcatcaaaaccatgtatagatttcagtgaaacattcagtccagtcattaaagcagcaactgttagaatcattctggccattgcagtgtcaagaagctgggccataaggcagctggacaccaataataccttcttaaatggctatctcaaaaaagatgtgtacatggtacaacctcctagttttgaaaaccatgaaaaagtaaattacgtttgcaagttaaatagatccttgtatggtctaaagtaggctcccagggcatggtttgacaggctgaaaaaaatattgctacagtagaattttagaaattcccaaactaacactgggctcttctttcacatgacaaagcacaccattatttttgttctaattaatgtggatttattattgttacatggaataatatcaacgaacttaatattttcatttcaaagttggacaagcatttcttactcaaagaccttggttccctgcactattttttgggaatcgaggttcatagggatgattcaaaattgtatctcactcaaacaaagtacatcactgaattgttagaaaaatatgatatgttaaacaccaaaccttgtccaactcctatgattattggcaagtctctgtcaaaacataatgacactgttttatcgaatgctacaatgtatatgagtgttattggagcaatgcagtatccaagtcatacaagaccagatattgccttctccatcaataagctgagctagtttctgcagtgtccaacaacaagtcattggagtggagtagagagagttctaaggtacttaaagggaacaatgcaccatggacttcacattggttactgtgagaggctatctctggtaggatattcggatgctgactaggctagttgtccagataacaggagatcaattgcaggatattgtgtgtattttggtgattctctagtgtcctggtcttctaaaaaacaagttgtggtcttgaggtcaagtataaagtcagtgtactaggctttagctcatgttgcttctgaaatcacatggattgagtcactattgaaggaattctaagttccagttaccaaagatgccaataatctggtgtgataatctcagtgcgagtgcacttgcctttaatcctgtttatcatactagaacaaagcacatcgaaattgatgttcactttgttagagacaagatgcttaagaaggaacttgaaattagatatgtccctactacagtatgccagctggcacattcctattgattgtaatttttcttttctttttttctataaatgaaagagttgtgctcaaagcaaaatgagctgagatttatcaacttgtttttttgtctaaaaatcaaactgaagttaacaatttgaatagtggaatgtgacatttgtaatggatgagtttacaggttctatcactaggttcggtgtggtaaaaatttttctttttttttttt

SEQ ID NO: 16370 - DNA, 9764 bp, Cannabis sativa
ctcacttttcagattttgaattgggatcataaagcatgcaaaaggtgattaatcttaaacatgtaattgaacacaaatatggatatttcacaatcaagaaaggagaaatagtaattattattaactaaagacaatgtcaatcaacattcatcatctccctaaataggagtttagttcataacatccataatcaaatccataattaaaattgacacagaaaatagcatagaaaaattaaagagagaagaaagaactggttggagagatcgatccggatcgccacaagccgctcttgaagtctccgcctttatttttagggcttcaattctgaatgaatatcacttttcacgaactcctttttaattaagccttctctttaaaattcgtgaaattacaaaatttcccaaaaatcatgtcattgaggttttgccgcgacgaaggaatttctacaattttgtaaaactctctgtcaatccgcgtcgcagcgaaggttttcctcaccgcggcaagattaggcaacaaagtctcttgtttgtttttcttctcaattttttcaccacttgtcctcaattcttgtaagtactttctttaaacatctgggggcctgaaacaaaagaatcaaacgtaaatttgtcttaaaactagaaacaaagagtaaaaactacccgaaaatatgatccgaaacttagactaaaattagcctaacaaccgaaatccttaaatttaataatttcaatagtttagaaaaaaaatttaacggcttaaaaattcaagggacattatttaatacatatcaaaattcaagagacaaaaatcctaattagacatatatttaattattctttttcttgtataaaaccccttagagcatctcgaatgatccaaagagataatgttttattttatctctttttcacattatttttgaggcactcttacttctaaaaacacttcaactataattataatttataatctcacacattattacatacataaatttttttctttattaaactaatatatattgcacatttaattttttattttaaaaaaatcataagtaaattttaaaaataacattcttttatttataacgatattacatttttatattttaagacctaagctttctccctcattaaacattcttcaaaatgcgatcattaaaaatgctcttgttgtaagctgaagatcatcacagactttaacattattacaaacttttaacagaatattgcaacttgcaagtgtgccctaaggccaagtccaatacagacactcaaatacaaagactctcaaactgttttagtaacaacaaactaacagaaatagattacaacaagaagaacaaaatatagctcagcaactaaactccctaactgcaactacttctacaacctatagatacacagatccaagttgagagaacaacgtaaagccttttttcatctccttcgagctgagttagagtgagagggtagagagagaagctcctcggagctcaaaagaaagagacttagtgagagatcgagaaagataaatagagagaatatcattagagattatcaaccaaaagttctgtggttgaaatctgaaatcacacttgtaattacctattgaatctagtggagaatcaagctattatgtgtaactcatactttagggttttgtttctttgcaattgggctggaccgagttcaaactggactctttgtttttgaattttaccaactttcatggacgcgtgattaagtttgcaataataccataatatgcaattttattaattttgtgttttgcgagttagaacttgcagattctaacacttttagcttagttaattgttagttatcactaactaattctggttctttctcttttcatgtgcacctatataattgactctttcattcagccgaagaaaaaaaaaagacttttagtactgattattcattcaatcaatatacaataggattctttgctttgctaaagtcttttccctaaaaaagctattttatagtttttactttcaaataatactgaatattgaagcaaaatatatgtaagaaatattatttagactgtttttctgtgtaacaaaaagtatcacaaacataaagatcgtgagttacaagattattatctagctagcggatgataactcactcagaatacatgccagaaccgatactaaaggtccaacttaacattgtgtagaaaaactacagtgatgatcaaagaccaaccgtatatatagaggcaagggtgcaccaaaatgtcccatttttcaaatacgggatgggattcctcacctcaccttaccatgaatttaacttccattccaagtaccattgtaccacatactacatagggtgctaaataaacaataatataagctgcctagaggaaagaaggacaagaatttgatatgactgacagaattaatacaaatatgcctactatcatagtatgaaacagtaagaaactgtttcattataaccaaaaacctagtcatataacttaacatggatgatcatctctatttctggcctttctttctccacaagtctccaaacatttttatcccagaaccctttcgttttccactaccgaaaccatcatccaaatcaggagaccccatgaaacctccaaagccaccagcttggggctcgtagctaccaccgaaatgtttgtccatggagccacacctctcagagattctcccattcatgtccatgcctccggaaagtacagctgctgcagcatctgctgcttttctccactgctctgtctgcactcttatcttcttcatctcagtctcgagttcctccttggctgcttccacggatttcagctgctcactcagttgagctgcattcgatttgctgctttccaggtcttctccaagttgactcaacctcagggacatttcctcttccttggtttgaccagatgagatttttgaagcagcttcctccagcttgttcttcaggttttcattttcttgaccataaacatccacttccttttccttctcttctaatttggttctcagcatttttatttcatcattctttagagccaattctttcatggttgacttttctagctcctccaatgcaggtggaggctcaatagaaatgtcaactagtttgctgtctttttgaacctcctcttcagtgagttgactagtttcaagttttggttcaactgtcattttctccactagaacctcaaaaacatcagtttcctgctgctggttatctcccacaacatcattagagggactgatatccctttcattgaattcttgtgttacctttgggggtttctcctcctctggaactattggtttctcaatctttttctccaactgttcttgggcttctttctttgcagcctcagcagaagccagctgctctttgagattcttcagttcttcttgtgcctgcccaagttgtgattctaaatcagcaatgcgtgtgccaaatttcttctgagttacaggttcagattttgtgcctcttggggaacgacggtccaatggctttggactccgctcagtaattggccgatggtgtagaggatctgaatcagagcttgaagtcctgagatgtggtgggactctagcagctgacctttgaggcccttccgatgctcccctattcaccataccaaaaattcaacaacatttccttctaataaatgtaatacaaaaactactcaagccatttcagtatgcagagaaaataatacagtgaggatatgcttaacaataaccacatcaccaaggaaaacaaaagcatgcatgctcccatccatgtaatgaatgatatggggaaattcccatgtagcttgttcaggtatcaacccaagtcctatgaagccttttgggaaagtgcccaaaaataaaaccatgagagattagactcaaagcggatagtatcatactaatatggaagtcaatgtgacgtagcggccccacaaagtagaagaacagggcccaacaagtggtatcagagctgctaagggtccttgaaaaactcattgaatggccatatggaacatctaagatacagagtatcttgaaacaactactggattatcatattcaacttaagtgatgcaatcattaggttggttgataaagaagaaactccagcaaaaaattggaggaagttggaggagcaattccaacatggcttgatttcagttcactttaccacaacaaatatttgtgataacagacagagaattgaacaaaaatctaaagtatgaagctaaaacataaccccccaatgcaactttgtaatcatgataaatatgcatatatatttttatttcaatataaggtttcaaagtttctaaccttgatctcggcatttggttatactgatactgaacaagagacagtagaatatcaataaaagcgtgtgatctgcatattacgatacaagtagaagaaaaataagaacagttgccaacattaaaattttatatgaaaaacaaatgcttttggatatatcccagatcggctacaactacaagatcctaaattgaaggaagctgtcttcaacaattcaacccacttcaatgcataatgtggtgtggcaacaatgccctttccaaaccaaaactcttcactcagaacaagcaaaatgaacagcatgttagaatatatttgcatatactgtactgtaatattacatcaatttcttttaatatatttattaattttaatttatttcatatatatatcaaagaatatatgtaataatgtaacaaatttaatttcttaattgattgtgaaatatttaattgtggtggaaatttgatgaaccgtgtcacttatatttatatggtaaagagttagtgagaagttggaaatccgactatgagttctaattcttttttcattttcttttgcagatcgaagtttatctcaatccgtataatgttcaatctattatttcctctaacacaatctacttactttccctacttctgattctacggtttttatttggctagttatgccactacatattaatttaaagagacattttaacaattagcagcagaatcccatctgggttatggtttttattagagtctgaaagcttgacaggctcaaaaagatctacaggcttccaaggtttggtctttgctcaaatttatttcaaacaaaggcatatacttctatggtgtaaacatatcgaaacagagcaataatattagcatatcacatattagcatgcatgctggttttcctgtattctaccccccataaaggccaagcaatagatattgttctcactaagaaacatttgatgggcgttcaactttgacccaccactaagtaaaaaagttctaaggatatcaacgatggagattgcaggaatagagatctgagctcatttttgactaaactgtctttcgtttgtctacagccatgagtagaaccaaaaaaaaaaaaaaaaacaagggcctagctaagggtaaatacaaaacatctctctcacaagatttgaactctttcttttttctttttccgtcgttataggatatttccgaacagtgaatacactagtaacacatcattacaccaaggtattaacttgaattctcaagtgaagaaaaacaagacatgaaaaagatttgtagagaaaataagaagacaaaaaacagagaaagaaaatacgaaattctaaccttttaatgtaagtaaacagcaccacagtagctaaatttgagctaaaaaatgcaacggcataatcagagattcagagttgctgcattgaaattctagtaaagatgaataaaactactcagcacctaatgataatgggcaagttgcctagtagtggtggggagacaatgtttatgggttgttagaaagaaaatagttgtgggactgagaaatagtgtaataaattgacagctttttttgaaacacaaaggctaggcggtaaataaataaataaataaacttgcccagaaacagtttaagctagaaagagaaagtggcatagaagagagtgaggcctagagagagacagagaggagtttgaagtttgaattaaaggtgtttgaacaggctgagaagagaagtgagaaggacagtggctttggagaaaggcaagaggaagaggacaagagggtcattttggggacatcaaataattcaatatccattactgaagagagtgaaaaaaaaaaatactaataattcaaaatctatacaatagtaatatacatatttctattatggctagataggggatctttgggaatccaacctgtatcttaactcttgtccttttgtcccattttaaagttcaaacctttttctattcacaatgttttcattttttgttttctctctactttttcgatgacaatacgtgcgtttggaccatacgactatatatatatatatataaaaataagtccaggtgtgcatgcaaagcaatattatacatatgggataatttggatatttagctctcaactttaataaattttggcattaaaattttttcttcaattattaaaattgttaaatttaaaaaattttatctaattttattaatatagcaattgtgcatatgctaaactctacactcaaattttaatatctactaaatttataaatcatgtcttctaaactttcaaaattacaaaattgtatcttttaaatttttattcacattaaattttgttaaataaaattacacagaagttttaaatctaatatcttaatagttggggaaaaaattttaatgacctaaaaaatttaaaagacataatttaatacatgtcaaagtttagaatacaaaaattcaaattagcaccatatgatagttggaactctctttgccttgtttctcctaaaagctctgcattattgtacattaagatgccttgattaattatattatacagtttatttcctttataaaagagaaaggtgtaattttttttatattgcatttgttgggaatttgggaacttgggaacttggaagttgaaaagtattattttatgttttctttttctcgatgattaagtatcattttgttatttcccactttatcaaaaacaactaactatggtggccaagaccaaacaatgtgattagtatatatatttgaattcacataattagtcattacaagtgtagtagtaatgagtggattcaaccaaaggaaaagagggttttctttacttcataaataatatcaacaataatgaaaaggtcatagaatgaaagaaggaccactactcctctttctcattagtctgtccatttcatgatgagaaagaaaaagagtacaagtagaacaacaccacgatagaaagttaaaaaaaaataaaaaacatgtaaagctcacttttatagtttaacttgaaactagacttaacaagtaggctaattagcaatttttttactcgaattttgacatatgttaaatcatattcttaaattttttttgccgttaaaaatttctcctgaattattaagattattaaatttaagaacttttgtctaattccattcaattttaatgttttagtaattgtttatgtacaaagtcatactccccaaattttaatatctaccaaatcatgtccctcaaacttttatatgtactaaatcatgccccttgaactttcatcatgctataatttttttattaaaattagataaaagtccttaaatctagcaattttaatagttcatgaagaatttttaacggcaaaaaaaattgagaaaacatgatttaatacatgtcaaaattcttcgagaagaaaaattaataattagcctaaaaagtatcttgcgaaataatatacctcttattgattgtccaggtgcaacttgcaagaagtgggtcctaggatattgaaacaaacaaatgatcaatttacacaaacaatgatccataattaaaattcaactagaaacaagaaattaaaaatatatataatatattgatacatatacaaaaatcaatgattgataaaaatattattagtatttacttttagagcataacaacgaacatcgtaaagtacaaaatacaataacccatatctgcattattatgaacccaagactcataattattattgctaacaatttcttttttaaaccaactagcatttaacccaccgcaggtcaacaatcgaaacatggttctgaaatcaattattagattaataaatctatgcataatataattctaatatggaatatatacagcaacgagaaacttcacatatataatgcatgcaaatctccacatattgatcaggtatataaattttccaaaatctggtatttccaaaacaatttatatgagtagatggtgtttctttcttttttttttctttctttttctctgaaaggagatggtgtttctaaaagaatgaatattatttcccatcaaaatctatgccatcatgtttgaatatttgacaatatataaaattcactttgaataaaataatgtttatcatagaattaaaccaaatatttaattttttgtaaaacgatctacaaattgtgtcgcttatgttgttgctagagccatttgttatatagttgattgtgatggggctaatactacaccggaattagcctctgttttgatggctgatttggtttaataaaattctgaagtttattttcaaataaaaaataaaaaaccaaatattcactttgaataaaattcgttggagtatttacaaaattctccccaaaactcgtgtaattgattaattctgtaactatatatactaaagcactacatgctaactttttttttccacatatattctgccaaaaaccattagaatgaaacacccataataccttatgagatttggtcagttagggcatcgctctagactcacatcttttgttaattataattcaagttgtcgaatccaaagtgctcaaaaaaaaatgactccttttgttaaatctatggaacaatttaagagagatggtttagttttatgattatttatgttgcataatttgcagagatatatatattatttcaaaatcaatagcgtggaataaaggtgacgtggtccatactcataacttaattgatgaaaagcatgtatttaaggaggtccaaaccatgaaaacttaacccaacaaccatgcatggtccatagcaaagcatgtgaaaccagtgaaagtagatcacctttctttcttatattaagagacatagcatgtgaaacataaatggttttgatatctcttccacctactccttaggcccaacttgattcattattaccacaattcttctcacacattattcgttgactctaccacaattggccgagagtatcgaatcaaacattgatacaacttacaagatatgaaaatgctactcatcagtaactttacataaaatatagaagggaaaaatgagtgaataattaacacagttttttcaagcacttaaaaaaatcatttatatacttaacattacgtggtttggtgactcatgggaaatgtatatatatattaattattatctcaccatatgactaacagataacgtataaatataatacatgcttttatggcagcattaactagtcttgaaacgccctcgattagaagggcagttgagattaaattatcaatacactaactaggtccaaaagtacaaaaatttctaaaagaggacggacaatatttagtacgacaacatattttcaaaaaaaaaaaa

SEQ ID NO: 16371 - DNA, 2036 bp, Cannabis sativa
tttcaaatatggtaaccttttgtattcagttattcataataaccaaagacaaaagtacctcatacgtgtttggttactacaataccttttttttttttttggcttggaacatctagttcgagttttttacaagctgaatacatattgtagcgaaaaaactgaagatataggttaattttgtagttgtgttattttgggcaaaagttgtttttaggatattaaatgcttagaaaggaaggtaatcattagagatattcataaggtatataatatacgagcttccaacagtactctcagaaacaattagtgacacaatatcatcaaatgaattagtgaccgctctcccgtttactagtgtgttagctaaccctaaataaagaatatgtattttcaaaaaaaaaaatgaaagagtatgtaataaatatatatacactgtgggctacattcataatttatgtagtatatatatacatacaatacaaggattctaataataactacattgaagattaattggaccaaaaaaaaagaaattgttagatcgaccccacgaaccattcatgagtttatttgaaaaaatttgcttttcaatgaagagagaagagtatatagtgtataatatataaaggcaattcacatgatattatattctttttttcttcctaaattgatattatattcagttgatactctcttcattttctttttattccaaccagaggtccagaactgtagaccgctcttaaacataaatttcgtaaaataacaatagaaaaaccttatctttataattatttatttatttttcatttttgtgaaaaagaaaaaacattatctggtttccaaataatattgtgtatatatatatatatttatatatcataattctatatgtgtatatatataaaatggaaaaaatatttatagagagatatagaaaacttaaatatagatatacatatgataattaaaaagcaggagccatggaaagaattgaattatgcagagcaaaatagcaatgattgcgcgaagaaggggatgatgtgggagccacttttatcatctttccttcaccaatcagtttcttattttattttattttctttaatcttatttttgacttgtgatcagactgggtcccatacaggtttgccccggctaccaccactgtctttggcgattgaatgataaaagagcaccgcacgtggagtctgaatcaagggactgtccaaccacaataaaagggcacaccccctttattttctttttcttaaattcaattaattaattgaattataattcattttattttactttgtaaaaaaatataatgattcatttgaattgaagaagaaattcaaggaaaaaaaataaataaaacaaaaacaaaaaacaaaacacacacatataattcatactcattattttcgttgcttaaagcttgccctcctcttcttcttatcctctcctctctctctctctctctctctcacacacacacacacagaaaacaacttcacttggccaaactcccatatgaaaggaattctaaagagacccacttggccaccactaagtgatagaattgaggatcatctacaggtatactaacacccaaccaagtgaaaaaagaaaacaaaaaatcaaaagaaccaaaaaaataataccccaaaaacacataaaaaagtagccatatgatcatggaagctgaaaatgggatccgcaggcctaatttcccactccagttattagagaaaaaggaagatgaccaagcatgctccaacccgggctacaactccttagccataacagtacccgtaccatccgacccaaatcggcccggttctctccaagtaaccgagccatcaaagaaggctcctccaaagcgtacctcgaccaaggataggcatactaaagttgatggccgtggccgtcgcatccgaatgcctgccacttgcgctgctagggtttttcagttgaccagagagctcggtcacaaatccgacggcgaaactattgagtggctttttcagcaa

SEQ ID NO: 16372 - DNA, 3278 bp, Cannabis sativa
  modified_base (116)..(122): a, c, t, g, unknown or other
  modified_base (238)..(262): a, c, t, g, unknown or other
agactgtgtaggtatgagactacatagttgaagtgagcttaaatggattgattggtactacctaaatcaagagggtgcatcttgttttcggtaggccatcacgaaagaactccacnnnnnnncgtgcttgacttggggcaatttcatgatgggtgacctcctgggaaaattttcccaggaagcgtgcgagtgaggacaaagcacgctggaaacccttgtgttggtctgtagggtcagnnnnnnnnnnnnnnnnnnnnnnnnntgacgtactcgtgtataagaaccattcatgtcgtgaagcggtgacgttacagtggcgactggtaaggcatcatgcataaccttccaagtaaaaatcttgattttctgtggcaaaatgaaaggactaaaatttttttcaccaggaatcttaagctgttgaagctgaagagtgatgtaacttatctaagggggctatcaaatggtaacatgttttgacattatagatagcactttcatggcaatgccaaattagtctatgaggtttgccaaaaaatgtcaatgaaattgtggcaatattactagcatctatgtatgagaagtggtaaattccattccttgttctgttatgtatgttgaaacaagagcagtaggtggtccatggaacaaaattggttggaaagtagaatggttagggatccaaggctgagaacaacaagaaactcaattaccagtccttattttccatctcaaaccctataagcctctaccacaacaaattcctctccatgtcatagatggttgatgtccaatcttagcatccaaaagagaggattcagaataatatttagccttaaataagcgactaagaagagaattcggcatatctaaaaagctccaagcttatttagccaaaaagaattaattataatgaataaaaatacaaaattccaatcctccagcaattttggttttacataagtacattgttttcattcgtgtatagaatgcaagtgattgtggcgttgatgtcatggttgagttgattctttttgctaagtctttttgtacatgttgttactgtatgtttgtgtctgttttttctttgattagagtatccttaatttatatttgtaatactcgaaatttaatctttagtatggatatgtgcttatatatatttactatttttattgacatgtatataagtgcttgtatttattagggtaatatttaagtggaaaagaatttgactataagtgtgtgtttagtcttctctagttgatattacataataactaagtagaattgtttgatatgtagtgcaagtaatatcaatttagcttagtagcataaccgtactcagtggtatagttttttcattcaaacaaaaatttttttcttcattattttctattttttctttttcttcatcttcttcacatgatcgacatccaccaccaccaacatccatcgaaactaccactatctaccaaccactgtatcatccacaaccaccaccaaaaccaccactacttaccaataccaataccactaccgtaccttattttttatacttaaatcacacatacacacacaaaaaaaataaacaataaaaaaaataaacaaaatctgagaacctcagatctgaaaacactttcacattcatccaaccccagatccaaagccttctctcgcaacgcctccaccgctccttctcttgccgaaaaacttggcgcaaatttgaaaatgacctccctctccacctggggcttcttcagtcattagacgactcgggaactatggatattgggtttcggatgatggggaagccattcgtggcttccattttggccgtggatggacagagacaaacctccgacgttgggctgagctaaacgctgagagagaaagaaagaaaaatgagagagagaaaaaagaatcgggttggggttttttgggtcgtggggtttgattcagagggtggtttggactgggggtggtcggagaatggctgagttgtggctgtgcgataatgaacaaagggagagaatgggagatgcagctgagagggaattagggtttctagtttttaggttccaaaattaggggttttcttttttagtttttaatttatttatgttttatattttatttatttcaaaatttattttttttcctaatttcaatttttttttttttaatttttgattttttaaataattatttacatggaccaataaaattgtgtcatgtgtacattatgtccgcatagacaatcactgtgtacacgtggacattccaacatggtacttaacacttaaaaatggataaaaatgttaaactgctaacatactacgagttttagagattttaccactaaaattttagaattgaaggttagttgcaataaactagacaattataggagttatgccgcaaatattttattataatagcaattagtatatgagtgaatattaaaaaaatcctaacaaacagtcattgtatagctccctctccaaaatctcatacaccagaaaaaaagtctttcatcttttactcttctctttattcttaacattttaagtctctaatcaatgcttgtggatttaacacattaaattttaaatttgtgaaaaggtatgaattaacttatttgtttatttatagtagaaattgatcttatacatcttttataaaacatatatttctagataattaaatgatacatttttcctaaagaaactttttaatgattcggaatccttctatatcaaaaattaatttgtatttaggtgctgttgccaaaacatccatagtgtcccacatttttgtgtcaaaaatttgtgtcatatgctaatttgatgatttatattttatttagagaaacattaattcaagaaagttcttacttatgtaaaatttgtatcaatgcagatttcgaaaacttccatatttgtcccacatttttgtaaggatgtatatattttaagttgtatgaagttatagatattttgaataaagttattttattgaaaaaaataataatgcatgtatactcattaaatctattttcatttaatgtttaattcatgtgggactttatttaaatctaaaatcttcaacaacccaacccacacttaaataaaggactacaatatcttttcataatagaagttttttctcatgaagcaaactgaacagtttacctttctccttcaagtttacttactcaatagcttcattatccaggccaacaatactgcatattgtaacgtccccgcttcaagcctcca

SEQ ID NO: 16373 - DNA, 6589 bp, Cannabis sativa
ccaaagcttagtggttcacctctcttgtaagtatctgctatctttcaatatattatacatacttttctcagaagcaatttgacgaacgctaacgacgcaagttgagacttttctcttttccttttttgtgtctggacattgctatcttgtgttttgattttgagttgtttttgattgttagctctttttgatgggtctgttagtggtttgttcaacgagtgtgtattgtggtagcttcagttatacttgtgcatttacagagactgtagtagcttcttcgattcatagtgagttatttaagagacgaagctctggaaatttaaaggtttggacatgtgggcacttgggaaatagattgaaagtgaggaagaatcgaatgggtttatgtgggtttgttatgaaattgccaaaggaaggggtggaattgcttaaagataagaagaaagttgtgaaatcttcagaggaggtaatgaggattcttaagtctagtaaggacccaaattctgctttttcttatttcatggttgtggctgggttacctaatgttgttcacaccactgaaacttgtaattacatgcttgagttgttgatgaatcataagagggtggaggatatggctgctgtttttgatttcatgcaaaagaaaattgttaacaggaatttgaacacttatcttgctatttttaaaggtctttacataaggggtggaattcgccaagcaccggctgcacttgagaagatgagaaaggctgggtttgttttgaatgcgtattcatataatgggttgatttatttgcttctccaatctgggttttgtagggaggctttgaaggtttacaacagaatggtcatggaagagatgaagcctagcttgaagacttattcagcacttatggtagcgtttggtaagagaagggatactcaaactgtaatgggtttgttagaagagatggaacatttgggattgaggcctaatatttatacatttaccatatgcattagagttcttggaagggctggaaaaatcgatgaggcttatgccgtattgaagagaatggacgaagagggatgtggaccggatgttattacttatacagttctcattgatgctctttgtaacgcaggtaaagttgataatgcaaaggcattgtttgtaaaaatgaaagctagccgtcacaaacctgatcgggtaacttacattactttgttggacaagttaagtgattgtggagagttggaaactgtaaaagaaatttgggatgaaatggaatctgatggttatgcacctgatgtagttacattcaccattcttatcaatgctttatgcaaaagaggtaatgttgacaaagcatttgatactcttgatgacatgaaggagaaagggatctcaccaaatcttcatacttacaacaccttgattgggggactactaagggaaagtagattggatgaggctctaaaactttttggtaatatggaatccctgggtgtcatgcctacagcttatacatacatcctgttcattgattaccatggaaagtcaggtaattctgtcaaagctattgagacctttgagcagatgaaaagtaaaggcatcgtgccaaatattgtagcttgcaatgcttctttatatagtcttgctaaagcaggtagaattcaagaagcaaaagaaatttttgatggcctgaaaattagtgggcttactcctaattcggtaacttacaacctgatgatgcgatgctatagtaaggtagggagggtagatgaagccattaagttactttctgatatggttgagaaagggtgtgaacctgatgtaatcatagttaattctttaattgacatgctttacaaggctgaccgatttgacgaagcatggcaaatgttttataggctgaaagacatgaggctcactccttcagttgtgaccttcaacacattgcttgctggtttaaggaaagaaggccaagtccaaaaatcaattgaaatatttgagagtatggtagagcacggctgtcctccaaacacaataacttttaacactgtcctggattgcctttgtaagaatgatgaagtgccatttgcattggaaatgctttgtaaaatgtcaacaatgaactgccgtcctgatgtctttacttacaacaccatcatttatggattaatcaaagaaaacagagttaatgatgcattttggtttttccatcagatgaagaaatctctatatcctgatcatgtaactatgttcaccatcattccgggtgtcataaaggctggccggattgaggatgcattcaagatcgtcaagagctttgtgtaccaggttggggttcacgtagacgggcccttttgggaagatttgattggagggacactggttgaagctgacactgatacagtcattttatttgttgaaaagctagtatccgataaaatttgcctggatgactctgtacttgtacctctaataagggtgttgtgtaagtgtaagaaagctcttcatgcagaatatttgtttgaaaaattctgtaggactttaggattaaagcctactttggaatcattcaactgtttgattgaagggcttcttagagttcatattactgacaaggcttgggatcttttcaatgaaatgaaaagggttggttgtacccctgatgctttcacctataacttattactcgatgcacatgggaagtctgggaaaattactgaactctttggattatatgaagagatgtgtagtaggggttgcaagcctaacacagtcacttataatatactcatttccagtttagtgaaatttaatagcgtggataaggctattggtttttactatgattgcgtaggtcgtgatttctctccctctcctagtacatatggacctctcattgatggacttttcaagtcaggaagacatgaagaagcaatgcttttctttgaggaaatggtagaatatggatgcaagcctaattgtgcgattttcaatattcttatcaatgggtatgggaaagcaggagatgtagacacagcctgtcagttgtttgaaagaatggttaaagaaggaataagaccggacttaaagtcttacacgattcttgtggattctttctgccttttaggaaaaattgatggtgctctgtattactttgacgaactaaagcaggctggccttagtcctgattcagtttgttataaccttttgcttaatgcacttggaagatcacaaagggttgaagaagctctatctctctacgccgaaatgcgaagcagaggaatttttcctgatctttacacatacaactcactaattcttagtcttgggattgctggaatggtagaggaagcagggagtatgtatgaagaactacaacttaagggctttgaacctgatgttttcacctacaatgctctcattcgagcctacagcacatcagggaatcaagaccatgcctacgcaatttacaagaaaatgatggttggtggttgtgatccaaatgtgggaacgtttgcacaacttcctaatcaaacttgagcgtctcacttcattggaatacttacgtggtagttttactttccttttctatacttgtataatcttatttgctgcagataaaagtcagtttagtttcaaatttatcatgttatttttggtttgtaaagtgatatacatgtttgtaaaaaaaaccctattgatgagtgaagtatattattctttatgtacaatgtcttatgttaagagctccgttggttttcttccatactcatccccttgggtggactatgaatagatatttaaaggatcacggtgatattgatcggaatgttgctccatttgtgaatatgtttctgaaccaagtttcaaaattgctttctacattcattttggtagactttgtcagcactatgccctcgctggccataatgccactctttgcttttgttttatgcagcaatctattatcaggtagtgtaaaacgtcatggactttcgatgttgttatgagaggaacacttgcatatgtttaacaagttcatggattgtcaatgcatctgtaagtatttattaaaaaattcttagatttgtatatgattattggactgtaatgtagtatgcagtataatcttacaatctctaacaatggaacttgatgagacatgagagtggtgaattttgttatagtttttgaagacatggtacaatgaattgcatattcttataggtacttgacaacatcttatgcggatcagcttttgcttttgcaagatatgagaaggtgcactgctgtgctgcatgcccttgacttgatacctgtaagtgatctcaacgttacacgtttctttcgctataccatgaaaatctgttattagttttgagcctatggtagcctttctcacgagcttcatatacagggcgatgtatatttgcccttctcccctgttaatgaactgtttttctttagcttcctactttatccagggaaatatatcataattttttgtgatttttttgaaaaaccccttccaccacactagtacttgcatgggatttttgatcaatatttgaattgtgcattgtcgttacttatttgttcagctcatgcaaggtctgctggttggatttttgtttaggaatcagaatctggaaatcctattactcatcttatgtctcttctttattcaagtattatcttggtgtggaaagcctttcttatcaaattatttactcctaatgttcattgtaattttgtgggaacagacacaagtcataaaggaagatgcagaaattgtgtacagacaagagaattggccctcatatcatgaatgaaattttggcagcaatggacaagtatgttttttttattcttttgaatattattattgtttgttttctccctgatagatctggtgtttactgggaatatcttgaatttgaatcaggtttcagtatcttccagtccaaggtacaaagtttagaaaagcatcactacttggagcggtataagcattagatagttccaaattcattttgaaagacaaagtttcatttcatgttatcatatacttgatagtgtatacatgaatttgtatatttataagaagaaaaattaaatattgtggcatatcttgatggtatatagcacatggtttcatcaaaccttacgatttttctgatctaaataaagtaggttttacatgaagaagatttagctcaacatgttctattcgattcgagtaagagaagagtctgactcggtattcttaaaacaaaaatagagaagttcagaactaagtcaagatgatacaactcaattcctttttcttgcaccaaaaatcttactatttctgaagcaactggagttacatcatattaaatagtgtggtatatcttgatggtatcctgtgcccagagctcagaagtgtacttgtctttttctttttttttgaaaataaactactttgtattattaggaaaaagagatataaaggtatatataagaccttatctcataagaatcacacacaaacacaataaataagtaaatcttgataatagtgaagaatattgttttacatgaattaaatgaaaaatagtgagctatatataagaatataagttactcgacttatcttcaattaattttgaaatagaatctcatatttattaacatagtattagagctatggtactagatgctgtaaagacgtttgaaatccaaacaaaataagatctaggtagtacaaatatctaaacaaaataagatctagatttgatattaattagtattaagtcttacataatttaatttataactagtgtcactttatggtggtggctgctaaaatgtcaataaaaaaattacattaaaaataattaaatattatttatttttaaatttaataattatactacaaaataaatttaaagtagacctaaatattatcttttgacaatcaagctcccatttaggaaaaattccgagttcgtcaaatgcaaggaattttaataaatttagtggaggttggtcgaacacatttgacttcagtctttttttattttatattttcaaaataaatatatagaatttgtttttcttttttgtttttttcaaaaggaggaatgacatgattttcaacttccaattttattaaacagaaaaaaagacgtaattatttataattaggttgacaccacttgcatcctaattcctagttaacaacaattattctcataaataaataaataaaaaaagactcttaacttgtcatgtgcaattgttctcttttgttattttgtgaggtgtgtggaatattcaactataaactattttttaaaatttcccgctgactgatgtaaagctttgtctacccttgtttcttttggaagtcaacacaagaaatatttgaatccaacactttccttcctttatattcctcttcaacccatttaacacattcccttgttcttctcactatttggtttttcacttcatttaaatctaaaaaagtaaactgggtatgtttcttttttgaattgtttcttattggagaaccaaatatgaggtttgagctactaagttggtattgta

SEQ ID NO: 16374 - DNA, 2384 bp, Cannabis sativa
  modified_base (1108)..(1108): a, c, t, g, unknown or other
ctattcctctaatttcttttgaaactcatttatattttccgataatctttgtgtggttagtccgtctcttactctttcaatcactgatctcaacgatcaaaaggaagaaaacactaattaaggtaaaaaaatttcaaggtttttccatcaagataagacaagtttcttgttcaaggaagaatagtatgatttttttttttataggagtatgtgataaatttatctttaacttgataaatcttgaatcttttaatgttgctggaatttttttagctttgttggaatttttcattgtgacagagaggtgtagggatgaaattggaactttttttgtgattttgttgtaggttaggattgtatttggtattttggattaatttaggaataatatttgccaaattttctcatggtcgtgatctatgagtattggacagaggaatgtgtttatttgattgtggttggcgctatttgacaatatattgagggcttaaatttcatgtaggatatagatggggaattttaaattatataattaactaggcaatgataccgcgctttgtgcagttatttagaaattttttatttatgttataaaaaataaaatttatatttaatatattaaaagaaaaaaatattaattaatcaatatattaatattctataaaaaaataaaatgttataattttaatatgttaaaatattaagtaacattattgaattgaattattattattattattatattaatatctatatattaattacaagtacaattattttttaaaatatgtgaaagatttaattaagaaaaagaaattattttaaactaaattaaccacaaaataaataatttaaaattgacaaatgttagagactcaaatcatcatttttgtagtttgcattatatatattaggagcattgaaaaataaaaacacaaaatctaataagtaaaattaaattagaggatgaatagtttataaataaatatattattaaatatacagaataatagaatatctcttttttgatagaaacatatatatacatatttataggtatgagattagttattaagtaaatatattacaataataataataataatantaataataataataatagtgagagttataaaaaaaatattttattgggtccaacgattgtggaatttagcaatgtggtcagaaatgtcacgacattgaagggagaattattttgagagtattccggactagattagaatttttagaatgtcggcttaatggattagtaaaattaccaaaatgcccctaagttattttcaaaatgtgttagaggggtagattagtctttcagtattatgggatttttgttttgacttttagggctgtctataattattttttttaaaacaaaaaaaaaataagaaagaaagaaaaaaaaattaaaaacctatttaaggagataccttacaaggcaagaaaccaaaaagaaagcttctcttttcttcttcctcttcgagcaagccaaagccagccccccttggggatttttcttcagcaagccttccttttctagcagaatttcaatcccaagtcagcctagaggttaattgaggtaggtttcctactttttggattgagaacactagtttttgagttagttttgaagtagggttttacttctttgttgttgtaggacttaaactaggtttggggtgtatagagtaggttgttgagcatgttgggaatggttttaagtggtctctatggctgcttgaattggatttcgtttgttgaagccaaagttgagttttcttcactttaaagtgtgattttgagcaaattaataaattgtgatgaattagttgtttggttgtgttatatttgctatattaaactggtctggaaggtttgagcaggtttggtggaggttagatcggttttcagggtgaaaaaccagaaatccccatagctgcccaggaaaaaccgaaaaagcaactggcgaaccggtcgaccggtttggccagcaggaggggattttggatttttctcctcaagtctgatatgattcgtggtattttctagagtgaaattcagggtgttttagagatgtttaagctagtttgatctgggggaaagtagggtgtgtccgattatgagagttagagtctattatcagaaatttgactaagatctttattgagttttggttgtcgtgacataggaccgggatcgcccagcttgttttccactcaagtcggcccgtacgtttgatttctgaactaaggtcaaaaaagtggtaagcaccatatgtggtgaattgttgacggttgaatgactatatcttgattattatcaagattctgattaaaagtatgttgagcctaggttatgaccta

SEQ ID NO: 16375 - DNA, 7204 bp, Cannabis sativa
  modified_base (6153)..(6156): a, c, t, g, unknown or other
atcaacttagcaccaacaaccatactttgtgtggttgtatatgcttaaaaggggatggcttatcttgaattgtgaaaataaaaatgtttggaaggatatgaaaacaaattgataaaatttgtattatatgttgggctaaactcacgcaggttgatcgttaaatgcaatatcagttgtatattcattgaagggagaagttttgggaatcagcacagatggaaagcaaagagttcaagcagtggagctgttgagaagggcaagtctgacagcttgtatattgacaagcgtggaaaattcagaagctttaataccaagaagttgtctaggaaacgatgtacattactttttggactcattttataaaaaatttaatatgtattatcttcaagtttttactctttcctttctttgtattaattaggtggttctttaagagggcgaggatggaaatatggatcaggtttcgtggatggaatttttccagtgatgagccccactgcccaaaagattctagaccttgtactggaggaagagatggatcagaaaagaatttggcaagttcttgatactcttccagcctctcatgagatatgggatgacatcataaatgtagctgttcaacttcgtctaaataagcaatggggtcctataatgttggtgagaaccaaatactattctgtttaaactattctttttctctgtgatactggtcaagggtgggtgcaaaatcacttcacaagttttgtgcttgagcactttcatatgaccttagactcaaaatttttaatgttaatactacttattttattaaatgaccaatctttatttattttgtattttaatgctaattagactcttattctgatattctatcaaatggattttacacaagtgtgcatagtaatcatcagcttaaaacagaaaattacaaacaaataggcatatgaaagcattaatcgtgttaacattgtacagatgattgtagtcaaatccctattattatttgtctgatactagattggatgccatactgagtagccaaatttggaaaatagcttgtatgaataatttgtggggagagtgatgcagctaaatgagtgcctttatcaatcattaccaaataattattaacactggttttaatatcacctctccagatatctgagtgggtactgtacaaaagctctttcaagccagatgtcatctgctacaatttactcatagacgcttatggacaaaaatcactgtacaaagaggcagaatccacatatttagaacttcttgaagctcgttgcatgcccactgaagatacgtatgcccttcttttgaaggcctactgcaaatttgggttgctagagaaagctgaagctgtatttggcgaaatgagaaaatatggccttcctccaagtatggttctttatcaacttttatctacatgtatgctgaacagaggtgttctagttaatgttcaagaactacacgtatgtatgatagttcatcaactgtaactttccaatgattatcttacttttgattgagttatcagatggtgtagttgagtcatttgagaacttcccattattttctagacctactgtttctcactatacatggcttaccaggctactggcttttttctatattcatttatactgccattcttagtttcactgtttcatgcttatttaacttcgtttactgatatctgacagccagcagagacatatcttatactcttatcttatgtttagaagttcataagtgattatatttcacttcaaagactaggatggacaactttccaagtgaatttgtgaatatttcacttattcctttctttagtaaccttgttttgattattgaccctatctgttgttttttctgtgtactaaggatgagatcaattaatgcttctttagctagtaacaaggtgtaaattggaattgttttaatattgtcaatttatgattaaatatcatttattcaggcacagtcgtgtacgatgcttatattgatgggcttataaaacaaggaaagcctaaaaaagcaatagaaatctttcaaaggatgaagagagaatgctgccagccatctactaacacttatacaatgctaatcaacttatatggaaaggttagctctatttaattttaattttttgtttcgcctcctattttgcacaggtttcagtcatgtttaccaaattattcaacatcatcatatttttcaattacagaaaatgctttattatttcagtacatatactatgatgttaaaatcagtacaaatactgtgaatttgtgaatatttgaagagagattcacgagtattgctgggtttttttttttaatcctttctttcattactattaaatctttaaaagttggagttatatgcaggaaagtaaatcatatatgtcgttgaaaatgtttcatgaaatgagaagtcaaaagtgtaagccaaacatctgcacatatactgcactgatcaatgcatttgccagagaggggctctgtgaaaaagcagaagaaatatttgaacagctccaagaagcaggtcatgagcctgacgtgtatgcttataatgcgctaatggaatcttacaggttagtatctacaaagtctaaatgccccaagtgttcaactgtaaattgtatttacagaaagatagttttatgtacaaatttcatttatctagaagaaaaaattggtgatgatttgtgaagcacagctaggaaaattactgccttgttttggccatttcaaaggaaaaacgtttggcttaatgaacaaaaacatatgaagcgtctcaatttgaattggttgatgagtttactttcgatacatgtcatcatagaagttgcatatgcataattgtgctgtgtgacagatattatcactataactcttctaatttgctacttctaaagaggttaatacagcaagccatatgtgcaaataagaaatcttatttgagacaagtataaagtgttattaatgttgactttctggtggaaaactaaagttaattttctatgcatttttcctttacggtgctttgacatgcataatttttatgactctcttcaatcagtcgggcaggttttccatttggagctgcagaaattttttcactcatgcagcacatgggttgtgaaccagatagagcatcatacaatatcatggtagatgcatatggacgagctggtcttcacgaaggtataataaactaaaacttggaaatatcccattttgtcgacttcaatttctgccctactttttctgacatttaaaatccagcaatttacaaacattcattgatattcttcactgaaccaacttttaagaaagaaaacttgatactagtattaatgatgaataatctaaccaaaaaaggatcctcctagagcatagtgtcgtaaggaaggtcctcttagagcatcaaacactaggaatgatgttagaagtcagcttgcaaaatgttattccattttaactaagcaacaagggaataatttagatctgtgtacttgtgcaaggattcactcgaaaattgcaatcttttcacaacggcatattccatgtcccaaagattccatggaacaattcatccttttgcaatcccaaacagttttggtgtaatgccctatttatcttaggcttacatatgatttaacaactcatatcactaaaatctatcagccatgtttgtttgaatattgaaataactctaatcctctatcctgaacttttggtattgttgtaacttttctttcccttcatatttagatgctgaagccatgtttgaagagatgaaacgtatagggattaccccaacaatgaaatcccatatgctgcttttatctgcttactctcgaatcggcaatgtagctaaatgtgaagatatagtgaatcagatgcaagagtatggattggatccagacacttttgtcataaacagtatgctgaacctatatggtcgattagggcagtttgaaaaaatggagaaagttcttgctgcaatggaaaaaggacaatataaagaagacataagtacatataacatcctgattaatgtttatggacgggctggattttttgacagaatggaagagctcttccaagcgattccgagtaaaaatttaagacctgatgtcgtaacatggacttctcgtcttggggcctactctagaaagaaactatacacaagatgcttagaaatttttgaagaaatgattgattctggttgctacccagatggaggaaccgcaaaagttcttctttcgtcatgttcaagcgaagaacaagttgaacagataaccacagttattagaacaatgcataaggatagggaggatactttgcctgtctgatgtatacaagcatattcgtctatcactggttaggtactatttgtacagaggtttcctttacaaaaatatatgtagaaaacagttttggttcaccttatcaccattcgtgtacagctacaaataatggttgtttctgaatttgatgatcttattggaaaattatccttcttccaaatgtatggttgttgtatacagtaacaatgggaacattataggattagtaaaaggaaatggcctaaatattcctgttgattattgaataaaagtataaaactaaacggtgcttcaagagtcatttctacattactattaaacaaggtagcaaagaacttatttagcacacaactttgaaggaaggaaaccactccatgtgttcatatttgtactccattttttcttcttaaaaacaatagtaaacttctcatttcctcataaatgagtagtatgatgtcaccttacgaaatatggatacattctctccagttaatatcagaaaaaagtgaaaaccagcatttaaggctccaattcagatatagaactcaacaggcaaaacttcattcgagctcttaattagatttaggcttcagcctgcaaaaggcaacacattaccaaaacaattgaaaaaaaaaagtgacctttaacagcattatctcaatatgattttgtttattattgaacttgtacaacgaaagagtgagatctttacaaaatggcatcctgctttgaaacagaaataaatgcaataatctatgaaaaaaactacatcaacatcaagcaaccttatgttcgctgatagacctcctacatggttcacatagcctaggcgtcctacgaagcaggaacaagttaagtctgcctagtggtactgactgagtgccaaggtattaagtagtgagtgacaattaagcagttttgcattaggtgacttttggggacattcgacctatgagaatctatgcaaactacaagcaacgtagtagaacagtgacaaataaaaaaagtcaaagggagtatcaattttgtgtcaaaatcagttaaggccagtttcttgaacacctggggttcctttaattctcttttgatttttttagagcaataaaaaagtattatcacatttatttgattgctcatcgtatcaaaagcattcaaggactactttattatcacaggagaatcaagttggccaaatgaaaattcccaccactttcctcgtttgtgagagtacaaacagggaaacggctcatctaagcctgccattctatagaaacatttccatagtcccgttcatttcacaaagtcatctgagcctgccattctatagaaacatttccatagtcccctccatttcacaaagtcatctaagcctgccattctacagaaacatttccatagtcccctctatttcacaaagccatacagagaagtctcaagccttaaacgttgcattttagtatgccaaataactaatcacaatgccataacgaacttgtttcatttgcaacttcatttcacccaatataagaaaaataacacactcagcgagagataataattgttcactagtcctgtgtgttaacatctttaatgattctactactccataaataccacaccaagcactaataaaccttagttcatcctcaacaatactgaataacatctatctacttacatgccccaaacaaatatcaagggttttttttaggttgatctaacacaaagaaaggacatcctagttctaaagtaggaaatactgatttatatataaatataaatatatnnnnatatatatatatacacacatatttctatacaatatgcagtatataaggtaagaactggactggactgagtccaaacccttcaagaggactcttgacaagtcaataattcattgttactgcataagctttgcttttcgaggttggtttggatacacattaattgcaaacgaaagcaacttgttcataaatatttttccaattattaataatagagcaccttattttgccttctgaattttaagaaaaagagattattgctcagtttttcaaaattaaaagggaaaaatattatcactaattacttatcacttttttgcaacaatgaattactcatccttacacaagaaaaagtacttaatagttaatccagtctcatatacataatgagttacctaaaaaaagggtgaaatttcattttactattcttataattctaataaatattatattgaatttaacccaagttgcggtcaaattttatataagcataaatatttatattgaatttaacccaaacgattaaggaattaaaaaataaataaataaagggggagtgaacgaagagaaagtaccaagtacctcagtattagtaatagaatttgaattctgataaggaacagactccagatttgcaactctttgttcaagagcatcaaacttctgtctcatctgcggagaaatacaggaaactgttattattataatatatataaaaatgaacaaattaaaaagatttgcaaatataagggtgtctagtgtttacctcggaggaaaaagtgtgacgatcgaccagaagatctttccaaacgaattgggaaattgccgcggctgagaccgcgaacccgatggtcgtccatgccaaccgagtcctcaacatctcactcaccctcccctctttcagtctctacccgcaattcactctcggggaaataagaaaactaggtaaaaattgtcaatagacttttgaaaaattgaaattaacaaaataaacttgggaaaaaaacaggaatattctaaaaagggaaaaatattacaacaatactgtggg

SEQ ID NO: 16376 - DNA, 8677 bp, Cannabis sativa
tatgattctttatgtacattacgggtgggagaaaaatgcatttaaccacataaaagatcacatgagacagattgtacattacccattggtgcaaatgtaaggaaaggcttcgtattaagttattacctccgcaaggcgatgccatcttgatccttttcttcaggaaagattgacaaaaattcattataaagataatctgcaaaatttggatccattgaaactgcaaagacctcaggcttctcactcatgttgtccatcaactggataaaaaggcgggagggggcagaggactacaaaaggagaccaatgaaaatgaaaaaaagaggaacagagtcggctgttaaaacgtatataattaagggggaaaaagaagaaagaaaaaagaaaaaaaaaaacctaccctaagagagagtggggggagaggcaggttattgcctcaagagagagatagacagacagaaatgaaaaacaagttcttagaactcacatattccaatctatatatattttcctcgtgcagaagtactcgtgcattttcgaaatacactgtgtcaatcaaggatccagctttcctagatttttcgtactcgaataattgaagaagcttgttgtccatctcatcagttgctactgtttgaagctgtatgtaccaaagaaactctcaattacatttccaaccttcgaaaaaagctaaaagatcagaagaattaaaagttagcaatacctgtttgactaacttatatatcaatttgtccaatgtaaacagcacatacgattggtttccaagtatagcacgacattcatcctcaaactttgcattatcagaagacccatcaagtaaattgtaaagcccagtcataaatctgcaaaaatgtgaaaaaaaatacttctaaactaaatttccaccactcactcacttataatataatcataaaagcactactgaccttccatacaaatccaatgaactcaagtcttttgaagttctccattttgtttctccgcctgttgaattaatttttgctgagagaatcctttcatatagaatctagcccaaaaaaaaaaaaaggttcagcattcagcagaaaacattatatgacaacaaaatcaacaaagagagagaatatgtttccttacttggtgtagcctgaaaagtacatagaaatcatcatttccatagaaaacttgatctcctttcctctcctcagttgaagtgactggaacatgctttgcaagaggtttaactgacaaaagaaatcgctctgataatggtaatgatgagcggtttcttccaactaagtgtccatcactagtaccttcagcctctccttcactcccagccttaccatcaaccccctcatgctcagcatcttcatcctctccatgaccttccctggagcactcatcaccggcagactcactacctgaggcatcttcaccagcctcggaaacattttcactgttttcatcatcagcatcttcatcatgctctactccagcatcttgaccacatgcctcttcaccatttccagatagatactgcctacttccatcagcatgttttgtcttagacatagaatgagatgcatcatctcgagggactacaaagttgtcctcctcaaaatcaccagtaggcgacaactcaccctcctctttttcaattttggaggcctcgactgaatcttcatgagagctgctaattttagtaccttctccaacaacacattttgtcaaagatgaaggtttagcaacgacaccctcctgaatcatcaaaatcccagcaaagaaaaagaaaaaatgatttatagtggagaataaacgacatatataaccgttcattaaaaatatctattttatcttaaatcaagagataacttaattcttccacctgtgatgaaggtacagcatcagcattttcatcaggttttgacagacttgcacaaccttgaaaacaacaaaatgcagaaacacaagaaaatagttaacaatgaaaaaaaaaatatcatataagaacatactctgagcaattaatatgcaagaagggaaaaaaaaaacctgatgctgcctctaagctgattctttcatgaccattttctgctccattcgttaacaatgcactcaaattggcatcacgatcattgggggtcacatgttttatcagtccacacattttatcagtcacatccacatttttcttatctttgtcgaattgaacactatcagatattcgttcgtctttggaatcgcaactcatatcacgagaactatctcctttatttaaggcatccccagctgataacccaagtccacgaacactcggagcttctgttaaagtgttgcggtcttcagaacaaacagattttggttgctcaccaataggacttccatcactctctcccatgcttgatgcaccacaattcgtaacatgattatcgagttcattaacatcttcagcgtcctttgaagagtgaacatgagaaggaacccccaacaatggctccaagaaggtagtgtagagtttcataactttatttaactggtctttcgttgtgcatatttcatcacaggaatactcgacaagtttatacaaatcctcatgaatactggcatccaagtattcgtactctagatgtggacctatgaattgtctacttccagcggcaactgtaagaagaaattcatcctctttatgtttggtatcttttacttccttgatttcagccaccaaagctgcaatttcaacaggcaccattaataacatagctgatgcaagagctactaaccttcaaataactcatttttataaaataaagaaaaaaggacaaagttgaacttacatttacagctcaaatttttggaatcttgttgcttaaaatagaagctgcggtggtcaagagatttgtagtggtttttagtataaatgtcagcccaaaccttgttaaaatctgaacgacaccttgtccattcttcttgcttttgcttcaaccgcgttaatataacaggcaatgccactgctgtatttttacgtaatatgtccaatacatcaagaccatggtcaccgtataagcgttctatgcaccttaaattcagacctacgattatagtagtaacaaatcagacagaaaacaaacaaaaaaagctcaagatggcagtgacagatattagaaaattgactataataagctaagaaaacaaaccagtaaagtgatcttcaatgttaattggagattccgaattggttttattgtcattaatattcaatagttcctcagctcgcttggcagttgaagtcacagactccagcagcatatccagttcaaacctaaaataccaaaaatattaacaattagaaagaacagagacaaatacataattttattacgatatcgtattcttgacaaaaaaaataaagaagtacaaagataaagacataatttcttcatggtcaagatcaagagttggaaatgcaagcattataaattacattatcaaggaaatcaaaacatattagagaatggttatatgaggtactaatagtgtttttggagctcaatcaaagcatacatgaaacgctagtcatttatcaatgcaaatatttaccaaaagacgcatacaaatttaatagcacaaaatacaatgcaatcttccgacagcagaagaactataacagacttttacctatcatcttcgcatctaaacaaactttcttcatattgatttctacgcatgtgcttgaaagaataatcctcacttccagaagtcacagatacccaatggtcattcaaaacttgacaaccaagctctgatctctgacttactgtaggtattggatactgcaaaatgatgaacaaaaacaagttttcaatacaagatctagatctgaagatgcagtttgcatatgtaattaaaaattgcatacatcatctggcaagaaacgataactaggagtacatcgttggcaactagagaggtcaagctcctgaatagattttgccaaatatttttccctgcatctttccttctctttacttgcttccgtgtcacgcttctgatctttttctttgtcctctaccttcaatggtctggttgtgtgaccatcagtagacagtgattctgcattaatagttaagtttaatcaattatcagagctcaaaaaatcacaaaatgaaacccaacaggaaataaattggtcatagatacataaaaggctatgaagtatagagaacgaaacgtacttctactcataacacctgcaagaaacccatctgcaaagatagatccagtaagaaacaaataaaagagagagccgtgagaaaataacttaatactaatgtcaaattaccaatattctcacaacgctctaagaaatcagtaaactcctccataagatccggaaattttcccaataaatcagtaacctgaaagaggagcagattggagaatgtcacagcatatattcacacttaaagtaaagctttcatcgactaaaaaagtctacacttatatattggaattgaagagggcgtgataggtggctgataatagaaagcatatgtcagggaaaatgttaaaatgatacacggatcaaataataactgccacagtataaaatgtaccagattttgcaagtcactccttttaattattccattgctataaatgtgaaggcactttaagaatgcttggtaatcatcttgactgcataacctctctttaactttctcacagaaaacaaatccctggttgtatacacctgaaatggaaaaaaaaaacaagtgaaaataatgtacaaacaactaaagcaaacaatttttccaatactattaggtaggtttcaatatttaatgccaaggtacccatagttattccacacaaaacaatatagttaaatgacactcaagattgcaggagaaacttcacgcatgctcacactacataatggagttcggcttcagtataccagtcacacatcattctttccatttgtgctatattgccaatattcaaaacataatgtatatataaatgcctaaatgagataacatattcgcttaaaattttcaaggggatgagaggttaattgaaatctgacagaaccctatcaaataacatactctcacagcccagtcgtcttgaataaaattactctttatagactgaatgagctagcaagagcaagaccttttgggttacttaaagagggctagttctcccaaatccagaatccgaccataaagctcctaactttcatctccttctatctacccatatatacagttgatacccaactaacaggatacaacaagcatgacacaaaacctaacaaagttcaaattcaccctaaatagtaacagttacagttttctatttcatcattgtagggctaggcatgaagccccatttcagaataaataattaaaaaattaactactcactaaactacacaataggcttcatttgactcacataagatctatcagaatcctttcccaatcaattacagcaaatgtctcaaactctcttaaactaaaaatactcgtgcaatgcattatcagtgagggaaattggattaaaaaacccagtgagggagaataaaaatggaaagatgtagggatgactcgtaccacttgaaaatgcaacaatgagaaaaagaaaaaaaaaataaatgagagcagaaagtacttactcttcaaggagtctttgtcatcataagaagcaatattagccgttgctccaaatccttcaaccttccttgcagatttcttcttgtctgggagtcgctggtaactgaaatccttattgctattgttctcaggttccctgtcatcatggtcacgatttctcctatctctactctccttttcgacacgcctcctttgatccttgtgcattttcagggatttatcatcatccaactcaggacgatcaacactaagatcacgatctgcatggggagcaataatcctatctcgtcgacgttgctgctaagaaagatataaatttcagcaccaccaagaatccatcaaattttgacacagaaaggaagctaaggcaatagcaaatatcttctacaagtgcaattaccttctccatatgcacttgatgcaaggcaggtgacacagagcttcgttcattaaaacgcggaagtgaattacggccaaatggaagttgttgtgtagctgtggcagaattatctggtaaaaatctagtgaattcctctagcaaatctggatgcttacgaaataaagctgaaacctgaaaagagaatagataataaatataaactttagatgaagaacaaaagggaaggtattgcagtggaaataaaatcgatacaacaaaatgttttacctcatcatagaccgcattaatatctttgtgttcttttctatacatattcagtatgtctagaaatgatttatacacatgttcatcattttgaaaacgcttctgcaaaatagtcatccatctgttaaacaactggcaactgaacttgcaaattgaacgctgaaacacaagtaatagtataacttcacctttatcttgtttacaaaactaatagcctcatcaaattcaactatcttttttggtggagcatcatcctcatcaatagttatctcgtaaccttttggcaagaaggtattaaatcccaaaattaggttgctatgccctttaaataactctttcactcttccaatgacaccagtagtgtcagttctgaaacacataaacaaagccattaatcgattggcagttaatggcagcaaacagttcacatcacaaaaggaagtgcttgacagatgaaactagcaaacctttgggccttgaaatctttcatgacctcaagaaacttttcatatttatccctttgatcttgaaacatgtccttcacttctttgagataagtcaaggcatcattcgttgtaagtttctgagaagcagctgctgccacaggccctccaccaccaacaccaccaccgttgctgccaccaccaacaccaccgccgccaataccgacaccaacaccaccgccgccaataccgacaccaacgccaacatcaacagcaaccccaacatcaacaccaactactcctccccctcctcctcctcctcctcctcctacccctccccctcccccatctcctggtcctgagactgaggactgcccatagcttcacacccaaaagatgagtaagtactcattaaataaataaataaatacttaccaatgacatatttaatctgtactcaacttctctctaataccatgcgctcataacgaacgttcctctaacccaagccaactagaacatgatattaatttaaacttttatttccagaaaccaataacaaatgcaacatttcaccttttgcacaattagttactgatccaaagaaattatacattacttttatcatgtctgttctattaaatctaaaattccaaaaaaaaaaactaggttaccgacggtatagaatatggatcactcattaacaggttcaattttaaacaaattcgatgaaaccacaccaacctaattcgtgtaaaactcaacaaaagaaataaaaaaaaattggaaaaaaaaaattaaaacagctttaaacaaaatccagaaagctttccaaagaatttgaagagaaaagcccaaacatgtgagtaaaaaaaaaaaatccacaatcaaatgttataaatctcaagttacaaagatcaggtaaccatttattcatcaacaagggtaaacaatgaaaaaaccaaacaaaaaaacactcaataggcttacattaacaaacattttccaccaaaccaaacaaaaacttaagcaaacatgcaattcagaaaattatacacctagagatagagacttacgagtccccacgggaagaaccaaaaggacgtttgaattgagcactaacgtaaacatcatctcttattcgcttcatttctgtcacagaaaacaaatcataatcgctcagaacaagacaaatagaataaacattcattaacaaaagcataaattcttaccttagatattttctcgagaaaataagccgaacagatctccggagagaaaataaaataagtaaaagaaagggcttgatcgcccacagaagacgaaacaagcgaaaataatgaatagtatcaaatctctatggctcagtacgttaagagaaaaaaaaatatatttaagcaattttgaaaagaaaatttgggtttttatggagttttaatcttcggttaaaaatagaaaatgggaaattagtaaaacatggaaacatagtgttaaaaagacgaaattgtagatattaaaactataataaaattataaaattcgaaattgttgtgaggaatagcttgtgttggggggttttgtacccagttgccgctatatttagtgtactttgagtttagtttggggctaagattttggatgggcctcttagttcgggcccaaactataaaaacgcttgtttttcagatgaaacaatacaagtacaaccaaacaaagtgaagttaaggggggaggacttatcctcttgcaattgcagagtgagcatgtttgagtactcaaaatgtacttatcaattaaatgagttacacatgttctgtgagaggcaggcctttatcgctttgaactctcatttggtccaacaccagattggtaattgggctaaggcc

SEQ ID NO: 16377 - DNA, 5833 bp, Cannabis sativa
atagtaagattgaatgaaattagaaagtatttaaatccaacaatctcaatgagctaaagtacttaaattttaaaacccagaaattctttacttggaacaattaataactctaaaaaaagaagttcgaacagtaacagttgttacagttcacctggaagatacgcaaattcaggtcctttcctttctttctaaatatattcatttatttttctgttcaatatatttatgattaaaaaagtttttataaaaactggctgctggagaaacacacaaactctaatagtgaaaatcacatgaagatatactaaactatctggaagaggctgacatggagaaatactcaattttcttaaaaaaaacactcaactcacataaaaatcacaagatactcaactcaaaacttggttcttctctcatttctacagtctccatctcaaatccttgtctcatctttttcccatctctttttcttgtctcaaattgaaataacttgagttagaagtcaaagcgaactatcttttactaaacatgcttgatagtagcttccatcacacccaacattattcgtagtactctaactagcttaagttagttaaataatgccgtagagtgataataaatgagaaaataaactaaaattataataaatgctaataaagaatactaaaatttaaaagggttcgatcccaaatattagtaataacccactctccttttgtattattaatctggattgtaaaatcaagaacaaactcttaaatgcaaagaaaaaatggaagagtttttgcttgtgagtaaaattttggatccccttcctaggtcaggtgtgagtcgtgtgacccttatataggggaagagtttgtgcatctcactttaggagacgcgaccttagtgctaaaatatctcaaccattcccttgatttttggggtagttgaagttcaattcttgttgtaatatcctactatttttgtaggtttgtaaccacctttgagtttcatgcgggattgaatgatgctgggaaagtgttggatgcgtcgggctatatgggggtaccctcgaggtatagtctggctgactatctttatggtgggtagcacctactccggggtcgtatcctcgggacgtctcctccttgtttctcatgttgtctttagagcctaatattgtataatcttgatacttagagtaagtattgcactatccatattcatacgtaggtaggtgtgatactaggactataagagtgtagaggtaaagactaaagagttagtcacctgaaataagcaacctggggtagtcacttaacccaccttggaggtggtcacttaatatgctctcgaggggtagtcacttaacatactccaagggggtagtcactcaacataccctcacagagtagtcgcttaatatacctctggtgttagtcacttaatacccccattcaacatacttccaagagtagtcactcaacccacccacgggggagtcacttaacatacctccaagatagtcactcaacatacttttgagggtaatcagaagccacccgtgagggtatgcctagtcactcaacatatctctaggggtagtcattcatcctacaaaggtagttactcaacataccccgtgagggtagtcactttacagtttacacaccttgagattgtattagctttacttcccccctacatagctcaaatcaaggctctatccttcttttctttagaattgtattcttttatcaagtgactttacatatttttcataaatttagtcttaagtactcttgtgtttatgtgttattatactcgccatgtcacccttgataaacagatagatttatatgaaaatttgtttgacaaaaagtatttttttagggtgtttttataatgcaattaactaaaatgaatgtacttgtgcaatccttaatggattcgacatgtagaagaattttgtagtctatttttttttttatagtcgtgtatgttataattattgaaaacattttataaaattataagaaattcaaaataatttacaatatagattttaatattcaaacaatttatttaacgcacatataaaataaaaaaaatcatatgtacaactgattttttgaacctttaagtgttaaattttttagaatttcaagatattttaaataattaaaacatgtataattatgaaaaaaaaaaaaaaaggatcgatactctgcagagtagaattttcctcctttttattcttatttttattttgagtgagttggccttccaaacacaattttctctggttattgattttcaagctttaaccttttgagtttctctaaaacaaaagaaatgcaagcactgaaaggattggcaggaaggtcgcttagcttgaagaaacacacaatttatcaaacattttccattctttctgctcctgccgagaatcatcatctccctaaatgggtttaccaaactcgtcggaccctcatcttggagccaacttcctctcagttcgtcaaccttcacagactctccgactccgattctggtataaaagaaaaactttatctttttaatgctgctttgtttaattgtatctatgtaaagatcccaattgggttttgattggtgacagggattgttgagattaatttgaacagacccgacagaaaaaatgccattgggaaggattttctgagagggttgcaacaaacccttgaagatataagtacagatgactctgccaaagttgttttgattcgtagtttagttcctaaggtgttctgtgctggtgctgatttgaaggtgacccaaataaaccactcatctctgtaattttataataggattaatatatgataattctactttattctttcccaaataatttccatggctttgtgttctgtgttggtactagattttgtttagagttttattatgatccaatcccaattgatgagaaagaaccatagtgagtctttgtatgattgtatcccatcccttaagaggagaatcttgacttgagtcataatttgtattcttaacaagtaaactcaaataacttgtgaaattagtacatttaaattgaaaagtttggtacttaggatggacccttagagaatttcttagtgattgaggttcaattaccatgctgtatattctcatcattatgatgtttgttctagtggaggtaattattgtagttcctgtctgttaaatgaattggcaggagcgcaagatgatgactcaatctgaggtcaattcttttgttgaatcattacgatccacattcactttcatagaggtcagttctcgtcgttcgcctattcaatttttagtgaatatttttctgacttgaatgagtgatctgctcaaagcatggcattattggataagaacaaacaaacaaacaaaaaaaaaaaatacttcaagacagcaagcttatgcagtttccatttgctaatcgttcgtttggaacttggtttttatattaaaaaaacaagagataatttttgtttttgatccaatctctatgaatcaatagaaagggaaaatatcttacaatacatcattgaaaaaaagaaaattcaacccagtatgtaggaatctcctatattgctgaaaatttcaactcggcacagctctacaccgttcttgttgaacatttacttgaatagcttaaatttttgttacagacacttcgtgttccttctattgctgtcattgaaggaactgcactgggtggtggacttgaaatggctctatcatgtgatcttcggatatgtggtagttccatttaaaaagaaaaattgtatttaacttattgtaatgagtgaaagttggttgttagctgagttttagctatcaaactgatcattcacacctcaaatgctcaggagaaaatgcagtactaggcttgccagaaacaggacttgccattattcctgggtatgttttagattccaacctcattattcgttttctaagctttacttgttaacatcataaattgtagaacagcatctcatatattgggggggtgttacccgcttccatttttctctcaatatctttttgaagcagttgctaagttttgtttcctaacagatgaagcatctcaattaaggaatgataatactaatatgtttggcttgtattcttttctttctacatactcatatcaatgcttgctgcttcacaaaccttcctttcacagagctggtgggacacagcgactgcctagattggtcggaagagcaatagctaaggaacttatattcaccgggagaaaaattagtggcgctgctgcaatgtctataggtgcattcatttagaatccagtttgtgtttttatttttgttcatttgtttcttagtggcagaactatattatattttgctgcaggtcttgttaatcactgtgtttctgctggtgaagctcatgtgaaagcacttgaaatcgctcgggaaataaatgagaaggtacttgatgtttcttttgttagagctgatgcattgcctagatggtcctattcctcttggccttgcttgtactcttcaacttttaacttctctattgatattctcttaacaacaaattcatagttaattgttgttccttgttcttaaataatgcagggtccattggctataagaatggcaaaaaaggcgatcgatgagggtttagaggtaaacatggtttcgggtttggcagtagaacatgactgctatgaacaactcttggatacgcaagatcggttggaaggtcttgcagctttcgctgagaagcgaaaaccaaagtatagcggaaaataagactgattccaaagatgatttatgaagtagaatcccaatagttacaaagtcttttaagtttgatgatcaactcttggttttgtaatgaaaatattgactgttggtaagtttgagaagttgtgttataaataaagatggttattattttttcaatacaaagttaataaatatgttttacattctttaatttataatatatagatttagaacatgtttttaaatatttttatataaaacaaaatattcaccaaaatatgcacaaggggccaatcttaaattgttttaccatatacaagatatcaaaatagtactaaagaaattataccagttaagcacctaattagtcttaacgccaaattggtattattggtatcttattgattacattaatattttataattgttacacacatcattttaattaaaaaaagtgatagcaaaagtacattattttacgattttgttgcagtcgtattattttttggtcattgaattcaaaaatacttggtgacatataattagagcacatattaaataagctgaaaaatctgtcgccacgtatttttgagttggcacttaacgagcttaattgacaagagccaaaaaatgatatgactacaataaaatcgtaaaataaaatacttttgccaccacctttttaattagtcatatgtgtaacaattatagttattggagttttatcgcaaatatctttttatatttttagtttagtaacttgtatatggtcaattaattcaaaactaaaatttttattttattttatttttttagaaaaaaaagaaagaaaggaaaagatttaattccacatgggtttatgaaataaaattgacatttctcaaatgcaaattctgaagaacattctttagcataaaaaaaagcctaaatttattttttaattttcaaaacacatcatcaaacactacttttttaatataaatgcaatcagataaactaactgaagtagcattattaatgatagtgttgtggatttttttttttttttt

SEQ ID NO: 16378 - DNA, 8780 bp, Cannabis sativa
atagaaaagattacattgaaatagagttttatagggcacaaagcccaacaataatgggcttagacacatcaacaaagactctgactcttataaagaaaccaaatacatgaaagatggtagtcttatctacttctaagaagtctccaacttcatcccaatcatttttgctagtttgaaagatttcataccaaacggcatcgaatgaacttgaattcagaaaggagaataacgaagttaatcaggcaaaagagtgtcaagaccctgggggttggcacaggtgaccaggcagtgatcaaagtgccatggttgaccctcaaggacccttctcatgtccccctcgcaagcaaattccaccataaacatcccagacccataatcagataaggtaaggggtgcacaggtgatccaggcatttcgcatggcatcctcaaaccaatcaggcttgatggttcttgaggttaagacacggaagactaaacaaaaagacctttttggttggctatccctctacatcttcaacgagatcatgaacgattgattctttttagtaagattgaggatttgggagatattaagggctagagaatccataagggctactaaatataaacaacaacacagagaaaaaatagggcaagcaagactcgagagatggagaagtagggacccccaaaaaatctagatccttaaatagaaaaagagagacgtgtacctggagatgaaagacttgttgtggaagctagagtggaaatgctttattcgtcctttcaaaaaatctaggcagatcccgtagatggtaggaataatcatcgcctccctcctagagtgattcaaaacgacaacaaccataaatggtggaaacaggaaaagacctggagaaagaagaaaaaatgaagaaaaacaaaaaaactaaatctaaaaacactcagtatgatctagcacaataaatgaaacgaggagtgaagtgaaggagtaataaatgagtgatcatagaatagaaaaagacaaagcccaagaagatacaataaatgtatagagagagagaaacggatggggagacaaatcgatgagaggacaagtatgaatggctaagaaaacaaagggaaggacgagatcaaaacgataccattaaggcgaaacacaggatgagatccagaatagggaagatcaggatgcaacccgctagagaggtccccacacacatgtatttgttccgctatccaaaaaggaaatttagttagagacaaaaataaaaattgggccttttatattaaaagataaaagaaaaataaatacaaaataaaataaataaaaagaaaaaatataaaagaaggttaagctcacgaaaatgttgtatagaggaacatagtacttttgaatattttcaaaaaaggagcttattttttaagatatttagaaagaaaattattattgaagctatatttttcagttttgtccccaaacaagtacgtgacattgtgcaggaaaccctaattagcagaggggaagaagacgacgacgaataatccgaaggtttttttgaattgaaaggggctcaatagtagtgaatagaattgaattggagttctgttcgatgtattggatttaatttcgaaaccctaattttcgattttgggatgttgatgagagaaagggaagaagaagaagaaggatgagcaggccgtcgataaggcctcggccattggacattcacaagaagcttcccatagtcaagtctgttaaggacttagaggatgatgacgcccctacttcatcttctactcgtaattctcagttgttccgctttgcaagcttcgactccgccaatgaggtccagcccagccctgctgccgtcgctgctgccaaaaggcttgcagcctctgaaattcccactcctcagtttgttatcgtcgacacttacgagagagattattcccgcactttctttcagcccaattcttacttgcgtggcaggggaggtttgtttcaattcccaccacatgaattatatctatatttgtataacttcgtatatgcatgtatgtacaatccccattgctaatgaattcattgtttttgtgttggtttcctactttgaagctcgggctgagctcggagagttcgtggagtacgacattgacaatgaagatgaggattggcttgaagaatttaacagagaccgcaaaattcttgcgcccgacaagtaatcattctcgcatatgtacatatacatgggcacacatataatgtgttattcaaattatgtaatgagatgtttcaatacaggtttgagtctcttctgtttaagttagaagttttggatcacaaggctcgggaaagggcaggagtgataacacctactcttggttcgccaatccctattctcctgcagcaggatactgctatggaggtgtgctactctattttccaaccaccagtaatatcatctttgggtgtgataacactttttgccacttttgtcatttgaattttgagaagctttttttttttttttttttttcaattttagagacgtggccttgtgtaattattgctttgagttagtatcgagttgatcttgaatcattttcatgtaggctctacaagctcaagctccatctatcagatatgctgttctccagtctgtttataattattggaaagagaaggtatggattaaataccggtggagagaagtgattatggaaattttactttcatgacaaagcctaaagctactatgaactgttgaattgccattgttagttgtgtttttttggttgttctggaggattgctttgtgcaaaagtgcttaaaacaatccacaaaccactataataactcttcctacctaagatcatcaacaacaaaccattatttattctgaagcacctccttatctgttccttcccttaccataacatagaaagaaaataactgctttccagtgggaaagtttaaaggaatttggagaaggaaaaaaagtctgccacaaaaactgtttttctgtggaaaatggtaaagcgtaagagtgatttaaaatgcttcagaagttacaaaattgaaaaaaatagtctttgtttgcttctttccattccaaggaaagtaaatgtttctgtacctttaaactttgttcgaaaaaaaaaaccttcttattgggatagtaaattaaaattaaaacaaagtttcacctgttacacccttctcacattctgaacgtatggctgcattttgtgtctcatcattcatctttactatttggagttactcaaacatgtgtttttttaaaagaagtgtagcatattccaaaaggctaagatgataaagatgcaaaattataattattgttttcagtgtttgatgctattttatatgttttgataatgacatttaatgtttggtatttttccctttcatggacaatgaccattttttatctcttcctctctttctcttttacacagcgtgagcgatggcaaaagcctgtattacgacgtttacaggtatgctgcatccttattatttctttttcatacactgtgtgtagtttaattacatagtatgcttaggatttgtagctgatactgtgttattacttttcaattgccatgacttctgttagtattagtatcagtagtttattattgctgctgagttgctacttctatttctgttattattatgtttattgttgccaaataatatgtcaaatccatcttgctgaaaagactaaaacaaggaggaatttatagttcattttcaaatctagttcttattttagaaacataataagaatccatcctttctcttttctcttattttagctgcttatttttttcctcaattattgattaatgctttcatggaagattttaacagaataaacaatgtgaatgtgatagccgatttgccaactaatgatcacaatcatattttttgtacagcctcctccacctgttaatgacactaatccgtataatgtctttaggccaagggaaaaggctcacagacttcacacaagaagggtgggtgatagatttctcttctttcataatactatcactcatgaagatatattctttgtttaaatataattcgtgaaataagtgcatatgtttttctttttgttgatgagtatctttgtttgtttttcttttagatgcaaagaagggaaaacaatgtgcagtcatttgaaaagcttcgccaggttagtgccaccttgacagaaaagctgatatgaacactagaaaaacttcatatttttgttcatagagcatgctagtaaacttctcacgtgtgtgtagtgtgtaatgccatattatttttacaactcccaaattgcacatgcattatgcatataacgtgacaaggtaagttattcactaacgtgacaaatgttttaaataagaaaaactaggatggctagtctataatgccaaaccattatttgatcatgaacaaaaagagaaatgatactactaaacccttgagcaatttcattattaaaattcttatcttcaaaatagtagagaccgttaataatcttaacactttcaatcgtcttccccgaactccggtcttgaaaagggcaatgaaatttatagaaaattacacaacaattagaatctcgagatagtttgctaacctacaagagactacaagaaagttgaggaacatgaagaacagatttaagatctatcccttcaaaaatttaaattaaatattttcctgcaatagatgagaaattaccatatgctagcttaacttttttactacatgggcagggtatataagagttaaacgagttagaagaataggtcatatgataggaattcatgtatgtataagctttacaagaaatcgtgtatgtataagctttacaagaattcctattaaggaaaaaatcagagaataaaaatagagaattaaaccctattataacttttctaaataatagcgtgacaactctacaaagaataaaacttgaatagaaaagatttattcctaatatatatatatatatatatatatatactgattttcctacaagtgcaattattatatgagaagtgagaactctccttatctatcaaaattgattcattgttgtgtttatctgactttataaagcatggttagcatagtaataacttttatctaaattttgttttaaaaggttaggcgcaacttggaccaagcgaagactttactggaggccttaattaaggtatctttacttcaactctgttgtcatatactgctgcatttttttggttatataattgtttttatgaaatggataggaattgaacctggtaaattcaacatagtcatctagtctagatttaagtaaaagtgtctttactgtgagctttccaaatttcagtcttcatactgtgagagggaagcccttaatggtgtttggcagaatgtggcaatggtctctagagactagagagaatgcataattacttgtattcatttatttttatttataatatatcggacatgattatagtagggacaccacttttgtccgtaccagtaggaacatctatgttttcgttatttgaagaaatcataacctaatttttttatatgatagtctatattatagccatattatccattatccgtttttgaaaagttctgattaatttacaatctcggaaacaaagtttcaacattcatgaatgtgcttattttttttcgcactcgtgcagctgaatgtttgaatcttgtctttgaccctataaattactctaaatttttgaaaacagttgcagtgtcagctataactataatgtacaaagtcatataaaaaattttaagtatatttttcctaagtactaataatagagtttatatgatctatggagagtttgttagataatttggttggaaaatgacaaaaaaaaaaaatcggtgatttggttaaaggttgaagaattatttggagagggtttacaatttatttttcaggtcttcgtttataggatgactgcttttgttgttgacgagttggaaataccttttcataattttgtatttgtgttttggtttttttttcctgttcaaaaggttagaatttgtgttcctcctggctgtttttttgccccttgagaaaattgtgtattaaaggttactaattatgactgtacacatgcagagagaagagaagaagagagaattcatggaagctgaagttagtcttcaaaggatccaaatgaaatataaggtatgcttataattgtttgctttgattgaaacaagcaagtggtcctaatctttcacttgacacttaatacgtatcagactatcagactttcacttaatagttaatacttgttattcaagtggtactattttcttctaaggtatacttgtaattcaagtgaaaacaaatataccattctggcccttgtgctaggaccgtaaagtacaaatataattctctttttcttttttcctttccaaagacaaacacagtgctcctaaatagtataaatattaaggtattcttgttattgtataagacttactcagaataggaaactctatttatgtgtaccttgacatttaaggtagtactggttcatttattttttttgaacatgtacatttaataagtggtaagattccaatttattattgtttacgtggcaatactcccgtcatgtttgctaagttgatcagactattattattacttactatgtggaactctttttatctttgatttctagcatgaaacggagcttatggatgatagcttgactcttcctggattcccgacttctgctagtaagttcagtttaggtgaagaggaatttcttgattcagatgacattgtaaacagccgtactggtatacggccttctgcaatgaacaatcagcctttggcagattccaacttggtattaatacccactggacacattaagcaagagtttaggcggcgtcaagtaccacaaggatggcttcataaaatggtaattttcctgttgcttcttgtttataattccattacctgagtaaagctctaagtacagctccagctgtggatttaatttgttatcggttaatgcaggatccccttgaaccagttttgttgtttgcgagacctttagttccagaaaagttggcagctgcaggcatttctgtaccatcagatccttcaacaaaagacgaagcttctacatcaccaccttgtaaatttagaggaagagttggccgtgggggccgaataatcttcgatagatggaacccattaatgcacacacctattgactgtggaaattctctttatttacctcctaaacctcgatctgcaacatataattgatctactttacttacccgctgccatggattttcttctgtgcattgcttggaaagaggtccatacctttggcacaggattagtttaaacttttgagagggagaatattaagggtaaatatcattatgggaggtaaatatttcctgccattttgggtatggctaaggatttcttttttggtagttttgaagtagcaggatagtgtttgtaattgtatgtattcatttgatagtcttttgtttgaaagtgtattcatttacatctttttttctccttgattttccgtgtgatttctctattctttatttaaacaaaagttggaaagtgtttgttttttattttttaaaatgtaaaggaaatatttattaatgggtaaatagaatataattcattacataaagataatattcacacagaaaattaaccaacataaactaaccaaagctccaatatatgaatttacgtgaattatatcctaagatgtagggttgtttatttattctaatttgtattattttgtatatagtgcattcaatttatattaagtgtagattttatattttggattcaatgtaatttgcataataacttaaatctaattcaaaaatgtgaatttgatcggttattttttattaattactttttaatatttatcaagaatattttttcacataattaataacaaaataaaacaaacgattgttgtcttatgtttttaataacaaattaaaataaataaaataataaataataaatttaaagaaaaaaataattgtatatagaaataaatatttaattttgttaaattatatgtaaatatatataaaagaataaaatatacacctattaaatttttgaatatattaatatcatatgtgttataaattattaattttttaccaaaaatattatttatatgcataattttttttaagaataatattgaactattttaggatgttattgctgtgtaatgtatggtgttatgtggtataacaaaaaatacaatggggtaaaataattagaggtatagtgatatggtacaataaccatttagtagtagtataaactgattaaagggagttttatttgctacctacaaatttatacatgcattttattttatataaaatgtacatatttaattatattagttttttttttcgttccaattcatatctttaaaaaatatatctataaagaagtatttttttatagagtgcatgtatgcaaaattcacaacaaaatgctacatggtcaatacacacataatcaacctcactaatctcataattctcatccttacaacctcaaaaacaagccaagtaaatagcttaaacactacttcaactcctatatgcatgaaactaaaaattaggggtgttcatcaaactgtttaaaccgtccgcactataccgcaccgcaccgcacattataa

SEQ ID NO: 16379 - DNA, 5741 bp, Cannabis sativa
ctgacggctgccgtacatcacggaatgcattccgtgaaagtacaatcacgggacaaaatcatatccctataaatatagttgatctatatatatagctaaagagaaatgaaagatggtagtagtagtagatggtaatggtatggtagatggtaagtttaaagcctcaccaactaactacaaagcataatagaaaagaaaagtagttttagtttgctagctaagccatagccgtctaaattaaagtaagtagatgatttgtccaatccaattccaatctatttataattttaatttgtggaccactaagccactcctacctataaataagttagatacacaaaaataattttgcacataaatattgtgactcccttcaataattccaacctcatattcatataacgtataaccaacttatacttactcttttgtaaaggtaaaaacaaaatagaataattccttttttctaaatcacaaaatagacaactaaactttcaccaatatttactcacttctttgctctaacggtttctatttttaattgaatgaaaattcttggcttagataaatattttacaatacaagtttttggtgtttcctaccatttttgtttccttaaaaaataaattactaatctagttgagttaagttcaataaaataaattaattatagatttttttttattttttatctaagtatttttgggtagagaaatgcaaagtatatatcaagtcctatcctgtatataaaaaaaactaaatttgtacctaagatccatctttcacgagggtttaattttttttctttttaaaattatctttttttttttttattgattttgaaatactgtattttatttttttttctaaataaggatgcaaaaataattcttttctttacacattaaatttctagaccagccctaagtacaattttaacagtcaaaattcacaaaaaataagatactgattcttattgatatattttaatatagagttacaaaaatagtcaatatagtgttaagtactaccaaatatcaatgcttttgagggtagtgagccaatatttgttcactgagttaatttatctctttctatctaatatctattgcaattcatatagtcaaacatagtacaaattctattttgttttttcacttgagataacttttttttttactttccaaaaatatcaccactttaattatattgcttaacaaaaatgtcaactaagggaattattaaaaacatctccttttgttatattctgtcaagatttttttgtttttttgtttttagtaatatgaatggttgcaggtaaattcattgattcaaagtgcaagcactttaattgttcaaaataattaatcatctaaataaactaatttcaattaatagaaagtaaattgaaattatttaaacattaataagtcagaccaacaaaagtgtgacaagtgtttgtattttggatttctccttaggtcatgagcaaaaatgttaaaaatataacataagatcatgttttaaatttttatatagatccactccattgaatgattgaaaggacttaaggccagtgaaatttttatctcaaaatgtatttttatttgtgatatagttggcatttaagtctaaaagggtttaagtttggaggatctacgaccaccaagacttgtgccacgaaaaccacctcgagaatgtttgagtaacttagagaaaggtggatagagtggaggaggaagaaatccataactgttgcacagaggactaggataagatccaaacataagataaccaactggaggaggaaaatgcatacctctaccaacattggatgtttgagcagatggatgaacaaaagaagagaatctaggttaaggcatggaattcttggattgacctgcaggatttacttctagtttggcaatgtcgagttcaaagtcattaatttcatttcgcacttctttagccatcaacatagattcaacttcaggaacataataagcatatttacgagtccagagagagaggttatgaatatagagtattctcgaggcagaccattgaagatagtttcgatatgatcttgtgtggagagaacatggcaaatcgatgctagcgagtctacaagatgcataatcttgagtatatagtcattaagagtatctacgagcttagttttgcgaagttgaatgcgaaattgactgatctttgcacggttttgagttaagtagtactcttcaagattgtacgagatctcaacagttgtgttgcagccgaccatttgagtgaggatcttttcggacatcgaagataagagctaggaaaccaaaagattgtcctggatgtcatactcaatgaattattcagagattcgattgttgagtttatcttaattgtgaggaatttaccgaaacaggttttggatcaagaaacttgataagacgatagcctttaatggctgcacagacttgatgacgatatggaagaaagttattttcattgagtttgaagataacatgtgattgaaagttagattggttgtttttggcaacgaattggaggaaagacttcagagattgagctagaatcagccatggaggaacgagaggacgaatttacgtatctgataccatgttgaacgagaagagtaggagagaacaaaaccaaaagtaaataaaaccaataatttgtattgatctaaattgttgattatacggttgtgcatgctattcaaagtataattcatatagtttctccatatgacgaattaattaatgagtctaaatttttattattagaattatgtaatgtatcggttaatttgaataaataatttgccaataaaatgacttattttcttgcacaaaactcctattttaaaactggttgtatcatcaatagggaatttatacttgttgatttattgtctttattattgaaggatatttaattaatgaagtacctactttcttattattttttttaaaatatataattgaaagattgttaaggacatatttgatcaaaaatatatgtggaatgaaaaaaataatgagtttttttttttttttttttaaaggggaatagtctaaaacatttttttttcatcaagaatgaaaaataatgagtttataataagactaaaaaatatcactaagaatagaaaaggtagaagacaatacatacttaaacataattcaacgtcactttctatatatatatattaaacaaaacactaataaataagactttagtttaggggactcaatgcaagtacaatctaattaaaagattaactctaattaattttaatttgctacaatttcttttaaagtcactttttcgaccaaataaaagaaattgtctcttatgtttttctaaaaacattcaaaattaattttattgaattttcatcctctactgacaaattttcttacttgcccatgttagtagtataaaataattatttaattgtacaacaaatcctgaatttttgcatattttataatattgcccttcaatcatctaaaaataaaaaaaaataaaaaaaaaattgtcctttcgatttcgatcttgtttgcattatttaatttcattaaattaaagtatagatagatagacatgccaaagtgatattttctcactctaaaaatacaattgattaatcttaaatcttaattcacaccgaaatagaaattaataattaatattatattttattgtgttatcttggcagtcaccgaccacgttcacaaaatccacaccgttaatgaccccatagatgaaggacacgtgtgagaatcaagaagcttaatttccgcctctgatcaatcatagccgttgacacttagactcgtagttcgaggacctgtcccactccttaaagatatttacgataataattaatttcttatcaaaattatattttaataataataataaatatatttttatattcccaacgggtcgtctgattgcattgggcgctatacccaaagcaccgcctgcgtgcctatattaaaataataatttaaataaattaatttaatattaaaatatcacccactaatttaaagaaaaaaaaaattataatttggtataattttttgatttaatttttatttagaggagatttttaacctattttatacaaataaatttataaaaaaaaaaattgaataatgtatgacacaaaataaaattttaactataaaaaaaaattaatactttattacattatatatgtgtgcttattttttttgttatagatatggtaattaatagttcaaactttacttttatacatgtatatatgtgtagttgaaaaaaaattatttaaattttatttttaccactataatctataagaattaagattttatttttgaaatttcatatatatattcttaaatatttacatctcactattaaaaaaattattttcaatacaaaaaatatatatataaaatgtaccaaaaaaatatattctattttttttttttgaaaaatttgcagctaaatccttttatgtttgagtttgtatacacataaaaacatagattatatctgtaattaaataaatgtcttcaatatttaacgggatgtaagagagtattttcaatagttaaattttagaagatgattgtttgatgtgaattgtttatttgataaaatataaattataaaaaatatgttgatacatgacaatgatgttatctattttttaaaattaagtgtgacgatatttataattaagataaataatatattaaataataatgtttgagatcataattataacattcttgaaaggtgctatactatttttagaagtaagagtgtaaaaaataatctgaaagagaaataaaataaaagactatatttttgaatgatgtgaagatttttaacacttttaaaaaatacaccataagagatgctctaataaatttatccctaatttcatactttattttaataaaaataaattaattagaaattttgaactttgacatgtactaaaatcatgctttttaaattttaaagtcgttaaaaatctccactgaactattgagattgttagttttaagaatttttgttcaattttagtaagaaaagtctaacatgaatgaaagtttagggatacatattaaaagttcgatgagcataatttggtacataaaccattactaaaatagtaaaattaaatgaaatttgacaaaaattcgtaaatccaacaatgtcaataattcaatagaatttttaacggcaacaaaaaattaataaacacaatttaatgcatgttaaaatttaaagtacaaaaatcttaatttccctaaaaataaataggctaattaggatttttgctccctgaacttttaaggccatcgaaaatgccccctgaactattgagattgttgtatttaaggatttttgtctaattttattcaattttactatttcaatgattctttgtgtactaaaccacgttcgcgagactttgatatctaccaaatcatgcccttcaaactttgacatgtactaaattatgccccctaaactttcatccatgttagacttttttactaatattagaaaaaagtccttaaatccaacaatctcaatagttcaatggacattttcaatgagcttaaaagttcaaagggcgtgatttagtacatgtcaaagttcagggggcaaaaatactaattaaccaaataaataataaaaaaaagaaaaga

SEQ ID NO: 16380 - DNA, 4534 bp, Cannabis sativa
tttgagaagcaagcatccgagccacctctcctgctcagacttctgcttctctccttggagcgtcgtcgacttcgcatctcgccctttctcttattttggcgcatccctcaaccttttctcccgaccgaggctccccgcctctatccagccatcccccaggaccccgactggatggaacgagatccctgctttcaggatcaagaaagaagtcccgtttgaggagtcggctgaaaattacttcaagtctctcctggaagccgtcagaaaacctgacgatgatttttatatctcccaagggcatgactctattttaaaggatactgccatctcggggataaggtaatctgccccttacttgtatcttaatttatttcagttactgtttcgtttgtcactgtcttacttatatatatattattttctgtcagacggctctgaggtgcgcccatgctatgaaattcgccccgcaactgatagggagagggaaagcttggctaagggctattctcattataagaagaattatgaggcagtcgctgccgctaaggcagttgctcttactaaagtcagtgccttagaagttgacatcaagcttttgaagagtaaggccgacagtcttgagtcagagaagaggggctgggatcttactcattcagccttgaaatcataaaaaaaggctctaagtgacaaggtcgcttccctggagactagtttgtctgcggtgaatctggagaaggccaccttgttgcaagagcgcaacaccttccgctcggaggctgaggcgatgaaggacaaactctcttccttgagtggaaaattgtctgaggctgaaaaggtgacggagcaagccgaaaaggctttggccgacgaaaatgggtccctgactaaggagatcaaggttctgacgagtcaagttaaaaaggcgttccttagtgggagttattagtcggcctttaagttgtactccgagtttagagagggcaaatctgctacctgggacttggacgagtttttcaagaagtattccgagttcaaaaaggacaaggatctcgtgtattcttctacggagtcggatgaagctagtgatgatgaggatgccgacagggcctgaggagctggaaaggaattttaccctatttttattttaagtttctatatcttttatttgcatgcgtggaacaagtttaaagaatagttcattattattgtattttattattttttaatatttttatggatctgtaaggatttttcgtttaactggtatttttaatttattacccttactatagttaatcatacatgtatggcttttctcgaggcgttctgacacttgggggtgcgtatttactggcatttaatgccttatatgttggtggacttacccttctgtcttccttttatcttctcttagttattttttaagtctatttatacatgcctcctcctttgttaatggtgccatctttgcgaagtttctaagttccctccttacgcatatatttcttgcttttcttccctctactttagaaatgtcaaaccctccaagttctcctcttcctgagtcttcgagtggagataagtttcattctgatgttggggatcgatcccctcctagccttgcgatattctctcgctactaccggcctagtggcgaagctattgttgggaggatgatgagggcctacagggctaggcgtgacgatgcgtcttcgtctttcgatgaggaatggcttcagaacttcttcgagaatgagggacgtaacgtttcagctgccacaagggtccatggtaaattccatgcccttcgcttacgcgcagagcgtcgttgtgattaccgtcgcatgtaagcccggaaccggcgggcttgggatgcggacctggagagggagcatttagctaacgagaggcgaatggaggaatgtttgagatagggggctcctttctaccctcctggtttccctacaggctttcgtcggtgctcgaggagggtggttcggggttctattgtaattccgggttctctatgcattctttgctggcaccatcccgaccgcgagcacttctaatccccgagtttaggttttgtttgctgtttgctgtttctttatgcatggctcttatttgtacgcaattgcttgtttattatatctttattttgtaacctatgcttgggttgtaatcttctattacttttggtgtccctttctatgttttgcattgcttcatataaggtcgggggaaactgtggctctgttaagtgtatttattacttatcatttttatacatatatttatacgtatttatttccttttgagtggggtgctttggaaagtggaaagacatatatactcttggagccgcttctcgtaattcgagtgtacgtgtttgcttgacacgtgttttaatgcaaaagtgactttttgtttccgttttcgtggcatcttcattaactccatgcaatttttagtgtataaataagcttttagtttgagcttttctcctttaagaatcctttcgacatttttctgggtaagcttttccacttttcgtttatcctttttgcattatggcttctctactcaaagaccagatacctcactcaaaagacccttcctcttccaacattttttcaggcttacagcccctggatcctgctttcctttccctgaatcctttttcaagttttcgccacttcgaacccattacgcttcccctattacatttctctgaggtctacagttgtccatgtttcgagcaggttgtgctgggtttagggacttatgctgcttctcgagtcgaagctgagccacctatggcaatgtgccccttcgctatttttcctcctgtgttggcaccggttgaggcggttaaggaggagcccaaggtgtcagaggagagctcaactcaaacgacggcggcttattatcccaagtttgagtctactgctcagtctgagaatttcgaagaggtccctgttcctgctgacgcttcgccctcagttttttgtatattcgcttcttcctttcctcaggaattacctcgggtggtttccgagattatacgccctccttcttcctccaaccgtcgagggtggctcgcaatgcgggggacatttcagcagagggaaagtttctctgtatagggggcctgaaagtttttgtatagggggctttttttagttttatatttatatactttgtaagcttacgttggcgcttattttatatgtatattttgtaagttcgcggtggcgccgtattttgcataggccactactcccccaattttttgaaatagagtgagtactcttttcataatactctaattagtttttttgtgtaaggaggcagtagtcgtctttttgtgtattttaactcctcttattaatgttaattttacttgtttttttgatattttggcgtgtacttgtttattcatgggtttaaacttcgcacgaagttctatcatcgtaagatttgtacactttacttgctgcttatcgccttatgcttttcgtggtttgcgtattctcatattaaatgccttttataaaaggtcttatttatgtatgcctttcgtgaaaggtcttaggtatcactgactttgccttttgtaaaaggtcttagaacgattatggttttgcctttcgtgaaaggtcttctctttgccttccgtggaaggtctttgatcgttcatagttttgcctttcgtgaaaggtcttaggctattttacagttttgcctttcctgaaaggtctttaaagtccctgctctcgccttccgtggaaggtctctgaacgattatagtctctgctcttgccttctgtggaaggtcttagtgctgccttttgcagaaggtcttaatcccatttgtttccgacttacttttttatgatatattcttctttcattatttaaaggtgaaagtgtggcgacagctatagtgaggtttagagtttctggctcataattattatacataaaaaagtttgaggtacctcacgttccagcttcttgtcatctcggcaccatccgtagaggatagtctgtacgctcctttccccgtcgagcctactacacagtatggtccttcccaattggtggatagcttccctgctcgggcttcttcggtattctggaaaacttttcttagaactagttctcctgggaggaagttcctaggtttaactcttttattgtattgccttgctaccacagaacagtagttctgcatcctggataaagttcattcccttctttcttcgacattgtcggctgcttgtagtctgaggaaagtgttgtcttcgttccttagttcggttcgcgaagtgggtacttgcatttccgtcgggataactgcttccatcccgtataccagcgagtatggggtttcacccgtgctggtgcgcggtgtggttcggttggcccataacaccccaggcagggcccatcttcctttagcgttctcaagtcgcttcttaatattatttatgatgactttatttgacgactccgcttgcccattgctttg

SEQ ID NO: 16381 - DNA, 6302 bp, Cannabis sativa
tgatggtccaccaccagaaaaggaagtccctttgaccttgcgacacactttcttccctataacaaaatctttaagtacatacacaaaagagaacaaacaaggaagatgaacagtaccacagagtggttgagaattttacttaacgaggaaggaaaaagtaaatgtgaaatgaaaatcaaagtcaaaatcaaaatggtaactgagatatttattaacctaaagtagataaaaaatgactgaaatacccttcaacccattaatgataacccaagcccattaacaccaatcaaaaaccaagaaaaaatcatcactaaaagaacaacatatgaacacacggtaaaaaaaacagtggaattaaatttgtattacctatagtgaaaattaacacaaagtgatcaacttgaaaacattgaaagatacaaactgcatcagatacgagacactaatgctcagcttaatccaaataaagacacagacaccaaacataacaaatttcatatcagcaagagaaattagtcaactgtggttggactaatatgatgtcaagatcacatataaactcagaacaagaattcaactagagatgcaaatagtaatgtcgacataagtgtgtgatgtgtcctcatgtgagccatcaaaaaattaatctagacagctcactcatcatttgcctaattaaatgatattgtatgttaatgtgcttggtacgagagtgttgaactagattttttgaaatgttaatagcacttgtgcaatcacaaaaaaaaaaaaaaaagaactaaagaatcttgtcgaaaaccataatcagttaccattttctttagcaaaatgagttgagtacaataaatcccaactacaatagactcaacttcggttgtggaaagttagatgaatatttgtttcttactcaaccacgagacaagattattcctaagataaaaacaccctccaatggtacttttatggtgatccaaacttctagcccaatcagattcactaaaaccaacaatcgacatatttgtatctctcgactatcataagccaaacttagaagtactagacatgtacttgaataaatgtttacatcagaaaaatgggattgtttgggattggcttggcaccgaccacataatctgatactaaaaaactatcagggcgactgacgttaggtaaagaagattccctatcatgtctctataagagattggatcaacagactcaccagactcatgtttactcaacttagttgtgctgcttaaaggggtaggagcatgtttagtgtgatataagccaaacttcttaagcatctttttgatatatttggacttagaaatgaaaatgccctggtcaatttgtttgacttgcaatcctacaaagaaactaagatctcctataagactcatttcaaattcaaatgtcatgagatcaacaaatttggcagccttcttatcacatgtagacccaaaaataatatcattgacgtagatatgagcaatagaaattccttgttgcaaatgcttgataaatagagtattattagtagtgcctctcacaaaatcatgagaaatgaggaaagaattcaacttgtcataccatgctctcagagcttatttgagaccatacaaggccttcttaagtttgttaatatgataaggatacttgggatcctcaaaaccttggggtttattcacatacatttcttattgaagaaagccattaagaaaagcactttacacatccattggtgcaacttaaacttcaagaaacaagccatgagaagtaataatcaggttaattcaatccgagaaattgatgcaaatgtttcctcaaaatccactccctcaactttattatatctccaagccacaagccgagccttgttccttatagcagttccaaactcatttgattttttcttgaaaattgactttgtcccaatgatattgactacatttggtttagtaaccaagatccaaactttgttcctctttaactgacccatctcatcttgcatagcattattctagaattcatcttgaagagcctcagtgacattttgaggttccactaaagagacataacatgcaaatgctatgacaattaggacctttcaacaagtcaccattaatgcagtagtatccccaatcactattgtaggtgcatgagctttatgtatctaggatggagggcgtttcttatacagtcgagcatgataactatcaggatgcctactggacacttgatagtccgaagaaatctcagaagtgtctgtagtaactagaacatctgtagaagcactagtagtattcttagatgacactggcacatcttcaaatgaaagaggccttaatgatccagaaacttcttgaaagttagacattgaatgcatcattggtatttgtggactaagaggatcttcatagcattagtagagtctaagacttctagaatcatcaaatttcacattcattaactccatcgccgtggaagttcttttataatacactcagcatgaacgactatttgtcgaaaatccgagaaaaactccttcatcacttgtaatgtcgaattttctaggatgatctcgatcaatcaaagtatagcaaacacaaccaaaattgtgcaaatgactcaaattatgagtctttcctttccacaactcatatgcactttaaggagtgcccgtcctcaaatgaagacgattacaaatgtaacatgttgtattaactacctcagccaaaaaatttacaacaacatccttagcacaaagcataactcttgccatctcctgaggagtcctgctttttcgttccataaccccattgttttgagggattttaagagctaaaaaatcatgactaatccccattttatcacaaaaccaagcaaaaattacattttcaaattcgttcccgtgatcacttctgaaacgatatactttggcaatttaacatctttctcagtttgtaatttcaactaagaaggcagcaaaagtatccaacttttctttgagaaagttcaccttagtgaatcttgagaagttatcaacacataccatgacatattattttctagaaatactagctatttgcataaaacccattagatcaatatgcagtagttccagaaccctcaaagtaagaagggcattggtaggaggatgagaagattttatttgtttcccttgtttaaatggtacacataatcaatgtctttccaatttaagttcaagaactccacgaactgatttaagagtcacaatcctttttagatctctataatttaggtgaccgagtctataatgccataggttaggtttgtttaaaaaaactctatgacattttattttgttgcttaggacataataatgaccaacaactatgttacctgtaaggattgacttcccattagatgagaataaacactagaatttagtaaatctaacatcatagttagcataacatagttgattgatgctaatcaaatttgttttcagcccttttacagataaaactccagtcaaaggaaatgcatctaagagattcaaatctccttgccccatgattttccctttattcccataaccaaaaaacacaaatacttcttttaaatcatgaaagttatgcaaagattcacaagaaccagtcatatgtcacgagcaatcactataaaaataccaatagttctttttcatgaaagataatgaagtatgagcaataagagaatgattgaaacctttaggtttccatttcgtagttgtacatgttgtggagctagaggaaacttgctttgaggagtttgattattgatgatattagtcaaataggttttgagtttgtgatatctaggtttgatgtgacctattttcttaaaaaaatgacatgtaggaacaaatcgttctgtttatctaaaaccttatttctcaccattagatattcctctatccatatcgatgttagattcacctaagttcttatttgactcttgtttgttgatttctacagcaacagacataaactttatattgccactagaagatggagtagtattttcataaattgacaggtcttgaccctatttttacaacaatttatagctaattgaagttctatcacccaaaggtttctggctctaaagaacctgatttaatgcgatagtctccggaggtaggagggagagagagagagattgtttggcccgtacaagttttgcaattaacttgtatattttactatctttggagcataattttgaagtcatttgcttgagtttatcctcaagtacatatttactctcatcaagcaccttattcagatcctaaagctttttaactctcttagttatataagtccattgtgtgaacatctcttcataggctttattcttttctttaacaacaaattcagaattagaagaagtcacatcttaatcagatccttctatcatagtttcttgagccatgaaagctatcactgattattcttttttggcctcatcgctaacttcttcctcttcaccatcactccaagtaacaataagtgccttctttttctttagagtgtttgcacattctatttgaatatggttaaaaccagcacattcatgacattgaattactttgctcttttttcatattgttgaggatgcttgttgggattagagaaatttttgcttgtagaattctctttgttcccaaaattgtttttcttgaagttcttcttgtgaaatcaagcataatttttggtcagaagaacaagattttcatttgtaaaggattgaaataagtcaacctccttataatcttcttccctgtcaacaatcctttacaaatgaaaatccatatagcctctttgatggggccccccttaagttggtattaaagtcaacagttataactaagaacaactttcttcatattcatatgatgagtgaatagatggagcaactgactttaacagattaagtgagtttaatcccaactattctacctgattagactcacttaatcaataatccaaatgaaatgagtgaggccatcaaatgtcctcaatgctcaacaagtttagacagtaccgaaatatgtctctagttacacttttagttaaaatatctgcagggttatcatgtgtgcttattttcttcacttgcacttgcttggatggcacaatatttcttacgaagtgtaacttgatatcaatttgctttgacctctcataaacattggatttttcatgagatgcaaagcactttgattttcatagtaaatgtgatatcctcatatttgaaacctaacttctctgttaaccccttaagccatatatcctctttgatggcttctgcagcagccatgtattcaacttctattaatgacaaggctactactttttgtgggttagatttccagccaatgcaacccctaagagcagtgaatagaaacccggttatgctccttctagtgtctaggtttgctacaaaatctaagtccacaaaacaagtgatttcttccttgtactggatctctttgctgaacacaataccagtgtccaaagtacctttcaggtaccgcattctccattcagtgcttcccaatgttcaaggcgaaggtctgaaatgtacctattgaccacactcatagcatgagttaaatattgaacacaccatggagtacatgagactcccaaaacaacttgaatagggaactttgctcatcttggctctttctacatctttttttgttgaatgagatgcagacaacttaaagtgttgagcaagtggtgttgcaactagtttgcacttgaccatgccaagcttgtttaatactttctgtaggtaggcagcttgagaaagtattatcatgccaggcgtaggtctctttatgtctatccaaataattctcgttgcttttcctagatctttcatctctaactcatcactgagtttccttttcaacttgtcaatcactgactttgctttgctaaagatcagtatataatcaacaaagagtagtaagtatgtttgattatggaaatacacacatgagtcatacatgcttttagtgtatcagatattctgcatgtaagtttcaaaccttaagttccattgcctaggtgcctgcttaaggccataaagatatttttttagtaggcatacctcatctgggttcccattttcagagccctcaggctgttgcatatagatttcctcttctaattcccaatctaataaagttgtctttacatccatctgttcaatctctagctccatgtttgttgcctttaccatcatgtctctgattgaagctt

SEQ ID NO: 16382 - DNA, 16328 bp, Cannabis sativa
  modified_base (11995)..(11996): a, c, t, g, unknown or other
ttaaagtctggactgcaacatggatctacaagacaaaaagctttgaggatctatcttttcatgacttgactagggaatggggttctattttatattagtgccttgctaatggggatttagactaggcctaaatatatcagggtttgagcttattctgtatttatgtttttaatttgatgtttatcatgttacccggcttccctctaccataagtgaggcgctccctaataaatttgggagaaggcaagtctaaaacaagtgacctttgtctctttttcaaaaaaaaaaaaaaaaaatcttaagctgtgaattacttacaatttcagcaaaaatatttcagatagaaaaccaggttcctggattttaggtggcggttggaacaatgatttatggggaggagatttgccaactgcttcttggattgatgatattactccaaataatcctgtatgccataatatattataaattctgtatttgataagagacatattttgggctctaatgttatttaaactagcacactatattatcatgatatctgaatgtgcaggtttggttaccaagaactgatggtcatatgggcttggcaaattcagtagcactaaagttggctgggattaataattcatcaaaagatccagatggcggaaccattatgagaactgcgtctggaggtaatttaacttcattcatgccttaaaatgcttctccccccttttttcttaagaaactacacataaaatcctttctgttactatgtcctattgataatctccacaaaaaaagatctatggaacttctttgttctacaacaaactaagtttagcttcctaatccaattgctctgaagctaggaaatcacttttcaaatcctggtttgttatccactaccttgtacttgcagtctaggttgtatgtctagatgagtggccatcatttttattaatgtaccttttcctttccaataaaggaagtgtcactttgaaatttgactaacaaattacttgaacttaaaacttatgttcgctgctgctctttctacaacaaacacaattatgcacatcagtaacatggtgtgacaacatgagtgctagtgcaccagctgcaaatcctgtttatcatgcaagaatgaaacatattgagttagacatccattttgttcgtgatacagtacttaataccaagttgatgttcaatatgatcagttagttaattgcctcaccaaagggcttacaaattctagattgaggtttcttgttgacaaactccttcaccacaatgactcatccaccccccttttatttactcccttctaccatattccactaatcttggggtcttaacacattgttaacgttatgcagtacctactggattgttgattgattctgcaatgaaacttgttgtgtcctatgttcctgagctttctattgatcaaagaagggaagctttgcaaagagccagtagtcttgccttgatgaagggggttacaactgttgttgattttggaagatattttcctggaacctctgtggatcgtccatgggaagatttctcaggttttcttttttactaaggatttagataagtttgagatatcttaatttgaaaaatgtaaacaaccgcaattacttaagcagctaacttcctaactgttttcaacaaattgtaatgtattgcttaattgtttcatgtatccttttcaagtgttttcaatctcctagtgtgtgtgtgtgatagaattatttgaattttctaatgagactaaaatatattacggtgaggggatttattgggttgtttgtagaattaatttttcaatatgctctctaattacttgactagatcatatgattaaatttatccaatgaccttcactgatgagactaaaatatattatggtgaggggattaattgggttgtctgtagacttaattttcaatatctctctaattacttgactagatcatatgataaaatttatccaatgacctttgagtttaggtttctattatctttgattacagttcaacaaagtgactgtgcctcttgaactatcattgagtaagtattatttttcattgatttccacagatgtttatcagtgggctgattcttccgggaagatgaggatcagagtttgcttattttttccattagaaacttggtcacgtttacgtgtatgttatacagtgctcctatagctgatgtggttttgtttacttgattgtgctttaattttatttcatcaaataataaatgttcagattccttgttaccatatttatacttttttcttttattttcctgttcactcattcatcaaattagatactaaataataatgatgtgatgcaagagtgtttcttggacaaaaaatgtttgaatactagaaacaacatgtatatcatgtaaaaattaatgtgttttcctatcatatatgagatgaatctccttcaccatgatgatgtgggggaaaatgtttaatccttcttctagtactagttaagattctgttgttttttcattttcatccagtgcatgttgagggcttttatggttttctatacgtcaggcttttatttttcttttgcttgatgctgtcgttttcactttcaggatgttgttaacaaagttgggcattccataagcaaatggatttacttgggtggtgttaaagcttttgctgatgggtctttaggctctaatagtgccatgttttacgaggtaggaacattaatactttggcattcattaacctttaataaacatatctgtgcatacattggctatggccagagccacgtagaagtgagggaggtgactggccttcctgaaagaaaaaaataaggaaaaaatatgtatattagttacttacaacaaatatttattattaaaagtgatatttattaacaaaatattaactttgcttaagtggttaggctaccttacatttatgttggacaagagcattttttgttttttaatatttatagtttacttacagtatagttctaggaattgaaccccaactaataagatatttagtaatcattgaagccaaactttttgttgttatgtttttacttaaaaaaatatttaatactataaaaatgcaagtttattttaatttttacatatttccttacatattgtattatgtagaaaacaaattacgcccccctcttttttaaaaaaaatcagtacaacactcccaacctatattctgggtctgccactgtacatgacctatcactttgtttaggccatgtttggtaggaaggagtccgagtaggatagatagagagtttagaaaggataaagagtaggagggatagagaggatatttcctaaaatattatttcgttgtgaataatacaatatacacatgtataaagttgtcctaaaagatacaataaattacggactttaatatcaaataattttaattaacaattctcctatgataaaataaaattagtaaataaatcagctattttatagttttaaagaatcattcctaaaaataagaaacttcctaaaattgtttattttctccaacatagacatttacagtatgtttgatacaaaggaaagaaaatagggaagaaagaaatgtaggagatatagaaaagtagaaggatagaaatgagtatatttccgtcgtggttgttcgtaaaaagggaagaaagttgatttattttaaaactgcaatattgtcattaaattattaatataaatattattgtgtgtatatatatttttgtctcacttttatttgtttgtgtgaaacatttctgaggaaaagaatttttaggtcccacaatgttttttcacttttctctccacttttccttcttacacaactcatttttctcattacttttcacttttctctcctggattgttgtgagctcttgcagttctcactcccaagtccaaactgcttataaagtattttcttttatcatcccatcaaatatgtcattgaagattgcattttgacttttgtagccatatgtcgatgaacctcaaaattacggtttaccagttgcagattatgaaaagctgttcaacatgactttagctgctgataaccataggttacaggtccgttcttttgtagttttattaaaactgcctcagtaataattattacagcaatggcacttctttcaggttgccattcatgctattggtgataaaacaaatgacaggatcctcgatatgtatgcatctgttatttctaaaaatggaataagagatcgaagattccgggtaagattaagatctgtcttctagaataggtagaaaatgtgatataattcgtcaattaaggaaggatatatatactcttcctcaattaggcataatattacaatcaggaaagtaggagctaatcaaattaaatctaccactgtaaatccagatttataggaacaaaacaaaatctttaaatttacaaaatacaacaaattcaggtaacaatcacaccagactttgtctaatttaatcaagattctcaccagttaccataatttgaagctccaagtagcaattaagtattgcaaggttttaatattgatatttatttcaactctacttttacgtgattagatctaattttcagattgagcatgcccagcatcttgcacctgggactgcagaccggtttggtgaactggggattattgcttcagtgcaggtttttcatcacagctttagtgtaatatttaagcactacatgggataatttagtcttataactgatcccttattcataatcataaattctaatactggcaagacaaagattattgttttattcatttttatgtaaataggttgctgaaaattttaagcttattacagggagatatatccatgtatctcatgtgattccataatacttttttcttcaggagactttacacaggatgaattcctttgtacttctatgattgcttcaccatggtgtagaattagttgaattagtaaatacattatgtttgttgaaccatcttttaaaatattcttttttattaatatcttgaggtaattttatgtaaaatgttgacagccagatcacctattggatgattttgaatctgccacaaaaaagcttggatttgatagggctcaaaagggttcttatttgtttggttcacttctaagtggcaatgctacgctagcatttggttcagattggcctgtaagtctatttatctaatgcttagggcttttgcagcttctatctttgtctgaatattctttgtatagttgattgatacatcaaaataatttgtcttaggttgcaaacataaatcctttaggcggtgtcaggactgcaatgactagaaaatctcctgcatgggaaaatgcgtggaatccctatgaaagtatttcggtgcatgatgcattaaaggcgtaagttaaatcaaaatgtttgttctttttcatcttctctcttatgttaggacaatggaacatagaaaatttaatttgagtggtactaacaatcttgaataatgattatggtaaaataactcaactagtgttgcattaatgttatgaatacttttatttttcttttagtccttcctttccattgtttgccacccaccttagctagctacgagatgtttaatgcaagttatcatttcaaaatgatttgtaacaactttcttgaattgtttgatacattgtaatttttgttagtgctcttaatttcttaaaggtctctcattaaataggtagaataagataatattggattgtatttcggaaaagaaattttagaaaaagtgagctgatcatttacaaacaataaattatgaagaaaatattcaaaatcataaacttttatctcatattatataaaaagaagagagattggggggaatgattcatcatcagatatcagatgggtaattgttaatttttataatatgctctccaataatattaccataacattaagtgaaaattattgaatccaagatgctatatccaaatcccccaagaaggcatgcgtgatcagcttttctcttccatggcgaagaagaaaagagtgatttgaaagtcggtaactaagttgaatctagcggatcccccttcaatccaagaagatttgaagaacgctgaggacagtggctcagaaggattggatttgattgcgcaaattctgcaatcaggtgatattctcaagattgacccaaaattagcgtagggaagttgcgatgagaaggaagttagggatgcgaagatgagtttgacagggtaggtcgaacgagaggatttccaattgaactctcaacaacaatggaagcaattcatggaaggtaagtcttcagtctgagaatctaagttggtttatacagaacctatcttgaaagatgggattaaaatagcacaagttgatgtggatgaggttcaagaacaagctgctaactggaactcaggttttgtttgtatggttttaggggctaacctcccaaccacggtgttcaaagaatttattaaatgcaaatgggggaatcttggaattatacagattgtgcatatgaacggtggctataccattgttaaatttaatgatgtagcaaatcgagatcttgtcttggaggaaggagtgatgcgattgaaaaccaataattgtgcgactcattaaatcggttttgttatggattcgattacatgatcttaggcttcattattggggtaacaagtgcctcaacgcagtagcgagtacgattggtaaacctatattggctgacaaggttactagggagagaacaattgttagatttacaagggttctagtggagatggatataacagatgaacttccgcaagttattcattttctgaatgaacatggtcaacttgttgggcaaggggttgattatgagtggcttccagtgagatgtaaagcttgtcatgactatggccatataatggcagactgtaggaaagatcaaaagcctcccgtaggcaagaaattggtagggaaaccagttggcaaattgattttgaatgaagtaaaaggaaagaaagaggaagaggatagtatcattgagtgtgctcctgaacttaaagttgcagagcaagaaaaggagcaggctcctacagtagagaggttgacagagaatactattactgctgtggttatgaagcagccaaacagtgtaactattggggaagaagggatttgagtaaagtagggcgtgaagattggcaaaccccaaaaagggcaattcaaactagaaagatgggtaacttgaatacaggtaaacctaggtaaacctcgtcattctaatacttttgaggttttgcattctcaacagggaggtgagcaaaatgagaatgttagtgttttatcttctcatggatagcagcaatattctaagttggaatgtgagaggcctcaatagtaataaaaagcaagaggttgtggttgatttgtgtagaataaggaaaattggtataggagctttacttgagactaaaatgaggggtaataaagtgattgaatctacgtcttctaacttcattgtctggaatcactttactagtccagttattgaaagtcgaattttatttgtttggaggaataagttcgttaaagtttttgtcttggatgaatctaattagtttgttccttggtaaggatgatttgtcataataaggagttttgtgccacatttgtttatggctcaaactctttagaagaaagaaatgatctttggaacggtttggctcggctctaattcactgtcaaaccttgggttatcatgggggatttcaatgcagtttttgagtttggtgatagatgtgggggtaatcgggtcactaacacagaacttgaggatgcttcaaacttgacaactttaaggatggctgattctttacacaaaacaggatcgtttttcacttggtcgaaccaccaagatgctaaagacaaaatttactcaagaattgaccatgtctttagaaatgaagagtggttagatttatttcctagctcctcagctaatagagttgggaaactgtttctgatcaatgttcttgtgtggttttctcttccgtggtccatggaattggtgtcaaaccattcagatttttcaatttttggacagttagtggttcaggtcttaaagcttttcatcttaaatgtttgaggccgaaacatcttttaaggaagtttagtaagaagaccagatgtggaaattaattttgaaaaggccaaaaaggagtaccaagtagctaagatggcggctcaagctaaaccagaggacttggctctcttagaggaagaaaagaaggctgctataaatcatagtgaaaaagagaagttgttgcacaacttcttaattcaaaggagcaaagccaattggctaagaaaaaggtgatgacaacaatgccttcttttatgcttgtattaagaaaaggagagaagaaaatagaataagtagtttcctaaatgatgatggacagcttgttaaagattatgcagaagtggttaagcattttgtgagccattttaagagctttaggggaagcgacaactaaaattttgcttgcatggactttcaagatttggaaggtaactctttaactctagatctttaactcaagcttctgaaaccatttactaggaagaagatcaagaaagctctgcttagcatccctagcactaaaagttcgggtccagatggttttggttccaaattcaataaaacaatgtggcctgaaccagaggaaaagctctgtttggctatcctcagcttctttaaatctggagacatctctaaagatttcaatgagacaaccattactttgatccccaagatagaaaattcgtccaaagttattgactatcggtcgattgcttgtggtaccacagtttataaatgcatttcaaggctgatttgtatgcatcttgctgagattctccctttcttggtaaaccaaaatcaaggagcctttgttcaaaatagaacaattcttatctttcaagacttgataaagaactatggaagtattatgctgcatctcggtgtgtcatcaaaattgatctgagcaaggcttatgacacggtgaattgagatttttcagaagcttggttgaaccatctttgcttcccatctcggtttgtgaagtggataatgctatgtattagaggtaccacttacaacttgatgttaaatggtagattgcaagacagtttcgaaggaaaaaaaagtcttcggcaagaggacccgatgtcttcgctattgtttgtttggttatggagttcttaactagaagattattacaagaagctcaagtcggtacgtttcggtatcaccctctttgcaaaagcctcaatttaatcaatcttagctttacgaatgatttgattttgtttagcaaagttactttggcagcaggaaggcatctcaagatttccttggaggatttttgtaagttcacaaggctcattgtcaatctctctcaattccaaattttttttggaggagttgaggccggggaaagagaaaattgcccaagagattgggttagaagagggctattttcctcttaagtacttgggagtcccaatgagaccaacaaaatggcgtatggaagattgtggggtaattttagccaaaatcaagaaaagactttatacatgggctacaagacacctatcttatgctggtaggatgcaattgatccaaactatcttgttgggattaagaaattattggatgaatatattcatccttccacatagtattgtcaaggaaattgagaagcatcacagattctttttatggggccaaagcggaaacaaaagcgaagttcatagagcttagtgggataaaaattgtaatcctaagtatggtggccttggttttaaggatggtaccaaatggaattgagctattctagctaaattttatttggtccataatggaaaaacataatgtcttgtgggttaaatgggttaatacgatttatctgaagggagtagacctgtacttacaatctgtctcaagataccagttggtactggaggaaattatgtaatttgagacaggttttcgatgcaaaacaggtgcagaaagcaggatcttcaggtaaattcaaagcttaacagctttacaacagcctgttgaggtgtgatctggttctgaattcaagagctgtttggtgctgattaagtctgccccagcacagatttattttttggcaagctgtcaacaggcagctgctcacgaggaatcttctctcccgtctctgcattactgccgttaacagtgagtgcccggtgtctggtttaagccctgaaagtcacagtcaccttttctttgaatgctcgttcttggttcttgttgtgagtgaagtgtttagctggcttggtttcaaagctttgccattacagtttgcaaattggctgaatgtgatctcgatcaagacagggagaatcaaggatgatattacttatgctactcgtgctgcatcaatctattgtctttggttaaacagaaacaattgttttcataagggatattcttatacaattttacatgtaactaatgaaattcaaaaagttataaagtgtcatttgtatagtctgtaaactcaacacttgtaattatagaatgcttaataggctgttggactgatctggtgtccgggtttgtagctgtttgagccgtttagcttctggttgtttcttttgcttgtggctttttgcccgtttgattaatgaaaatgctatatccaaatcaaaaatcatttttctgtggtattaatttactcgtctctttttaacaactaatggcaggcacaccatttcggctgctcgagcatgctttcttgacaaagatattggatctttatcgccgggtaaacttgcagattttgttgttctttcaactgactcgtgggatgagtttgcatcagtaggatctgcatcggttgaggcaacttatgttgctggaatacaggtctatccctcatagacatttttatcttcaaggtgaagtatgctgctggtacagagaagagggaggtatatatgtatgtactgtagttattataagtaaatatatgtgcacacacaatttacattaatgcattacacacaaagtgattttaatatagctggaccatcttaaataaatatgattagttgaaaaaacttcacacatattgtttaatatttccatataaattgtgtgtacatatcattgctcatttcttatatatataccaaacatgacgttaatttttctttgttgctatatgttattagtcttactattattttgtcttagtaaatcaagattttttgttaaattgcaggagaataaggtgaagtcgatgatcatcaatgttgtgctatatatattagtggaaaagcaatttacttgctctttgtaacttttattagtatatcaaaatattttggaaagtacacaattccctctttatgcttttgttttgtaattgtaatcatatcatactcttagtaactatcgagtgaccatatatgctttaattagtgaaaagtttaccgtattgagtgaactaatgctagttccattatgctattaaaaaatattgcttgattagattgaaatggcgtttctgagttcagaactaaggaactgaggtcattcgtttctgagtaagaaaatgaagctaatatggtaatttcttagttctttctcttccctccagtctagctttcaggaacaaccttctttttctaaatgctaatatgggtcactttttattggctgatgctctttgggagagaatggtctgtctgttgaaaacctgtaacacttgtttcttgtctgatccaataatatcatccctgttttttctcttttaatatctcctgagtatatcagttttttcttttggactttccgaagaaaatccttcaaaaattggcgtatgccactatatgcggcgagcacacggtattctttannaaaaggcgaaagaatagttcgctttgtgctcactgcgtggctgggtgagtatatcagttttcttgtctcttttgagactattttgcaaatacactatcattttttaatctcttgatgatgacattaaattaaaaagatttgtaattgtaaattgtctttcatttctatcttctatgttttgatacattgagttcatcagtaactttcattgctaagttattgtcacttgcaattttctcttatcaaaaagaagtgaataagagcctgaagcaaagcaagagcttatgggaattcttgaagagcaatgatgagctgatgagcttaggaagattaaaatacccaaaggcaacagtatgagttagtagttccatcattaggtttaccaaaaactgtttttattggtaataagttatgcatttaaaaactcctataaaagaagatgaaaattgtttttaatttattaatgaacttgtagagtcacaaataactaaaaataaatagaatttgttcttcacgaaatatgatcatggtagaattttttcccgtaactattttttttttttttttttttttgcaaatattccccctgactcaaccaaaaaaattgctataaatattcccttttttttgttagattctacttatttttcaaaataatttgttgatgtatcactaacatgacattaatttgttaaaatttaagaatcctgacaaaaataattgtataaatactaaatagcactaatgaataattatgagaatgtatgtattcttaaaactaattttgaatgtttaatataaataaattaaattttaggtactttaaaattgttgaatagattagaacctcatacaacaactatacattatataaattattttaaaagaaaaaatgagcataatctaacggaagggagatatatattaataataattttgattatttaatattttaaataatttattttacataaattaatttgagaattttttcaagattattctattttgctattgttcattacttttaaaggttttggtgtgataaggaaaactagaaaattggatgatggcatgaattaaaatatggaacttattcatgtgctaaatatatgaaatgcatttcaagtacaagaccaaaaccatcaactaaaactggttacaaagctaatatgaatatggttgttaatgtggatgtagatgatcattatactgaaaattattttggattataatcacacactaagtctaagcccttcaaaagcacgattctgaagatgtaacaaagagttgagttggtatgtaaaaaaaacacttgaattgaatgatcaagctataattccattgagtaagacttttaattaatttgttgttgaagctaaaggttgtgagaatttgtctgagaaagattgtagaaaatataattgcacgtgcaagaaagttgttgaagctattttgttcgaatgctgaataagaattcaatttttttttttacaaaatagagtttgattatgaaagtgaattaaaaacatattttgggttgggaaatggcaacatatgaatcatttagtgatgttatgacatttgataatacatatctcacaaataaatatgatatgtttcaacttgtgatcaaattatagatatcgataaaaaataagtactcaaaccgttctttttgatcgaataaatcatcatggacaatcaatattgcttggttgtggattattgtctcatgaaaatacagaaacatatgtttggttattcaaatcatggttagaatgcatgaaagagggttcccaaaaatgccataataatttatcaatgtcaagctataaagggagcaattgcaaatgcatgccctacccaaaaaacacactatcagtctaccactttgtaaatttatgatttaggcttatttcaagctcattatcgaagtcaaactacataacaacaaagtcaaataagtgacctagaacctatttcaaactaccaaactcagttcacattgaagtccctttggccggcactacaccggtgctccaaagactttacaatctactttccatttgttgtgtgcaagttgtcggtacccactttcgattgattcaattgtcgattggtacgtctacaattaaatatgattaattgaaaatctaaaattaaaccttgccacacaccaaaaagaacctcaaaactaaaatataactaaacaaaatgtatccaaattttgcttttaaaattagccatgagccaccaatccaagtaagggccaatggtaactgccactttcttggataacaaataagttagatatgtaaattgcatttaccaacaacatattataccaggcatagtcccaaattgatatttaaactttgtttagattgatttaattctatcagataataaatttatagtcattacagttggttcttctccgtttacaaagtaacaaactttctgggtaacaaaatggaaaaaaagaaacacaagttagccgataagttcttatgtgttttcactaaatgatcaatgaatgacacaattagacaaaattcaaagtccaacattctttgctctcaatcctaatcttcccttaccttagatatttttccaaagagaggacaacaatgtatttgtgttaaaagaaaaaagcaacctcattatgatatagatatataaacagaaaatagtttagtacctattagagctctaatcatcatcggaggagcttccatcatcactgctataatcactactgtcatcatcttggtcaaggatatcaagctgaacatgacgaacttgtattggttcgggttgcttaggacggaatcgttgctccccagctctaggaacaggaagggatggcaaggagggcaaaggcaccgggtctccaggcttccatccaggtggaggcaagggcaactcacttggcagttcaacaggcattcctggtttccatcctgatggaacagtgatgtttggatgaagcagaccttgaattgcagccaaattggaaagtgggttgggttctgctggcaacggagctgcaggctcaatcataggctcgaaagccttctcctcactctctaccatcttaggcaagccaacatccaaagatgcgaaattgtatagttgagaggctcgcatttgtccttcctggggtgctggtggtaatgcgccagaaaggtttccttgaccagcgccaaattcaggtggtgcaaatgttgtatagcttattcgatgagcataggacaagatatctgataaattcaactgtgatgcaacagtggtattggtggttacatgagaagaatcatcatcatcttcttcttcctcatctatagtgtcgtcaaccaattttaatctcttgggacggcgataatcagagtaatcatcaacaagaatgtcaagaacacgctcggcctctttcactttattagcaaaggaaagtagcatagagtccttaaattggatttctcgtgcaactttattcttagcatcttggagatcaagaatctcttggagctgagcaacagcctcaaagagttgggtctggtaagcagtgaatagtgcaaggatttccttagtggaagaaggaaaagagtctagcgagtgggaagaggaggaggattgagggtggggctgggaagaaaggaaggtggggagggcaccacgaaacgcagtgagccaaagagaacgatttggagaaacttcaaatagtttggaggcaagagaagccatttggataagaagggattgagctctagggagtggaggaagaagagagagaagggtggaagaggtggttgtggtggctgaggaatttgaggacacatggtgggacggaggtatctttgggggagtgggattaggaagagagggtgaattaggattggtaaggccaagcctcgcaggggattgtacaatttggtgttgaagcatttttcttttacctgtttggctgctcagaatttgagactgccgtggcgtcaaccatagaagatccacttctttcttaagttattattaccaggtaacctgcaccatatcttgaagcttagtcttttttcacaacatttttatataaacacaaaaacacaaattttgatatatgaccttccaaaactcaacattgtttttctttttttttttttatattattattattagttccaaaatataagaggaaaacttctccaatgtttactaaatgaaaaacgtaacataaaaaagtatgttattaaatcaaatgagcactaagataaattaccaagtaaattttaaaatcagtaaccaagcaagaactgcaatatcaaaactcaaata

SEQ ID NO: 16383 - DNA, 3159 bp, Cannabis sativa
tatatatatatatagtacttacgtcactaatcactatgttggtattgggtgtccatattatctgactattatttgttaacatatttcatattaataaataataatacttagatttgggggatttatatatactacaatatgtctaactattttattattattgttattatgtcaaaacaaaaattataaaattccatattatatggtcagtccatttagttagtggccgagtcagaattgtatttttatcatatatatacaatctaatttaattatttttatagacatttttattacaaatatagatggtaattaactaaaaaatatatatacattttttttattttcttttttagcctctctcgcttttatattcaactattatttaatatatttctgatcgtggcacgtctatatataatatttttctttttttaatataaaaaacaattaatttaaaaataaaaataaaataataaacattcactatgagaatattatgtgagatttagcttcatacataattccttatccaatacaagaaacttttacactaaatccacttccactagcatattcaaaataacaatacataatctatcaaaaaaaagaaaaaacaatacataaattatctctttttttaatagaaaaaaaaaaacaatacatatataaatactaataattaaaatataatatattgatgggtagcatagctgacgtgtcctcttacctagaaatatgggcaataaaacagtccaactccttacgagaacttccaccttccgccatggaccgtcggagggccccaccaagctccgccgctctctttctcatctcaaccccttcatccgaagccatcaatcttctgaccccacatgccaccgtgtcagatctcgccacgtcatcacgcttggaccactctctaaccacaactccaatcctcaacaacttcgttaccagaaccgcatttctcggttggtcagaatgcataggccaagttcctatgggcactcccatagttatgctctccacgcacgagttccaaccacaatggcttaaaaacccacctgttgatgggtgccccaaaatttccaattggggcgcccactctcttacaactaacccaaaatttctcactctctcttcgtacccttttgggagttgtaactttttcactgcctcaaaaacgttacctttgtctgcttctctaagtacccaaatgaatttttggttacttttttgtaatccaaaagccaattctgagatttgttcatctgtgaaagctgttgtggtcccaaacgacacataaatgactgaattcggttcttgcttgtctaaccactttaaacacacgtgtctgtcgtttgacaaaaacgacaccggattaaaaggcccaactgcccagtgtttcttgttaggtaaaatcctatcaagtaaattcatgtaaggtctctccaacatacgactcgtgttgtagagattacccgagttcaatttattgaactcgtactgtccggctatgaactccagaatctcggagttcatacagccttccaaagaaggaatatccttcgggatattctcgacactctcttctacttcaagcaaagacgtcgtttttttcatgccgtcgtaataaaataaaaagatagcaaaagccgaaacgctgtgaaaagtgtatgactcagcgttttgaatagaaacaacgtcttgcacaactgacgccattagcgagtcgtggattaccacgactcttcgggtttgggacgagagatggcgcaggagagccgcggtggggtggcgaagatggctagttgcgcggaaagaaggaaggagatgagaagggaaggtttgttggagagatgggtttggaggtggggaaggaaaagatgggattgtgaaattatgaaagtgtatgtttgggattgagtttggatcccatccttggagtctagctttggcttggtggttgtggattgtggtgcctacgacgtggaccgggatgtcgtaggccgcgataaggcgggaaaggtggaagagttggttgatgtggccttgtgccggtaacggaacaaccaccaccgccacgtcatgaggaggtggaggaggagaagggtgttgatattggttatccatatgtgactatttgttatggatatttctatattgaatattacttaggtttgggggatatatatagtacaatttgcatgaagaatctaatctaattattttattattattatataaaataaataaaattaaaataaataataaagtactgtttttgttttcttcttatccttgttggaaaggtatagtgttattgcatttttgggaccaagtaaaagaaagaaagtatggggtaggttttataatttatgtataatacgtaaggctgatttctgatttctatttattctttcatatatattttttttctttcttttaatttcttaataaagaaaattaattattagtacgatcaagtccttttccgttgcttttatgggaaaaaagtaggatgcaagctgtaataagctgctcctatatacatagatagactattattttttattatatatttatgtatatatattacacaaattaatatatattttcttatgacaaattaagagaatattgaggtggagtggcaatttttagtgttgtatttgtggtagttcacgtgtcgactgcacttattttatcagaatacacgttgatcaataaagttaaggctaattaatttttctcctgtactaaattatgtcgtcgttaaaaattttccttcgaactattgagattgttaaatttaagaacttttatctaattttagtaaaaaaattctaacttgaataaaaattaaaggggcatgatttagtagatatcaaaatttggggaggatggttttatacataaacaatcactaaaacagtaaaattgaatgaaattagacaaaaatccttaaatctaacaatctcaatagttcagagggaattttaatggtcaaaatagttcaggatatgatttgttacatgtcaaagttcgaggagaaaaatttatatatataaatttataattagaggaatattaattataatattctattataatttttttagttaatctctacgcctgaaactatatgttgaaata

SEQ ID NO: 16384 - DNA, 3315 bp, Cannabis sativa
gcaactaactttcaaaaaatagaaaatcctaaaaaccttcccatccacacctctttttatcaaaataggccaaaattaacaataacgtacaaagttacaaaacttcattgatcaaaaataagaaacaccctcttttcttcctttcctatttatcctacaccctccatttctgttgaaagtggcctaaaatcctaaggcagagagaaaccaccctttctctgccttagcaatatcttttgcttgtttggtggcttttccatccatatggcatttcaagatttcgacgaaatcaccgaacggcgaagagccgccagggaacaaaggttccgaaaaagggtcatcaccggtgtagttaccagcttcatactcttggctataatcgcagccgcagctgcagcctttgtggtctactctcgagccgagcatggtagctccaaccgcgccacgtctaactctgcttccggctcccctaaagaaaacaagccggagccaactgtgtcggaagccgaacacaaagtagtgaaactcatttgcaacgccactgactataaggataaatgtgagaatgctctaattcaggggatgaagaattattccaccaccttgtctcatcatcgaaccgaaggttatctcaataccgcgattttgtcagcgaaaaatgagcttcgacaggctttcaataaaactaaatccttcaaattcaataacccagatgaggaaaaggcgtttgaagattgcaaagttcttatggatgatgccatggaagagcttgaggcttcaatgtctactgttaaggaaaatggtacatttaccaataaaacaccccagttgaagagttggttaagcgccgttatatcttaccaacagacttgcatcgatggattccctgaagggaagaccaagactgatatgaaaaagcttttcgaggcttctaaggagtttacaagcaattctcttgccctgatttcagaggtgacttcgcttctatcgacgtttcaggctgttggaacagcccgtaatcttaaagaaatagaacagaactcgctagtttctttggacaaggatggatttcccaactggattggtcacgaggatcggaggattttgaaggtgaagggcgatatgcctaccccaaatgtgactgtttcgaaaaatgggacgggagactttaaaaccatcaatgacgctttggcagccattccttctaaatacgaaggaaggtatatatatacatatatcagaactaatcttccaatcttgaaatcccattttggcaaatgtattgtgtcctcactacatggttatgttaatataaatgcaggtatgtcatatatgttcaagaaggaatttacgatgagacagtgattatcaccaagaagatggtaaacgttacaatgtatggtgatggatcacaaaagagcatcatcactgggagaaaaaattttgtagatggagttaggacattccaaacagctacatttggtaaagcaatataataacttaatcacattcattttggggacaaaagagtattaaaagaactaaaatgttgttacattattacattacatgtatggtggtattgcagttgttttaggagaaggtttcatgggaaaagcaatggggttcagaaacacagcaggaccagaaaaacatcaggcagtggcagctcgagtccaagccgaccgtgccatcttcgccaactgtcgtttcgaagggtaccaagacacattatacacacaagctcatcgccaattctacaggagctgcgtggttgccggcacaattgatttcatcttcggggacgcggcggtggtcttccagaactgcatgttggttgtgcgtttgcctatggctaaccagaagaacattgtcactgcccaaggcagagttgacaagcaacaaactacaggaatagtcatccataactgtcgcattatggcagacaagaagcttgagccagagaaagcaaaggttaaaacttaccttgggaggccatggaaggagtactctagaacaattgtaatggagtctaccattgaagatttgattcatccagatgggtggttgccgtgggaaggtgaatttgctctcaaaactctgtattatgcagagtataacaacaaagggcctggggcaaaggttactaacagagtcaattgggctggttacaatgtcattgataagatagaggctcaaaagtttacagtagagaatttcttgcaagggaatgattggctcaatattaaaggaatccctgttcgttacactctttacacttaaattaataataattaagctttctaatttttttttttcatttttctttttccttttttttaatggattttggtcataatccattcttataatgtcagttttagtgtgggatttctgttcatattttaagtttttgttgaaaatagattttgtttcactcaatattgtcttgtcctgcgctttaaaaaaattatgttatactatctcaaaattaattgatattaataaatgtagtaattttatatttttaataagtaatatagagttcccacatcattaatcttgtccttccatttttgaaggcttattaagtatttcatatttgagattgagaaaaattaaaataattatgttggtgagatgtttttgataacccgtgtggactatactgcataaaataaacattaatattatgggttatttcaaaataattttttttatttatacagaattcacagagcatttaagattaatctaaatcccaatttaaattcatatagcaacttatatagacatagatgatattattataacataatataaaataatattttatgatattattataaaataatatagtgattctcccaatatgttttggctacaggtacgtggatgatattttaacttccaagatatacgtcaattattcagactcatttcagggaattttagtctgcaaatagatgattaaataaattaaatgaccaattttcttgcattattattaatttgattagggcttttgtgtccttaaacttttatcattcatgttttcctttagttttttacgcattttgaccttgcttgtcataacataaatccatatgagttatttattctcagaaaaaaaaaagaaaagacagtaagtactaaactccaattagttcacgagcaacaataatgtgaaagtgagcagagatctgtcttcactattggccttaatacatcaaaactacacaccattttacacaattaaaataatatataattaatcttaagattccctgaaatacacagaaaaattacacaaat

SEQ ID NO: 16385 - DNA, 10079 bp, Cannabis sativa
  modified_base (6462)..(6467): a, c, t, g, unknown or other
tgttttttttttgttgttattttgatgttatattcatgttacttttatgttgttttcttgttggttttatgttattttttggaaaactgtcaaaatgtaaaaaaaaaaaaatattctttgaacgtaaaaatgtaaatactttacaaaaaatggtgccttatgtaattattccaatttagaaattatataatttgagatacaatttggctactcctaaaactttatttgtgaatatcttaataattaattagctatttttaagttatattgtgctattttattatttaaaatacatttggataactttaaagtttattttcaaaattaatgagttgtcatataatataataagctattatttttatctaccaattattttatatacctttttgttactttgaaacttatgtgtttatttttagattatattaaattaatttgttattttaaatacatttacgctacttattttttattttgctttttggaaaaatatctgtgttactttcaagtctatttaataaactaataagttacaataaagtttaaaaaaaaaaatttacataacttattagtaaaattagaaaatatttaaattgctagttagttattttaaagttatattttcagttacttttcaagtttacaataaaaattaactagttttcatatagtataacaaataaacatagatatgaaatagttttatttaatatattttatagtaatatttaaattaattataatttgaatacaacccctcataactattctatcaacctctattttaaataaaaataataatttgaaatataaaccatttctcttacaaaagctaactacaatttgaaaataaactaaaatatcgtgggtgtataattttgcaggtgtggagatgtgattgtctaaaactaaaaatttagaaaaaaaaataaataaatataaaatggtatctaacatggtgtaaaaattaacccaccaaatttttgtaattaaattataattaatgtctccaatgtaaatttgctttttttttttttttgcctttatttttagtgaaaaaaaaggtaaccaagaaaagtgatagagtgaattcgtgttatcggttgacagtgcggtcacaccgggtagaggtttcgctgggtttggtggggttatccgtgggggtgggggtatggtgtgggcgacatgggcagtgggtggtgttggggagtttcaggttatagtggcggagctccttgttatgcgtacgggtctgttgtgggcggtcagattggggtacaacgtggtgtgggttgagacggattcctctattgtgagctcttggataaataatcttaattctattattatgtttaaaccaattattgaggagattaattctcttttagttgctgctggtggtaattcttgtcgtgccatctcgcgtgttgcgaatggtgtggtccatggactagcaaagtctgttattagttcgttaggggtttagttgtagacagatgcttgtaatagatttactagtgctcatgtattttatttaattaatacatgctttctttcaaaaaaaaaatggcaaaatattaaaaagaaagtcggtattattaatattaaaatagtaaacggtatttccgtaaatattttggaaaaatcatgtgttgtgtaagtaaggttaattttctcaagatctaaactcattttcctctttctattaaaatcccttacttgatagttcatacacacagagcctccgtttctcctctcttatcttcccagccaagccaagccaagccaagccaaccccatcgaagccgagccgtcgaatcaccgccgagcgataacggacggtcgaatcaccaccgcgcggctgtagcccattgattctcagtccctttaactggtcgaatctcttcaattcagatctctctatattcaggtaagtcaaatagtggacttaagggattagatcattgccctagattgattttctatggcaacatctgggttatgtgtttggctccataagaaaatagttgatcctctaatccaaatacttcgcagaggtgcagaacctaagcttttggccttctctgcagctttgggaattactttaggactattcccaatatgtggagtcactgtatttctatgtggacttgctattgcattgcttggctctcattgccatgctgccactgtaatgcttgctaattttgttgcaacaccaatagaattgagccttgtcgtacctttcttacgcttcggtgaatttatctctggtgggtctcattttccattgacatctgatgcttttaggaaagtcttaactgggaaagcttcaaatgaagtcttgctaagtattgctcatgccttgcttggttggcttatagcttcaccttttataatggggatcttgtacttgatatttttaccatgtttcaagattttggttcataagttcagtgttgctccttcaagtcccaacaagtctctgctttcacaatctgaagtgatgcttaaggttagggatgcctgagccaattcttgctttgcttgattcagtcatggaacagctttatgctcaattgtttactattatgtaacttgttcatgtttatttgtgatccaaacatgtctgttggcttttacaaaaattatggaattatagggtcattatatttacacatgtatgtatgaacaaaggcattgttctaatgaatataatagttcttgttggcttttaaaaggttatgaaattattaagctatcattacacaggcactagacaaagctggctagaatagaaatagagctagcttgaaacaggtcttctccttgtaaaaaacattgaaactcttgaattcttactcttgcaaagtaagagatttcaagtactaataccacctgcccttttatcccagcctgaaatagatgcagctcaaccttgttaagcccagcaacttcatcatctttgtggcagcatagcccttttcaagtatgagtttttcattcttggatcacttcgaaaacctgcacatttttgttggtcaattaggtgaaaggttttttctgatgctactgattgtttttcttttgtaggttttgggctcttcttcttcctgattctttgttttacaacccttttttaacacatgggaatgggaatgggatttaagcttattcacatcgtacaactgcaattgcttgaaaaatatatcaataaaaagaagaaaatcgtatcaaaattttcaaactaggcaaattaggtacaagcagaaaaatagccacaatacatggtataacaaaccattatataaggcaaaaaaagaaaagtcatcacaccgaagaaggcataacaaaccaagtgaatatttaaccaaaacaaaccaagtgaatatttattaagaaggcataaaactataattattattgtattagataaatcatcacaccgaagaagtaaaaatagaatagaaaaataaaaatttataccaaatataatacattagctataaaacattttaaaataattattttaattagttggccaactcaagaaagcattaaaaaagataatacttactaacgtttttaattataacattttagaaaacacaattatctagttacattactctatacaataaaataaaaaaacgatactcaatactaattatatgagaataaaaatcacatatggagataattaaaggttggaataaattaggaattaaatgctattaaagaaatttataatttaatgttaaatacacattaattgaaaaagagcaaattgtcaagaataaaaatgaaaataattagaatttaacgctattaacgagctattatctgtataataattaatggaaaactatatttataataaagatatgaatataacaaataaacctataataaatatgaattgcaatttgaataaaatgatgttattaagtaactgatcaattatgtgtgtcaagatgacacaatgaatcaatggaagagctttatgacttttaaagagggagttgagcacgactaaaccaatagcacatatgatctaagatcaaaatagatgcagctgtatttgtggaacatgggtgtttttgcttttcttgtgttgttcgtgatgattcttcattgttgtctaggaccatttcgagttgtcacggtggtgttcttcaaacagatctcgccgaagcacttaggggtcaaggaagaaagctattagttggattaagaaaaacacacatggatctatttagacgggttgccttattgtggttcaagttgtttgtagtcaggtggttatgcaatatgactttggtcatggttgttggacctcgttctttcactttgtcgggccgctacctcaccttaatagagtaggtagaatacttatattcaagataactcttgcctattcttctaatgtgggacttaggttgataccccaacaatccatgaagcccatataaccaagggaactcgctgcctcaccatcacttttgttaggaagactttcgacacatgtcctaatattgatctcaatcttgtaccgtaatcatcaacgaaacacgtcacctaactacctcaatattagatagacttttgatacaaggtaccatatagatcttcaatcgcgaggtcatcacattgagtgtttctttccctgtaaagcctttaggagcccttgttgtaccaaaagccctttatatttgggctccttctcaaaaggtctcatactaatggagtaaataaaacacttatattcaagataactcttatctttcttccaatgtggaacttagattaataccccaacaatagtacatgagtgatgacatttgttgtctgagttgagtacttttgttagtgtttgttaagcttgttgaataagtagaggaatgttttcttatttttggtgaaacaatccacaaaaagagtgatgattcattgccttagttttagtcgtgcgtttaaggctgtattgcttaaaaaaaaaagtactatcacaaaatgaaaaagagaagaaaaaggaaaatgatttgaatcatgaggtattgcatttcttaggcaaaaggatctaaacccactttcccctttctaataaatccctaaaatatgaaagtacttaatacaaacaattagatagagaaaagattaaatagaataatattacaaaatgaattaaatgatcattacacatgtatgtcaaagaggcattgttctaatgattatatgttgaggcagcccctagacaaagttggctagaactcaaaataagttgcataaattatgtgtttcctgaattctttggctttggcctttaccagcaaatgatcatattaggcagcagagtaccaactcatcaaatttcattgaaaagtaagggatttcaagtactaataccaccctgctctgtatcccatcctgaaccagacgcagctcaagcttttgttgaacatatataagaccttgttaagcccatctcaacatcatcatctttgttgcagcatagcccttttcaagtaaaggtgctgcatctatatatacatatatgtatatatatatataccaattgcaatacacataagagtatgtgtctctcattcttagatcacttccaaaaccttgcacatttttgttgctttattaggtgaaaggttttttctgatactactaatggtctttcttttgtagattttggactcttcttcttcatgattctttgttctacaaccctttaacacatggggtttaagtttattcacatctgataattgcactggcttcaaaaagaattcttctgccccttcctccaagcatctgatcaacaaaatcaattaacatatcagtaaaaaagaagaaaatcatatcaaaattttcaaactaggcaaatcataacaataatttttacctgttgattcttgatggaacattctctgaagacataataacaactggtacatctttgagattcttagacatctgttaaatcatataatatataatcatgtcagttttcttgaatctctctaacgaaaaattcttaaaaaaggaaaataaattaataccacaaattatttaccttgatctttctgagaagatcatagccagtcattccaggcatagaataatctgtaatgatcaagcttggaataaacactgaacagccatcatcaccattattacataaacccaaaaactctaaggccttatttcctgaatcaactgctgtaactgttgttgaaaacaaaaagattattattattagaacactcaaaatccaatccatttcaaaaggggtaatccaaaaaaagaaaatcatgatgatttaattgttaccttgataggaagaagtcttgagaagagcctctattaactttctgtcaatgatgctgtcatcaactgcaagcacatgaaattgagccatgattctgtgaagaagaagaagaagaagannnnnnagaagaagaagaagaagagaaggaaaagagttgtttggtaatggagagatgaaaaccacagaatggttgagagacttttatatgggaagccatgagaggtgagttgggaaagatacgattttgacaattgggaaagcaagatctgacagatctcaacaaagaatctccatgattttctaggctgatttttcaagcaaagaagttgcactgctttttctttactaatataaatttgatcaattctctacttttttttcatttaaattattattaattatgactcttgaccttttgtaatgttatgttattgtattattattattataaagatatggcctatattttcttagaaactctaacacaatatttcagcaataatttttagttatctctttcacatgcaattgccgtgttccacatatcctcacaatctctcacatgtaatgtgattttgtcaagtgtcaacacccaaaataaatatagattatatatatacatgaatatatatatatatatttttgaaagaaataaatatatggaataatatttatgtatatatttacagagtgacaccattttgatttttgatcgttttaggtcaatatgcataagtcaatgatgtaagagattattaactagatttgacaaataattctcaacatcacatacgattagagaaatcatacaaaatatttctaaaaaaatatttctatttttttattagacgatgagctaatacggtggcccacaaatttgttaaaatttgtgtattatttcctaattataatttcaatttggagtgtgttccaattaacttattaccttgtttggtaactgagatgattatctaataaaaatttaatccaattaatttattaccttgtttagtaattgagatgattatctaataaaaatttgattttctttttaaaaagaaaaaaaaaatcatacaaaattggtgattgaagctcagttgcacaccaagtgatgatgatcgaagatcacttgggtgcaacatgtcaacttgggcgtagattcataaaccaaaatgagatttgactttgtcacaagtcttacaccttattcttagtgcaaaataaacataatgcccaaaatgaaattgtcattttataaataaaaccatgcgctctaggtaatacatcaacttgggcgctggtgtcgatggtgtgcatcacctgggtatagaatgtcaacttgggccaggtacttgtaccaagtgatgaatctaagacgacacaacacctaaaaagctttattgagcacaagtgtgcccccagatatcaacttgggcgatggtaacttgggggatgtcaacttgggcaccccaggtgttttagtcttcggatggttttgtttgatgtctgaaaggcattgtttccttttatttcacgaaaatgaaggaaatgatcggagaacatcttcgcaaataccttgtacatgccccaagtcaacatacgccaacttgggcattgggtctaggttaaaactatcttgatttagcgtctttgtttcccaacgatcttcttggtggaaaatacacacgcaaatttagtttcatcaaagttggatatttcacttgagcactgtcaacctgggtgtcagtacatctcactgccccttccggctaccagttgcacaaacatccttcctacatggatttaaggaattggggtccaaagatgttccaaaaaccctaaactagttgtcgcatgcccaacatgacatgatgtcaacctaggcgcccctaggtaaagttcttctctagaattggttatagggctcaagaattgattgtggcatgtctttcatatgcttagttgtagttgttgagctcttttcatatatcattaagacttaaaaccaatattgatacgatttagggcacaaatgtgaacctgagcaccgaggtggaccctcgagatgtctagatgacatctttagtttctagatctaactcccgtatcttattcgtaatccatttacttagactgttgaaagacaaaacttagaaatgaatttttaggagcttaagtgcttacttgggtgctcctattaggatttatgccctcaaagcaagtatttattggataacatatttttgaatatatgaaatacaaatatacataaataaatatgttaattattaaaaaataattaataaatatcagaaattttcttattcatataaaaatgtatgatcttgtaagagtataagagaattaagatcataccatatgaagagatttttacgtggttaaggtattaatgacccttagtccacaagtcacttgtattggtgttgaaggttacaacaatggcaggttttctagagaattttaacaacatttttgcttgatctaaaattctctggtctcgtttacagtaagtgtgcagtcctatttataggaaaattagagtgggaccttatgagattaaggcctttatgctgagaaataccctaaaggttgcatctttagaggtaattctttttttttttttttttttatgataaggcttttcccttaagtaggtcatgaatcgagatccaaggtagaaggataggcacgtacaaacatgacttgtccattgtgatgtgctacttgagggcataggtcccttaaaggagtatgggaaaggtgcatgtcagaaaaagcaatgtgggaaatctccaaatttatttgctttatgggaaacccattttgctattgatacgcaagggccaacctagctacaacgcttttccttgttatacgttgcaagatggggaacatgcctaaaagaaaggatttaagaggatgaatctcccagaccttcctatacttaggcttcacccaaactcgtctttacagctgacgaggacctctgggactatactttgctcctaaagccaataccctattttctcaattatgataatcggcattgtctcttaggtcgagaccctttttgccacctggcagatctttcgagtgcacatgtatggtcaaatatttgggataacatttctcccaagtctctatttgcattcttggatgtggagacttgttgatggcattcatcaagttcccattcaggagttaaccttgccattgcgagttatttaatgcgatacagttgtgtttggtacaagagacgtgtctatttccaaatggcatttttattcacgcgcattcacctcctttttttatgaggacaatttatattttgatgcaaaatcctaaggcgcaccatttatttcagagtagtaggagggtactcgagtaccttaaatgtctcctcatatatttgtttcatctagaagcgtctggaccgttggatcaagtgtgtttcttggaaattgaagggagttgtcacattaatggcctagatcaacccctctagggcctataaatagcctgtggctctctttattgatatttttgcactttagaattttccagagccccttttgcccaaaaaaatttctggttaaccagactactttttgtgtttcctccatctctctcaatcatctttttaccttcacaccacgttgtcgtcgtcgtttgaaaacaatcctttcgatcacataagtttcttctccttctcctt

SEQ ID NO: 16386 - DNA, 4602 bp, Cannabis sativa
tagtgtttgttgcattgacggaaaatccattgcccctgcagtgataaagctacctaccagacataagcgccaatcatacacaaactcctctgtctccctaggacccagtacttccaaatcgagtccaccttctgactcttcttcaatggctatttcgaatagttgttgattaggattactagaggatgccatcaaagaaacgtgggaaaaagccaaagcaaatttcgaaaacaggacaaaacacaagagacaaaactaaaaaacagagcactcacggaccatgacaagagtcaagactaacattactaccattttaatttaaaaaaataggatccaattgaaaatactgttatataatataatatttaaattaaataattaagtgtgacaaaatattaatttgtcaaattgtaacatacattatggagttacaaaatgtgtgtagaataatcacaaaacaagagttgcagatccttaaattaatgattacttaaatatataactctcaactctttttcactcttaaattagtaaaagatgttactaattgtttatgaatgatagttattgaaaatattattgttggagacttgatttattcatttataagatgtataaatagttcaaaatcaagtggtaatgatttgaaacacagtaagaagaattgaccaaaatatattcaaaagctcagagtataaagtggtaagttaaaatatgttgaaatgtatattttgtactgtttgataaaagatacagatacagccccaagataacgtttttgtttgcaaagttctgttgccttgttattgcttttctcttttagtcgttagatttccgtttgtaaaagttcacattgtcgtttctcaataattgtcgtttttctttgtgaatcagttatttgttatcttttaacgtattaatacacattcacagagtatttctagcagctctcccttgccaaaaccttcatcctttggagaaagaaaaattgtacattccagcatcaagagcaatggataaaatagattggattgaccaagagataaaaaaaaatgatcacattttctacccctacatatatctatagagtaggggatcgcttagatgatcccatggctaggggaggtagaagtctacagtacagttttgcacatttttctcttcgcctatcaccatcctattccgggtcaagcggcgaacacaaccaaaccagacgattatagccaaattcttggctttaacaacttctcccattcacgggtaagaatcactcccaggagggaaaatcaatgactgataccttgtatgattccgagctgtagctgcattgatactggggagcaagaatgagttcttgggatgcctaacttcaagagttctagaatgagcactatcatctgtagttatttgcacagtacaggtctatgggaatatgggcgatataagaggagggggttgtagctcaaagaatgcttttctcccttcagcaaggcttcctacgcatattgtatcaccacggccatgccaaatgccatcttggacattgttcatctccaacgttctggattcctgtcaacatttaactatttgtaagtttcctaggacaatgatgatttctaatgtcgacgacagtggaaaaatatacaagtaaaaaggctatcccagctccttgaggacctggaaacctcccaagagctcagtgctcaaaacattagtacattaatcatttcgtgccctatttccactcaaccatacactaggcatttctttgtttatacaggcattgcccatgctaacagactatcacataagctgccatttctcccagcttatatgaccttattaagctagtcctaacaaattcctatataatatcatctacttctaccatttgagaacattttcttcataaagtttcagctactcgtgcatatttgagtagtatgttttgtgagagactgacctgacatagcgtgcagcaggggcaaacaagatggtagatgcaattgtccaaattactatcgctaccctgcaacaacaaatatctcaaattttcagtactagtataaaagtagacccgaaaggaagtaaaggaatggatgaagatttttcgtatgaatagattaaacataaatcaaagaataaaataaaataaagatcattttgcatgtaacatatgttaacttgattcaaattattcaattcaaaagtgctggtctctaaaagctctcgttatacttacttaactgaaggaatttcctaaattctcctttaacttatcttcttaacagtaatccccaaccctttagttccataacttttctttgtctgtaaagcttaacatgacatttcataatacctaatgataaagttcttgttgcaggataaacatttagaatttaaaaatatctatgaaaattgaggtgaaccccttatctagctagccctcccaaatctctcaaaaacctcttaataaagttgttgaacacaattatataaaataataaaatttgcttgagaaataaggggagtaaattctatgacactgctaaacctcttgactcataaaataaatggagctttcacaaaccttaagaactaataagagaactgaaatttgtcaaaaaaaaaaaaaaaaaactcctcaaaaagctagaaagtaaaatgcaaacagagaaagaagcttaccctgatgttaaatttctttttcatctgggaacgaaagaaacccagatatgctcctattgaaatcgtgaaagcaattgacaaatataagaaacaactccgcttggtgacaatgagggcgacacaatttagaaaagcaccaagggcaagaatgaaataaatagttccctgcacatttatatgaaaaagcttagaatttccataggcagctatagaaaagtcaaattcaccagaaaccagagtcaacaaacattgaaaggacagagcttaatcaagtatatagagtagatattaaatttggggctaaatacctgtaaaaagcaagaactaaaaccagctcgtctcatgtttttgccaaatctgaagcaaggacagctgaaacaacaaataaaatgctttaagatttaactaaataagaagtgctcctcaattattaattataaaagcacgtaattatgtcacaaaatttgaaggaaaaaaaaaaccactatttttatgctttacgcccactaaaattgaccatttaaaatagcctaataagaccaaatcaaaacatagaatgtatttctctacattaaaaaagccaaaacaaaaaaaaaacattgaaacgtcttcgcagtttcaagcttgtcattaaacgttttcacaatttaaaaaagtttaaaccttgatttagaaaaaaaaaaaaaaaaaaactttgaaaaaatatttattcagcaaatatgttaaaaataagttgttaataactacacattgaaaaagagtcacaattttataaacccagatgatcaaaaataaataaaagaaaatttgctgttcgagaaaaaaaaaattgaagggaaaacaaacaagctttaggaacatagattaggaaaacatttttagggcaaaccggaaaggaaaggggtaaacgaagaagaagataattgcttatttcaaggactcaccaagcagattcgatagcgacacggcggtcttcgaagcaatcaagaagttcaccttcccacatccgaaaaacgcctccgagttccccaccgtctccgtctccatctccatctccatcttggtcagggctctcaagcttcctccatttaccttgagtctgcaaggccaccgtggagcaaagcaggtcgaaatccagaacagccattccctcctcaagtaacttctctttctccacgttttctacctcaccctcttcctccatacccaccttcacctgcttctccaaatccgccattactaggacaaaccaataaaaagctagggttttccctcttctatttccgtttctctctctctctctctctctctctctctctctcttggcgtccttctggtttgattaattgatttgaacttagttaggccaagcgaccctcctctacctttaaggattctaactatacatacgtacacaaataaaataaactaatatataaataaacctaaagtttgttgttttttttaaaaaaggaaagttcattgtttttaaaaaataaaattaaaactgtattattattattattattattattattatttggctataataaaagtgaaaactttattggtagaataaactaatcataataaataaataaataaaatgatagtgacaatatctggcgaggatgaataagcagttgtgttttcgtagcaaaaaaaaaaaaaagagttcggtgtgtttgggttggcaacttggcgcgtaataatggtgactgactctttgagccattatcttcttctttagtattttttttttataatcatggatgataaacggcttatagtttgacacgtgtacaaaataatacggaaagattctgctaccggccatttctcaaaataaattttaacaatctattctattctatatatatgatttttttttttttttttggtaatccactcaca

SEQ ID NO: 16387 - DNA, 3181 bp, Cannabis sativa
  modified_base (3119)..(3154): a, c, t, g, unknown or other
gggcataaaacccaacagatacgagggctcgtggctgattatgggcaatactaatgttgtcctcagcgagtctaaaagagagggctctaaaggaaaagaccaatttatcccttttatttctaaattggtagagtcacggggtcttattaatttgcctattcaatgagataaattgacttgaaataatcaccgctttcgtctagggcatgtaaaatcagtgctggataaagggttgggtaatgacagttggatcagtctatttcttagagctattttgtgttcttacttagactagtaattcagatcataggtcgttgtgtttatattttggcggtctgaatgccaaaatcaaaaggagctttaagtttgaagaaggttggactcgagatgaaaggagaaaattggttatagcccatgcctagggctcggttgttcatccttggcctccggccaggttttttaagaaagttggggccactcgggttgctttgattcattggatcatagttcaatttggtaagttagaaagtaccatcaaagctcttgaatgtaagttggaccttatgcaaaagttacctacggggtctcgtgattggaagaaggagtgtgatattcggcgagcccttaatgagtccttagatagaagagctttatactggaagcaaagggctaagatctcttggcttaatgaaggggataaatattctaagttctttttcctcttggctaccattagaggaaggagaaatgctatcgggagtattttgaatagggaggatacatggattacaagacaggacctaattgggaaagagtacactgatttcttgaccggtatcttctctggaaatgatgctggtagggtgatgaattgtgagagcctcatacacgataggctctctgatttggaaaatgaggatctagttagaattccttcctttgatgaaattcgtaaaacgctctttgccatgggcagcagtaaggcccctgggcctgatgggatgtcagttttattctttaaacactattgggattccgtgggtgatgacttttgtgatgttgtgtcaaaattttttaagtctgggtctatgcacaagggattaatgcaatgaatctagtgttcatccccaagatcctgaacccaaagagaatccatcattttagacttatttccctatccaatgtgtcatataaggttatctccaaaatcatagctaacagaatcaaacctatcttacctggaatcatttttcctactcaagtggcttttgttccaggcaaaatcatccagcacaataatgaataatgtaattgttcaagagatcattcactcttttaatagaaagaagggtagagggggcttctttgctattaaaattgacctagtgaaagcttatgacaagctgagctggaaatttgttaatcatgtgatgtcatgctttggagccctagataagttttgcaattgggtttcccaatgcatctctacctccactttaaacgtctacctaaatggtggtccggttggaaaaattgtgccctcttgcggtttacaccagggtgacccgctctccctttacctgtttatttgggctgtagaaatcctatcaaggctgctagaagatgctcttggtagagggagtatcaaaggcattaagctcaatagggggtccggtccaattctttcccacattttcttcacggatgatcttattctggttgggagggccacaatggttgaggctaaaggattttagcaatgtcttgagaacttttgtgcttggtctggtcaacaaatcaaaaaacttaagacttcaatcttctttagtaaaaatacttctgatgggttaaagaagggcatcagcgaagctctgggaaatggatcccctaaaagagacattaaatacctggcgctttccctttttcaggtcgagacaaaaggatgcagattttaatttcattttagataacctctctttaaagcttcatgggtggaaagcaaaaactctttctaaggctggtcgcgccaccctcattaaatttgtgggcctcactatgtcgtcatatgccatgcaaactaccaaactgtcaaatcatcttgcttttaaaattgatggcattgtccgtgacttctggtgggggttcgaaaaaggaaatcatgggatcattaaaggcttgggataaattgcgcttccccaaacctagggggttcatggattatcggaaaactaaagagttgaattaagctttcctagccaagtggagatggaacttattaactagcagccaatctctatgttatcgtatcttagaagctaaatatcttaaaggaatgagcttacttcattgtgattacaaggaatctgattcgtggttttggaaaaacgtgatgaaagatacttccattttaaagaaaggttcctataaaatggtgtctgatggtagagatactaacatctgggaggacccttgggtggtccatgggaataagtttatcccaacgtctaacaaacatgatgcttctagggtttcaaaagtatctgatcttttgtcagaaagcggtggttgggatgttcataagttgtatggcctttttgacaaagagaccgtttttgccattttaagaagtgggcaacctttgggtcagggcaaagataagtgggtttagactaaggaaataagtgggcgcttctcttacaagtgcctatctgattcaagctttacagagagcccctcattgtgaggtgtctctctctctggaataagctttggaatagtaaaattctagaacgccataaggtcctttggtggtgtatcatgtctaatgcttttccggttcgagcgattctcaataagatatttcatattgaggataagatgtgccctatgtgtggggttgaggaggaatccatggaacatctttttttttatcttgtaacgtggcttttcatttatggcggtcctctccgtgggggatctttcccatcgttggcactggtttttgcatgtgggactgcgtgaaattcatctggggtttaaaaactaaggcattaatactgatgaggtgttcctccacgcctcaactactgttgataccattgttgggttttgtgccctannnnnnnnnnnnnnnnnnnnnnnnnnnnnnnnnnnntaataaagatcagaaatcacattttat

SEQ ID NO: 16388 - DNA, 7443 bp, Cannabis sativa
atctctaagaataataatatgctatacatcacaaaataaaaaaatatatactgtataacaaaatttatataccaacagctcacaacaacacatagaaaattaaaaacatcgatataacttttaaattcaaaatttttaacaaaactaatatagttgtaccataatctttaactaatttacttctaattctaaaaaatatgaaaaaaaaatattaattttgttatgaaaaacacatttattaacatactataatttcctttttgttaatcttgattttgtctaaatataaaacttattctccaacacatactatatattgaattgatatagatacgaacctacttataatgtataccatgatttgacatcttacttatctttcttaattttgaacccgccaaaaaaaaaaaaaaaaaaaaagagagaaaagcatttgctaaagtttaatattcaaatccggtaggtgagacatgattatcataagcaaaattttcttaatagcaatcattccaattttctttttattttgcaagaaaaaaaaagtccaaactaaaactagatcaacattcatctaaaaaaaaaaaagaaaatctcaataaaattatacaagcttataaaattttctatcttacaaataattaaactaaatttaataaattagtccactaaagagtacctttataaaattacataaacttgttcctcatatatatactgtttgaattttgcaaattttattaattaaatcgttttttaattaatatatcttcaaataaaattaaacaaacaaaaatgtctctcaaaagaacttgtctcaactgggtttgaattttatttacatatatatatgtaatctatatatacagtatacacccatggttggatcagggcttgtgaagaaagaaataaaatatttgttgctggacacaacaaatgggctaagaagataaaaagagaaattaggagcaaagctcaagtgggcccccactagataaacaacacaatgaagtgtccattatattcggtctacacgtacggaccacaatacacttcactcactcaggttcggcttagggtgggtgggcttccgtttctttttatttttcttttattttattttattttttggttttaaaatttaccaataacaagaataataataataacaataatagacccaaaccaagaaagaaagaaagtccaataacccaaggaaaaaaataaattaaaagaaaaaaagaagactgaaaataggttcgaaatcttaccccaaaatcttatctcttaacgagtctaaccactgcccactgctctttcaaaccccaaaaagagtccaattaggttttcgggttcgtttcgcgaaaaaagcccaaaccatttttctctctgtctcgtttggcgtcgtttctctctcttctttctctctctttctctctgctaaaccctagatctcgagctctcgcggagccctgaagctcggtctccgagcttcgacttctgcctcaacggaagattctgctctcggtttcgaattactattcggtaaaaaatgaaagcccttacttttttttttaagcacttttgttattgtcattttttgttgttgaatctggattttgggtcttcctttgaaattgatagcgtttttgtttggattaagatttcatgttcgagattggagtttgaaatttgtttatggtggtgtgtaggtctgtatgtctgtcgttgtatacgattatgtgtgtatcttctgtttgtgaaaatatatatttcttttgttttgtggtgggttttttagttggggaagaaaggttcagattttattatgactgaattttaaatttgagctttgggacgatccgtgtttattctttgatctgggcgggcttgtattctggagttattttctgggaagcccaagctcgatcaaaatcctttttttcatctttttatgttcactatatttattattattaatattttctggaactatttttagcccctttgaaggtatagcattttatgtcttgttttgattatgacccaagttggaataggatccatggttagggctctaaaaatgttctattcttgtttgaagatctatgatggactttaatctgatggactgtattgaatctaggttggtcaaactgtttagattgacttaatgttttttttaattcccggcccatttggtttggtgggcccagcccaacccttttgtggggccttagctgatagtgcttgggcagttcgaacaccaagcggctaaggctttcatatggtattatagaactctgcatatttcaacagtaaacaaaacaagtccgactccattggcaccaaacccaacataaggagaaaaaactgacactattaaaacagcagtgatccccatcccacatacccagaacttcatgaaaattaaaacttaagcaggaaaagatgttaaagcaatgccttttgtctttattactcccatatgagagttttatatcactctcttgtttgatgttgctagtaatagtatagtaaccacatataacatgttaaagtgagcatgattaatagtgtgtattcaaactagaaaggacaaggtaaggttaactttagatgctgtactgcactggtacctaagttcagcctctcaggatattattaagtaaaagtgctcaagtgtgaaggagtagagttgaactactcgacttagttcttcaaaatggagtaccaatttggcaacctcaaaacttgtagacttcgaatgcacttgagtttgttcttttgtaatcatgcaaattatagtccagacttttaaatgctgattcaaactggcctgtctttcaattacagagttgatcctttgagttaccctgtcacttgaatttgtgtgtgataatttaatgtcaggtgtctaatttaaattttgaatttaggaaagtaataagatgttggtaaggagtataattttcaattttaggtgaaatagagttgagaagctatttaagctttctaatatgtttgattttgaattggaacagtgtttatttattcattatgccacaagtttggtctacttatattattctctgatggttcaccggctgacatttttttggatattgtttatgttgccaagcaggatatttatacttgcaaggaaaaagcaggatatttatacttgcaaggaaaaagcaggatatttatacttgcaaggaaagatggctgcatctgttgaagaccagatggtctctactaatgttgaaactcatatggtcaccactcatgatgaaacccacttggtcaccactcatgatgatacccatgtagtcaccactcgtgttgaaactcagatgatttctactcctgttgaccaccagaatcatcagatggtgaatactgatggcgaacaccagatggtgaatactgatggggaacatcagatggtgaatactgatagcgaacaccagatggtgaatactgaggccgaacaccagatggtgaatactgaggccgaacaccagatggtgaatactgatgttgaacaccagatggccaccgctcctatggaagaccagatggttgaacaccagatggttgagcatcagatggtctccacccccatggaacaccagatggtcatcaaccatgttgaagaccaaatggtgactactcctcttgaagataagattttggagacccctgacagtgagaagatggaaacccctgatgaaggcaagatgctaaccccttatgaggagaagatgttaaccccttacgaacagaagactccaaactcgtatgaaaataatgagataactaatccagaaactcagcctaacaagcggaggaagaagaagtctatagtctgggagcacttcacaattgaaactgtgagtgctggatgtcggagggcatgttgtaagcagtgcaagcaaagttttgcatatagtacaggttcgaaagttgcaggtacaagccacctaaaacgccatattgcaaagggtacctgccctgcattgcttcgcaaccaggataaaaaccagttaagcccgtatacccctaactcaagagcgggcaatagcccttctgatccaccaaaacgacgatacagaaccagtagtgtgccccaaattatgtttgaccctgataggtgccgccatgagattgctaggatgatcattatgcatgattacccccttcatatggttgagcatccagggtttttaacttttgttcagaatcttcagccgcagttcaacatggtaagcttcaacaccgtccaaggggattgtgttgcaacgtatctaatggaaaagcagaaccttatgaagtttattgagggcataccaggtcgtgtttgccttgccctagacttgtggacttcaagtcaaagtgttggctatgtttttatcaccggtcactttattgatagtgattggaagctgcaaaagagacttcttaatgttgtgatggaaccatatccggactccgataatgcctttagccatgctgttgctgtttgtcttcatgattggagtttggagaacaaattgttttctcttacatataatcagccactcagtgatgctgcacttgaaaatctgaggccactactgtccattaaaaacccacttatcctcaatggccaattattggttgggaattgccttgcccgtgcttttagcagtattgctaaggatgttttgtatgaggttcatgaaaatgtcagaaaggttcgggaaagtgtgaagtttgtgaagacttcagaatcccacgaggaaaaattccttgagctcaagcaacatcttcaggtcccaagtgaaaggaccctgtctctagatgaccaaactcaatggaatacaacttatcaaatgctagtggctgcttccgagttaaaggaagtcttctcttgcttggatacatctgatcccgattacaaagcagccccgtccatggatgattggaagcaggttgagatagtatgcatgtacttgaagcttctctttgatgcagttaacatccttactaccacaactaacccaactgcaattactttcttccatgaagtatggaagattcagtcagagctcgttcgtgcagctacaagtgaagatcctttcattaatgccttgacgaaaagaatgcaggaaaaaatcgataaatactggaaggagtgtagcttggctttagcaactgcagtagtcatggatcctcgcttcaaaatgaagttagttgaatttagtttcaacaaaatctatggtgaagatgcccccacatttatcaaggtagttgatgatggaattcatgagctttttcatgaatatgtggcccttcctctgcccttgactcccacttatgccgaagaaggaaattcgggcaacagtaggacagatgaacagcaaggaggaactcttttgtcagacaacggactcacagattttgatgtctacatcatggagaccacaagccaacagatgaaatcagagctggaccagtatttggacgagtctctgttgcctcgtgtccaagagtttgatgtgttggggtggtggaaactgaacaaactgaagtacccaactctttcaaaaatggctcgtgacattttgtcaattccagtatccacacttccttctgaatctatatttgataccactgccaaagagatggatgggtaccgaagttccttgcggcctgagaccgtcgaagccctcatatgtgcaaaagattggatgcagtacggtacagcaggcgtttcaaatgctcttgtaagaatggaatattgatgagcttctgggttcattagtatcatcctccctcagattgtgaattatatgttttggtgatacttttgcccaaccagaactaaaaatgtaagttggtaggtgctcatgtcgtttttggaaaaaaacatataaataatttgtttatcaaatgtcgtttattttagctattacattatgtttgtttaatttttcatatgtgtttttgctctgttttagaaattgcaagattagtttgagaaataaagtaaatgttcacaagtagtatgtaattgtaggtaataaaaacttcaattccaatacatatcctattaatcctaaatttgaagtaaaaataaacaaatgttgctaatattattggaataaggtaaataaatatctattttattgaccaactttaaccaacatgttccacattgttagtgagtaatttatggtgtttatattatacttagtagctaccaagtcttaatatgataaaattttgacaattaaataaatattatatttgatttaattttatttaaaaaaaaataacttagattaacttaaataaataaataaaaaaaacaatgtcaatatattagtacaatctttaactaaaactaaatttagcacgacaatttataataaatagtgtctatattatgttttacaattaagtaccacatcttctagctagtaagagtgttagagttttttgaggaaaataggaactgtgtcccatttgtaaaaacagttacttgtaaagttttgttttgggaaatcatatttaaaacatatatttgtaggtgaatagtttctagttaaatatgaaactacattacaaattagaattatgctagaataaacatatcagtgagataaaaagtaaacttgaacgaactttaaattattgtcttcaatttacaaggattttcaatgaagaattttatattattatcttcaagttacaaggattcgcaaggaagaaagaagctgtctaataaggctacaaactgagcccttggggctcttcatataagaaaaatagaatttgggcaaaccataataagttctgtgcttcatatgaaaacaattatagctttaaagatgagcacaaccaaaattgaaattaggaacccaccttgacaacatatcctgcttacagtagaaaaaggctaacactggcaatactactagaggtaaataaacataaaagaccatacacatcaagatccaataactaaaaaaccagcaagattatggagacattcaatgttggcgtaattagacatccaataatatttgtttagccattagtttcaatttcatcattaggttgggattttgtatctttctcagagatcatttgtaatgctttgacatgacaccatttcttagcttgttagtgctagatctttgcattggttctaatttatccattaagaaaaatgcttgttaggtaagaaacattggaacagggcagattttagatcagttctttgatattagtactattggaccaggataatactctttttatagccttgtagggctagaaaggagctttcgcaagtttgtacatgactactgcttgattgtgggatttttcctgtcacccttttttttcaaatgtaaaataagtttcactctgtgcagtagtgtaccattttctttt

SEQ ID NO: 16389 - DNA, 7951 bp, Cannabis sativa
ttaattaataaattttattttgtacatttcctttacaaggaaaacataaaaattgcaaatttactatacataaaattaagtagttaactcattgtttaataatatttttatgtaaaaatctattaagaatgatcatgattaaaaatgagatatgataacgaggatgtaaaaatttattgaaaatgatcatgatcatgatttaataatatatatttataataaattaattaattaaaaattatcatttattaaatttaaaataatttgaaaaattagaattctataatattaatttattttgtttctttaattaagagtaaaaaaatcactgatattattagagaaaaagtttatataaaaaattatcaaaatttaaaatttgatatagtgtttaacttaattaccactaaataaaatagaacttggctgtttgttcgtaatttatatataacctaaaagaaaggtgcttgctttaaaaaaaaaaaaaaaacagaacaaaaaaaactagaaatagagagagaataaataataggaatccgaaaacccaaagcaaaggaggaagagagggccatcggagtcaacaatcggtaaccctagcgagttttagaaggccttaatgggaaagaagaagaagagggttgcctcgaaggtgtggtgctactactgcgatagagagttcgacgacgagaagatattggttcagcaccagaaagctaagcactttaagtgtcatgtctgtcacaagaaactctctactgccagtggtatggccattcacgtcctccaggtccacaaggagagcgtcaccaagttcgtattttcttcttcttcttctattcaatttttcgtatttttaaatgtgatctcatcaagttatgaaatttcattcattctctagataacgaaacaatttttatcatagaatttgctttataggttccacagaaaagagggggagtttaggcaatagagaaaacaatggaaaatagttcttcaggttttaatataacatgttcttgaagtcacggaggatttatgggacaaaataaattaactgggtagcaacatgagtatgcatctttaagaagtgtataaagtagttactgatttgattaggggttggagtatttctttttcttctaaatatctaatttcctttgggttttcctggcttttctcctaacaacttcctcatattacctttccattaatacaagttgttgttgtgatttttctttttctttttctattatgagtttatgtatggatatgtatatgtatatgttaggttaaaagattaaatatttataaacaaatgattttggtaaattgattgatgtcgggatcgttaaacttaaaactacaaaagaagataagatctctaattgagtttgagattttccttatgctggattttattcggggatacataaaattctggtacaagcacggatcactgaaacagtgatgggttttatgaaatttctttttctatttgtttgttttgttctgggactatactgtaacgtgtatgtgataataactgggtatgcctaaacaataattcctattaagttgttcagttcaattttaaagggttattggttaaattgtttcttgtatctcaatttattcatggatggacaatctgacttcctgctgataatttctttgtttgtttgtgtggtttaagactttaagattacctttcttataacattttgggaattggggaacggtaatatgatgttgtttgtaattatcgtttcttaaatagtctcataagggtcatcatcctttcctgttattattattattattattgtgtgcatatcattctttctccaatcaattttctttgttttttatataagttttgattgattgtcattttgaattttgatgtagtatgtatggctgattatactcgaatgatgtagtattgatttattgattccatagaatagcggcaaaggcaataagactgtggaaacggttaatataagaatattttggtgtctagaatgttatttgtgtgatatgatagcccttggggtgtgtgagcaaagggcgtctgattattcgggaggctagcaagtttagttcagggttttgtttgggacagatcaatctttttcgtaatgtttatctgacaattatcatgaggcatatgcattagtattatgaatattattattatccttgcatgactttccttatttaatttcaatatgatttccctgcgcttggctttattttttctctctcaatgtggagagttcaaagctcccaatgtttgcgtaactacaggcccaaggatatttacttgtttgctgggttattttaggaggcattccaaagatgccttcatctaaataatacttttgaagtaaataaatatgcaatggatgacgccacaagaatggtgatagtatattttgatccctaatgccataatattttctagggccttcaccttaagctcttttatgtttttctttccttatttctttttctttttaaaattctgattgttacagtttccagttgagactacctcatttggttgggggttgtgtgcgtagtggtctaaatgtatcttatagtttttctttttatgtaatatatatctatatcattgaccattgttcatttgttttgacaatccagggttcccaatgcaaaatcagggagagaatctacagaaattgaaatatatggtatgcaaggaattcctgatgacgtcttggctgcacattatggtgaagaaggtaagaggctgtttggctgtattttcagtttttaaatttttgtgttttaaaagtgagaacaaaaaatagtttttttttttatcattttaaaaatttaatggtgtttgactcaagtttttctaaaactcttttcagatttttttttactaaaaaaaatcaatagtttacaccataccatgacatgaacacatccaacttgggattgaatcttagacccgaacccagacccgcacctggtcccagaccccaaacccagactcgaactcggctcggatctagacttggtctgggtccaagtccggggacttggtccgggtctcaggttcgagttcgaggttcgggtcggggtctggggattcgggtctggagtccaagtccgggaccgggttcaggttcagggttggggtccgaggtttgggtatggggtctaggtccgagttcggatcttggtttgggttctgggttcagggtccaggtttggggtccgagtctaagttcggggtcggggttcgggtccaagggacctcggtccggggtccggggtcctgagttcggggtctgaggtcccaggtcccgggtctgggtctaggtatgtgagcgaaaatgtaaaatataatatgttagacaaaaaaaattgtttttgaaaattgaaaattacattttgatgtcttctgtttttttagttttttaaaactcagattttaaaaaatttggccaaacgacccctattagttttgaaaagctattttctatttttaaaaattgaaaacaatttttaagttatgaaacccttaattcatctggaaattgacaaccaagttatttcatacctctttgattaagtgagctttggtattggttttcagtaaccaactttcttccctccttgcaatactgctttaacatctcttctcttgttgaatatagaaaaatactagaattaatagtgttgcaagttgggctttcagtgtctaagagcttgtcacgcagaacggaagcagctggcatatgattgaacaaaatctcactaatcgtaaatttcttgcagatgaagatgctccatcaaaagtggcaaaaggggatgttttatcaacaccgttgggttcaatagtgcctgcatcaatgggcattgcatatcctcctcaacctgctttaggggcgatgccaccaatgtatgtatgttttaagaggttttttgtttttaatggagctagttgctgaacaaatttgtttatattatcattatgctttcctgtagtagcataacatatagctttccctacagtttacttgttcatttgacatttagtcttaacaaaagaaatttatttttctatggtgccaggtacaactcttcagtaccagtgcctcctaatgcttggcctaatcctcatcgtatccagcattggtatccacaatctccagcagtttcaatgcctcagtctgctccattggtggggtatgctcagcagccattgtttccagtacagaatgtgaggcctcctatgccatcatctgcaccaccttcactccagcctgtgcagatgactcctggaatgcccacatcagctcctcctattactgtatcacagcccttatttcctgttggtggcaataacaatttacctgcccaaaatttgacattttctactcaggtgctttcaacaagcatccctccaggctcaacagtagataatagagccttgttagatgcacattcaggtttgaacacttatctgactagtagcttccatatttccaagcattctgatccttagactaagtattgtctcactgaaatgatatgttttttttcttgctttccattaacctatcatattgatcatattgctttcgatagattttgtggaagttttagtttagaaatggatgtaaaaataaactgtaaattagatttagattatatttctaagaaataagtttaactttgggctccaattctacacatgaggattatttgaagtagttcaggcccctgaacatgcaccttgggctgacattgagattaaccttcacctaaaccagtttagagaacatgctatttaagaaacattatttataataactaaaattacagtaattaaaactggtaacaacataatttgcacgaagtcaaggactggctgagaaggctgggcttccaacttatggagttcatcatgaactgtttttgctagatggagctttgtgttagtgataggatgcaaggtattctccctaatgactaaaagtatcaactagcaccgacctttttttgtttatatttgtattatctatgcttcgcagtagttgttctagctaagaagatgaaacaccgagaaggctgggcttggcgaaatttgttttggttggctttgagccaatctttgtctggtccgacataaatcagttcctgactaatgtaatatccatgcctttaatggctctgccatgaagagctggatttcattgtacatgatattgtgaagttggtcctttgttgtattaatcctttgttcactttttgctataggtgagttaatcaattcacactcgtatgcctcgggtccaaatactggtggtccttcaattggacctcctcctgtcattacaaataaaacctctgcaacccagccagccactaatgaggtctatttggtttgggatgatgaagctatgtccatggtaggtttttctactttattaaaattttttattttaactgtatttttttttctggttattcttgctaacttgttacaatgcgtgactgcaatatttgcaggaggaaagaagaatgtctttaagcaagtatcaggtgcatgatgaaactagccaggtaagtgatactacctcttcatttaatggagtttggattgctctaaccacatgggtaggcttttatgtttcatgttttcagattcagttgtttacacattgtttcctgttatagaggtactgatgtatggatttatatttttacttatttttaaaattaaaagaaaatgaaagaacacacttagcaaaaaaaaaaaaagcattaagttgtccatctttctgctaccaacctaattggttgataggcatgctgttacattttaaactgtcatgatcctgtttctacgcaatgccaaccaatcttgtgggcaccaaaagattcaagtaggtattcatgctacttttatgttagtgattatgttgtttgatgggcttccctgcaatatctacccgagcattcttttacctaagctttgtactcagtacataacatagtagctcatgtaaaatttgaatgtatttcttgttattcattttcccaatactcaactttaaatgaagcatgggggtttgattggaagtaaaacataatcaaacctgacagatttttgctcattcatagcatgattgctatttattttatgaccgaacagtgattcaacttggcccaggtcagcttctttcactagtttggcatctctagcataggaacaagatcgatattgtatatatatatctggattgcctcatgttatatgtcttaaagccactgcttatcatttcctgatgtggatttatgtttcagatgagctcaattgatgctgccattgatagaaggatatcagaaagcaggcttgcaggtagaatggcattttagatcagagtgaggcttcaattgatgcatgtttttgacagttttgaggacgcagtgggttcgggtattacattatcaaagttcattaaatagcaaaccaggtgactgccactaaaagccttaaagtcaagcaagtaacattcctgctgtattttttggccaagagtgaattgaagggcggctcacttatttaattcaaaattcatggattcttaacccttaactttgtaggttatgtatcccattttcttggtttcatccatttagctgtattaatacatttgggttaggcttttcaattatatgcaatttttcattgatataaatatatttatttaaccaaaaccacatgtgtttctattgtgtttgttgattttaaaactctttgaacagcagtagcttcagaaatttgagaacctcctcttgttgggctctgaaaagggacatttagtaccccacactaggaaagagcattaccatctccatgtgatagcaccctttaaatagttggttttctggatcggatattgaattgtattgtagttacatgatactttatatgggtaatagacactatgggtggcttttagtatttctccatgttttatgatatatgctaatttttttatattattatttttaatttttaattttttgcttgaaaatggtatttgccaattgatttcatgtcttggataatgtgtaaccaacgcaagatagagctgtcacttgtaaaatgaggatgatcacagaacacgtaacgtaattctaagatcatctccttgaggtgccaaataattgaagtaatactatattttgatatttttataaaaaatctttcttcaatactgtgttaaaacttatgttaaatttagtaccagatatattattgtatcagatttggcacttaaacttttttgattacaatttacaatattgctattattttttaacaattatatttaatttgctattatgtattagagcataattataaaattgttaaatataatatttactgattttgtgttaaatttaatacatttttttggttgtgcattggagatgttctaaaatgcctaaggctaatatacgatattgtgcagaccatcttctagcaaaaactaatacagataatgttaattttttgctcatgtgcaaataatttgtggtgtttatagtatacttagtagataccaaattttaatcttataattaggttttgaattttgataattagataaacaatatgtttgggtgtgattttttattaaaaaaagttgatttatttatttatttttatcaaatgtactattttagtctgtttatttatttatgtccactctcttcttttagggtgagtccctacctagaatagagaggagcttcgtaaaatctttatatattagtaagagaaaagaaagaaaaaatagagtaaagcaaaatgcattgtattgaacaaattgaattgaataatggtacaagagcagtatatatagagtgttaggtacaagaggttggtgaatct

SEQ ID NO: 16390 - DNA, 4044 bp, Cannabis sativa
tgtaattggaattatctttttctttgaaaatagtatacttgggcatttgttttatctagttaaagtgtaattggtgataacttacatatgcggctttgtttggttaaacttatagtttgaagaaagtataattaaatagtttgtaaaatcatatatatagaagaattttggaccttattttatgattttatggatatattatataatgaaatttcaggtttgagggtgtaatgacaccaagtagaggccaagcagctttactcacattttgtacttgcataagcttggctagtgttgcacttgttcttaccataacatatccagatgtgggcaacaattggttttggctcaccatcttaagtccattagcgtaagtagttactatcacgtagtttttgtattgtgtatttattttcatgagtgttactaactaatgtccatttggaaaccgaaaactcgcagaggagcatactattggaaaagagctacgaggacggaacagatcaaggtgaaaatgatagtcggagaagatggggagttgtcggaggtcatcgttcaaggggacgatcaacaagttgaccagttgagaagagagcttaagcttagtgagaagggtatggtgtatgtcaaaggcatttttgaaagatgatcattttcacaaacacaaaaatatattagggaatgagaatgaggcttaaattttgggatattgtatatatactttcaaaactagagtacatagcatatgtgtaaactattaagaacttgattgtattattcaattttgaatcaaattcaaaccctcttcaatcttattcatttagagcaccgtgtaattaaatttatgtgttattacaaataaatacgtgatttgaagcctctaaaaattgagtgtaattatactatgtaattactaaaaaaattatgatttctttttgtataattacttactattttatcaaacaaaatattaaaaaaccatatgtaatttctaattaccaccttatatctatagttacttctaaacacaatttgtgtgtaattaaaaataattaaacgatttaatatgtttaaatgatcaatataattacataattaaagataattaagaaattccaattactataatttctaaaaaaaaattatacaaaatattatgaatttatgtgtaactacacagttacttccaatcactcttaatacaaacacaatcataaccaagtaaagacttcattatctcaaataatttatttgaaagaaatatatataacaaaagggttaataataataatatcattgattcactaggctaggagaatgacattgacaaaggtgtttaattttaaagagaataatgaataagcaaaaattcaacatatttttcttgctcagcaaaagctaggcaacttatttagaatcccatcgacataaagttacattatcaattcaaacttgaaaaaagacgttttttttttcacaaatcttcgacgttatctttatgaactttaaaacagaacaaaaaattctgaatcccaaaataaacaaggacccctctacaaatcgagtccgcttgcttaaccaatcattagtttgttctcctccaagaacgaatatgtgggtacctccaaattgtatggtgctggtcctttacggattcttccagaaatgtcgtagtgggagccgtggcatggacaaaaccatccaccgaagtcacctgcgtttggcaaaggaatgcagcccaaatgcgtgcagacccccacaactataagccactcggggtttttgactctctcggcatcttgttgagggtcacggagagaaccgaggtcaacagtgtttgccagcttgatgtcgtcttcagttcggcgcctgatgaagactggctttcctctccacttaacggtgacggtggttccgggttcgatgcttgagagatcgacctcgagtgaggctagagcaagcacatccttactggcggacatactcagcacaaacttaaggacaaggagacgaatcagagaagcgtatacaaacctaccgcctgtgaggacgaaataggcgaatgcacgcttgctgggatccccaggtgggtatctctcgtggttgtactcatcgtatacgatttttgaggtcgggttcttaaccgctgcaacagttgctggaatgtccgagattaagctatcgtgttccattgatggggtaagtgaatccgaagcaaaacctgaagcaaccaatcaaattacagcagaagccattaatatgggcaaatcatcgagttttctatacttcgcatttgattatcttaaaaaactttcatcataaaacttgaaatgagttgaactagagaaaagtttatcctcagaaaatgacttccaatcataaaacttacaatcaataggctaatgagttgtactaggaatctatgaaaagtcattgcgaacttaaaaaatgcaatcttgatcaatctttatgatgcaggtttcactattgtccaagaaaaagagatttaagtttaataaacaaccagcgcaacaactgagatagacagtaattgtaacgacaagtgatgtctaaagtatatgcaacaaagttgcaagattgggaacaaacaagttcagtaataaacatatcatatagctgcaagcatattttagaaggaaaaaattttacaaacttcttaattttatttctatataggtataccctaactagatgtttatgttagagcttcatgaaataactaatggttaattgagaattgtgagtttcggtatctcctaacggtaagattaaggtgttttaaagaggcaccgaaaaaccaaatgcagatgcagcatataaatatgaagttctcaacctcaaaaagtaaagaaataatcatgagctgtgccagtttaaattcagaattcaacttgcaaaagtaaaacttcaaaggccaataattttcataagagatcaatgaaaagtcaatgcaaaagggtctcattttctaaattaaatagttaaaaagagggagagagaaacaagaaattcatgaacgtaatagattagatacatgtaagtgttacaagagagtgattgctcgtgtttatatggatcaaagtttagtttcgaaaaatcacttgcaaaagtaagacttaaaacgaaaaaggctaataatttgcataagagatcaatgaaaagtcaaagcaaacttataccaaataaactaaacacgaatggcatttagaaacatcactagcaatcttaatgtagatttcatcaagataaagggagaggataagagaagaatgctttgtaaaaatagccttcaaaataactttacaaataattttattagcaaaataactttatatggttgcagaaacgaccatgaattacactgtgaacaaccataataattgttgcaaaacgaccatcatgatagcatagaataaattaaatgagactattatgcaaattttagtatttaacattgctagtgtgaaaaaaattcactgatacatgtaagttttcattgaaaataacagtaaaaagtgttgcaaaagagtgattgctcgtgtttatatgaaccatggcaaacgttctaaattgatatgcatcctaacaatttatacatacataaatataattgaaatccacaatacctggatgaaagcaagtattttcaatatacaaatttatataatacccaaacactagatctaatttcagcatgatactgaagaaaaagaaaaaccctagaaaagaagaaagcaaacctcttgttggaatatgaaagtcggtagtgaaagggaaagatctgagctgagaagaagaatcgttatcggagttgagataacgagggactattgaagaggcagtggccgccgcagcctggttcgtcctccatggagcgattgaaagagaagagaacttcttcgctgcaattctaaacatctttcccctaaaaccaaaatcaaaatcaaaataaggaatttacaaagaaattgcaaccaaagcatcgtctagatccaacccaattgaattaacagccaaaaaaaa

SEQ ID NO: 16391 - DNA, 2524 bp, Cannabis sativa
tcacaaaagattaagcaaattataactagttaacgatgtaattactaagaaattaaacaagcaagaaaggaagaagggaagaaaaaataaacctcaaaagaggagagatgtttggaaacaagtgagggttcctcaaggcgacgggtagggtaaagagaaaaagtacatccttccagtcaaggatttgttcatcggttaaaacaccagggtctccgaagccttctttatctccttgtttccgccatagcttcttcttctcctctattggtagtttgaacaattcttctactccttgctttagtttctccaccaaagaattactcacaccatggtttaccaactacaaattattatcatttcagaaaataatataatgttacagtgcatctctaaaaaaatagaaataactatttcagatagtaatatacaaaaaattaattaattttatttttagtacagtaaattattctaaattattttaaaattcataatcatatacaaaaaaaaaaaattataactatctgaataccaaaaaaatctatttttatcaacaaagaatattatataattagtacttatatatatacgtacctggaagaagccccattctttgcatgctgagtggagcttattgagttcagattcatataattctgagttatcaagcaataagttttggaagtcaataactggaattttttgatcagaagaaattacagaagaagaattggtttgaatttgagtttgatcatatcgaatgtatctttgtggaacagtcaccacattgggatcctttgccaattcttgaacacttggcacaactacattagggctttcaaagtccataatataattttctactcaatttgggttttggctaaagtagttaattagctctatctagatgattttgaataacatgtccaatatgtcaatatttatatatacccaattcatatgcacattaaattttgtcggactttggatggtacaccttatctatctaactatctaaataaatgttattagtcccaagacataaatgacttgtaatatattattattgttaagtttatgtatttttttttagtctaaattagggtgttgttttagtatttttattattttattgtggagatttatatttggttttcgtttttcatttttttaagaaaaatatttggagatctttaattttagtaattttgatgttctgtaagtctttttgaacaaaattgaaaaaatataatgaaaaaataaaacttctttagcttggattaattttctatttcttaaaatgggtcaaaaattatattttcagctcttaaagtcgtggtcaaggtcaacaatagtcactttccaaaatttagatggaaaatcaaagaaaaaggaatgttggccctaaaggtcgtgactttgtaaggaaggtcgcggcttgacttgttcgttggaagaaaaatttaaataagaaactaccaaaaatcaaaaaagaataaaaaaagggtaagtcacttgtgcacggatctggccttgacagaaaaatggaaacttgattttttttcactataaaaagaggttggaggcaaagctttgacaccattcgaaaattgggagaaattttaagtgtagaaggagagcaaggagcaaaaagtaccggtggaggactccaacagtgttgtatctctttatctctataatgtttttaattgaatttttattaattgttttagaatatcttttagtagctaataatccttgtctttattattgttattttttaaaattttaatttttggcttgatttatttattttatatcgaacaatttttattcatcaaatagaactaaaaaattaattgattggtaattgataatcaattctcgtgtgaatgatattttatttataattatatgcgtatactttcgtatcaatttcactgaacaaatttttggcaccattgttggggattgaaaattatcaatatcagtttaattaatttttattctaattttattttattttttcttgtttctaacctgtttagttgccaatttttcttatctcatgtgaaattattatatgcgcatcagaagaggtgcagatagccttgttccttaaatcctgagattgagaaatcttgtaagcagaataaaaagaacaagagggagaccaagaaagcagagaaggtagagctcaatgaagatataattcttggagctaattttacaaggaggtcaggctgaccctaatgctgaaaggagcctgcgtgattttgtatgtactatcttctctgaagggggtacaaaacagtatcagaccaccaggagtggaggccaacaactttgagatcaagccaactatcttacaaatggtgcagtccactctccaatttagtggattgtcttctgaagatcctcacactcacttggcgaattttctagagctttgtggcactttcaaatacaatggagtgattgatgatgctatcaaacagaggcttttttcattctccctaaaggaaag

SEQ ID NO: 16392 - DNA, 4928 bp, Cannabis sativa
ttgcattttaaaatatagtgtaattactaaagtgtgtaattaccaccttagtaattatcctacttaataattacacagttacttccaaacacaactctttcttagcaagtttatttggtaattaacatatcaaaatggataaaaaagtggagaacaaaacataattaaaatttggagaattataccctaaaattttagtaatgtaagtttatcgtatcaaactcaaaattttagagaatttgaccgcaaattaaacttaattacatttatgaattggtacttttgatataaaataaaaaatctgtaaaagagattgactcttgttatttgtttcctatatgaaccgaactggtatgtttttacaatttgcaacttatgtacacaattggtcaataaaaatagctcaaaataaataaataaatattaaaaataagtaaaagtagccagaggaaaaaaaaaaaaaactcagcttataaacacagagactaataaaacgacaccgaggctcatcattacgacaaagcgggaaccgtcgtttccaagcccaagaatcgaaggagaagccgccgaccgcggcggagaccgacccagttcgtgctttcccaagtcgatcatgatctgaaaccgacaagtattgttaccaccgccgggacccgccggcgagggatcgacggtggtgatggttgaaaggttattaaaggcacaagcgtctttcctctggttcatggtctggtaatacacgttgaaagcataagaggcgttacctttagggtcaagcatcccacacgacgacccatatcccaaacttgtacaatccgcataagtacaagcatacttaacactctcagccaaattggggtccattagattggcttgtggcgccattatacaccattgccgagccaaatacctgacccctttggccggaaccaaattctttccattacccatatcgagattatattttactgtcccatcaaaattgaaaataccccagtgtctctcaaagttccctgggtcgatactcttcgcatcttcatcgattagagcgaagatatagacatcaggcagagtagaccgttttggggtcccctgtccttgaacaattcgcttaatgagaccttggttgaatcgtttagcgttttcgtaattcgcgtttgggtcaccgtcagtgggccaacccatttcgccgattatgattggcatggaggggaacccatttttctctagagctgtgacgagggtgtcgaaattagcttccattacgttgttgtaagtgatggaaccgtcgacgattgggttggaagtgctgccgaagaaagcgtactctttggggaagtgagggtcagcttggagactcaggaatgggtagatgttgatggtgagaggtccgccattgtcgcttaggaatttgatgatgttgatcatgagggtatggatatcggctctgaaatctccccctgaaggaagaccactatcggtttggtaaacgtcggcgtttaatgggactgttactttaacttgtttgcctaaaccagcttttattagagctgcttgtacattttgaagagctgggagtgttgtttggaggaaagtatctttgtatgttttcaaaaatggttcattcccaactgccacgtgcctgcatttacacatgtatatttggtttacaactcgattgtgtataagaatacatacaaatggtgttaaacattagttagtacaacaagaatgtgggaaacagacaagattagaaaaattcgaaaggagcccattagccgttttttttaaatttctgttaagttagttgtctttatgcatttgtctgaaaataaaaaagtgtttaactaatctaaaagtttatttggaactaataattgtagatatcgacttttgtgattagaatttttatttgccatactaatagggcaagcaaagcatgattattaattaccttatattaactccaattgtgacataggctgagacgttacgagacacccaattctcagcaaaaccaacactgccagcaagaggtgccaagaattcattaggtatgccgatcataacttcaataccagattttgcaagagccttaagagcaccagggtcagcttcaaatagcttaaccttgttaaatccattgtctttgaggagcttcacaactatgtttggtggcagtggatgagttgaacgagttccccagtttgcagcaaagccaaaaacgccgactgtaaaacattcactgaccatgcaaaagagcatgaaaatccaacagtaacgtgaacccatgtctcgttatgattttctctctgtactaactcaaagagacatgtgaagagagactttgaattcagcactactttaaaaaggttcctagtaactttagtggaaggaaaggtaaggaatcacatgaaaatacaacaaagaactcgattctaaggcaaacccatttgaatgattgatcatattatatattgaacagtgaagaatcctactacatggagggaatttggttgtggtatacttgttggtgagcatttggtgttggtatatcttcccaagagaaaacccatttcaagaaagaacctttcagagcctttttcaacaccaaaagtttcagtttctgaaaggtacacgcgtcctaccctatgattcccgtattaattgcaattacaagtggaaagtgaataataaataattccaccaatcaacaccttcgaattctttgctatttaaaatgtcgaaccatgttacgatattaagatgatccacggcataaaatacaacaatacactctacaacattttaatggaaattaattaatcaaaatagttgctaatcactatgggaccccaggaacaagaacaaccatcttgggatacttttttaactataaagtaacaaaatcggggtattaatacacataataaaattcaaaataatacttccttttctcctacctctctttctaatttcactaaccataaagccggagaaaatgagaaataaaataatgccagtttctgaacaaatcaaattgtgggcacaaaattacactaagaaacaatcggtgttgttagctataggctgagcagtagcagctcagcaatgatgttgaaattcattcctttctcacagaattcacaaaactatggcagaagagcttttagttgagccctgaaaagatcagcaagagctccccgaacatccatctaaacaaatcaagaacaatcaatgtatcaaccattctagttaactgataagtaagccacacccctaagagtacaaaatgtcacgcgcatctagtaaagcacagaaggaacaatggtcaggctcggactccttataacttatttagttcaaaccaaaagtcaagctcatgtagggatgcaaaaaaagtatgatgatcatactcgaactccctgtgtatatatttatacataattgtattgtaagctagaactccctatattagaacacctattttgtccaaagtaatgataaaaagtgagagatcttgtattctcctatcaatagaactagcacacttaatacacaagtcagaaacatggaggttacaagtacgaatatgaaacttccactttatccctttctctctcaccactgaactagactcagtagcacctatcaaagttatcgcacaggcatagtacagaaaaaatcccgaaattgaagtattcatccccctctagaacaatatattggtgttacagggtgctcagaaatacattatacaggcaacaaattctatcaattgtgctcattaaagtaaataagattacctggtcacagcatacaagcttcgtaagcagaggataaaagtctctcaagtgtcttctgaaaatctttttgttcatataggacatgccattaagcacctgaaagaatgcaataaaaaaatgtcagcactactgactgttctcattagaaatacccagattgtcaaacctgtaatctagtcaaaaaattattgatgccatgtgacgcagaagtactgactactgagtagtacatcatataatacacgttatggatgcccaaccaaataataaatatagaaagatgtgtgaccaattcatacaagggatcaaaccattttggaacgtaaatgacgcagaacacatataaaagtggaatcttaaagtcttctgcatggataagtttgttctagaaacaaatatgcaaaaccaagagagaagagaaaggagaagattcttagagataaactgtggttgataaattcgagagaagtttaagaaataatgaaccacaacaaggcctgtttatgaaaagtaaatcagaaactaagaagctaaaaaacaaaaatccagtcactaggcagttaattataataatccacatcaaactacacttctagttatcgacaaaataaatcatataaatatttattctagttttaatctttttaagtgtacatatatgagaataaagtaagctaggcatgtgatctccatcactcataccttaatacctagtaaaatcataactataatagaacgatacacattacaaactaaaatctaaatgttcagaacagaacaactaaacattacattgttgacttaataccttaacaataacgggagaccgcaactccagaactcggtgaatatccatgttagtggtctcgccagcagtggactgcaaatcagaagcttcccggagtacctgttcacaaaaagacactagtttctcttctgctagtccttcaagtttatcttcttcatgttgatcatcattgttggtagaaacatcatcatccttcttgtcattaaacccagaagttgatttctgtaaaatgtctagatatatacaagttccagctaattcttggcggagaagatttaaaggtggcctatcaaatagtgagctagtgttattta

SEQ ID NO: 16393 - DNA, 2329 bp, Cannabis sativa
atatttactgatgaaatgtattgacgtttgttgaaaaacagttgtctaaagaggctgtaacaccaccaatatcccaagctccaaccccagttgcaactgcggccaaagttccctcaactccatctgtgagttacattactctaggttcgtttagttgggagcaagatagtgataaagtcaaggtaataatatcattttgaaaaagttattttatagtatcattttgcactaatgtcctatgattttaattttctgtttttcttcacattcatttttagttatatatctctttagagggagttgaccaggagaaactagtaactgagttcaagcccatggcttttgatatcaaattccatgatgttaatgggaagaattatcgatgtgctattccaaaactgaacaaagagattgtccctgaaaagtgtaaggtgttggttaagcctaaaagggttgtgcttacactttttaaagcttccaagggaaattggttggacttgtactataaagaagataaggtaatattttcatgatttagattgggaactctgagaactatgtaaccaaattattcttttatgattttgatccttacagttgaagccaaagcttgataaggaacaagacccaatggcaggaatcatggacttgatgaaggtgagattctcttgcattaaattttaggcaaataatacatgattcttttttaagggtgactaagtaaaatgcttatgtttttcaacattttacaaattgatacttttcttatatgtttgatcatgttcaactggattataacaaagtgttttacaacattttcacttaaaccctacaatattttaactcaaacctcaaatcttctgaccatttgagttattttactatcattatgaaaatgtgcttgaattatgtgactggagttttgtgatatgtagaatatgtacgaggatggggatgaggatatgaagcgaactattgcaaaagcatggaccgactcgaggtcagggaaggttaccgaccccttgaaagggcttaagtagggtaacatgaataaagaagaagctgaattttcaactccttggtacagtgattttggtgtattgtcttgtgtttagggttgtggttatatggttctctaaatctaatgtcttagaacgagtttctgttgagtttgtaagaagcttggacttgaggactcttttttgttatgaaatagtttttaaaatcattattaaaaattattaatttttaattcttaattcaaaagtattaagattgtgttctgtaattattatctgaaaacagtgttttatttttttttaattaagaaaaaattctcagaaaacatatgtaaaatcgttttcatattttattttttaaactatgaatttaatttttaaaagcaaaataggtcagcctgaaaatttctataaacatttttacttattataatagtctattttatatctcttagaaaaaaaaatctaatttttttattaatatttattttttttttcaaataaaaaaaaaatgggtgcttctacaatgctttcctttaaaaggggttcgccgatgcattttatgttgttgagagaattttttagttcaatttttaatggttacattgtagttattaagagataaaattttgagagatttggaaaaatttaacatgccgaaaactgagttaaaataatttgttatacgtgaggtttttttattttatatgggggtaaattatttgaatttttaatttttatgttaaatttttttgaatttctaaaaaatttacaagatgcaaataactataatatagacaacaatgtaaagaaattggactaaaaattactctagctttaattgctaactttacaatggccactaagcactttggcttaactactagtgcaattgttgcattcataacttctcttcgagaccttccaagcctccaaatctagagaaatgaccaaaccaactatgaatatccatcaatgaccaatcaaaggatagatgttaaagagattctatcactgtatcacaattaaggtagtagctagaaagaagctccattatcttgaagcgatgtttaagaacacaatatattctaaacagcacaaatattacgcgccttaatagcattgagaacagataagtagaaaattcttaccttaaaccttccattctttccggccttgatatttcgaagcttttttaacttcctgaaataccttcttaaaaacaatattaaccaaaagtgaattgatttttaaaacagaaaataacattttgttgttttcaaaattcttgttttttgtaactttatttt

SEQ ID NO: 16394 - DNA, 5304 bp, Cannabis sativa
  modified_base (4237)..(4237): a, c, t, g, unknown or other
atttgtgtactgttttaagaagttcgcaactagctttatcattgttggagatgtttatgtttgttaacgatatctcttttcgataatagtatttcagtactgttaccctgctaagcatgtttgtctgtaactgcatgggtatttaatttcaaaccattcttcctttgctttggcttagactgatgaaattttaagaaaacattttctttttcttatttttttttttagaattgagttattacactgtaatcctgtggatgatgctcgctactcattgtttgattaaacagattaccaatgtttctgcctatatttgacacactctttgtaatgcattgagagttgattattgagaatgataggctaggaatagttttctatttggacattccaacaatataatggctgttctagaagcattaagtatggatatttccaatttcaataattaaatttacttgccaaaaagtctataattcatatatgcaactttacacacagacacgcagatgagactatgcaccagaaacaggtgaagtggcttattatcttttgctataaatgtttgtgtaagccactctttgtctgtgtgtctgtttttttttaccagtggaaaaaattttctaaaatgttataagtgtgctgttcagatatggcagataattttgctttgaataaccatacatttgtttcttgtttctatgacttgtatgtggtatgtggagaacaaaaagaggagaaatggaataaatgtgcagaatatttaatatgaaatgccaaataagacctatttctggactatgaatgactactgaatcaacaatggttacttaatttggttattttcagatgggtaactctggcacgttggtacattgcataatgatgtatagttggttgatttgttaccggaaaagacttttgtcttgtttctgtcattaattttgaggatatatagttggaaaaagaagagcactaaattcatatggcaggaaatttatagaagggaatttgagattcagatacagtttgctttttgttaacattccttgaacaacagtaatcagaaaacatcaagtgactatttgagcctgttcagattaattgttcccatcttgtctattcatgttttttttctttatatagttaccagtgatcctctgatgcctagcttcttgataatgcaaccctgtcattgatttctttactagttttcagtttcttagaatcttttttccaatagagagagatagagaggctttttcttcttttttttttctttatttgttctgatggaacgttacaaaagtaaaaaagaaagcgaaacaggagttaaaaaccctgcaatgattcagctaaaaatgactagtttaaacctgaaaatattcccttggcttttaattttgtggtctttttattggaaatatagtcaaattcttggacaaccgtactgtgttttgttttatactaaaaaagcatgaaatactttccatactagtacttgtgggggtcagtgctatcagagctggtcctttttcacctgcagtgaataaaacccttgttaaagccacattgccatgagccatacgccattgccacttaaaagaaaaaaataacaataataataaaacaagtacaaaaataaaaagcagtttgtaccccaaaggagaccaaatgtaactatatgtgtgtgtgtgtgtgcagaccccacgtggaagagttacagtggtcacgtgggttttatatgtagaatgaccccaacacagcaaccatcaacgcatgtttctgtgattttcttcaggttttggtactcgaattttgtactctttttttacttattattactactactactactactgccattacccaatgtaaaagcatcaatcttgggatttacaaactatatacgaactcgtacatcttatgagtgctttcactttttttatctttcccaaaaatttagcctttatgttgtttgaaatgatgaaatttagaaatatttttgtgattatttttcattgcataattgcatgtatgtgtgggtgtatcaaaagggctctttctaatccccctcaaatagatattggaaaataaaaaatgacttagttattgtatcaaaacatagctttttcaaacatggaaaattaagtagtcaaaagaagaagaaaccggcataatagaagatatttttttgtatgtgtgtgtgagaattacagttatttgtgtatgcaataattgactctactccaccatggaatggaaaaagtctataaagagtaggaagtgtgaggcatcatatgctacattgaatttggctaaggctcattttttttaggcagtgggattggttaccatctaatatgttattataatgtctaaggtttgacatatttgatgtgatccagagtgtaaagcctaataatatggtgctgagtgagtagtattgttggtgggtactacagtgtatttgtgataatatattctttccttgtactagaaacaaagtgtttatttataatgaatccattattactaaaataactttcgacaacacatcaattattaattcactctaaaactatgcttggatctaactttactttgttgttggtggtgtttgattagagaaaataaaataaaatagaataaaaatgaaataaactttatttcattcctttatttagttgtatttcttaaagtgttaatgtaattctaatagaatgactttgactattccattttaaaataaatggaatgatcattccaatacaagaaaaaaaattttttttttattaatttttgtatattttaaatttgattacattttatttctatttttatcctcattttcattctaattctatttttatgtttttattcattctaactaaattaataccaatataattttgttactagcagaaaaagaagtaatgcgatttcaattttgttggggaattggaagtggaatacactaatccctaaaacttggccataaataaaatggttggaacttattgggttttttttcccagtaatttaacaagaatatttcttcttttttattgtagttaaaagacagccgcatttgatttgtcttttttttcgagtgaaagaatggttggattgaactgaaaaaattggccaaaacaagttaataaacatagataaatgttctgttttttttttttttttgaaaatagcatatattattaaatattaaataaatattttatgtttgggtatagggataaggttatgcttagttaggtttggtgtgtattttaggattaaataactattcccctatataaacatcaatcctgtcctcatttgatatattcaatacaataaaattcacttttactaaaatggtatcagatattttctccctcaagaccagatccacttttcacgaatcaagatccacaatttacggatctgtgtctccgtctcgaacacaaagttgatcgtcccctgcgttttcaaatggctcgaacacgaaggctccctctcgctgcaacctctgatcacgtcgatgatgactccaccaccgttcttgtggtgcctcctccctcggaccttcctgcagctcccgtctccgtcgtcgaccacatcgtcgacgattccaccaccgttcccatggttccacacgttcaagaaccggctctttctcatgttgatgctccgatggaacgcgcagctccgaatcttcagcgcaacacttcatctccatctcagcacgtccgaaccgactctgtcattccacctccggccgtgacttcaagatccgtacctccggtgactaatggtaacactccccccactcactctgtcattcaaaacattaactccagttctttgcagccttctcacgatcgtccagccaacgaagacaattcgtactttgttggctccggtgaccatcccgggttgattcttgtgacacctcctctgtccgaccataactttcagcaatggcgttgggactttctcttagctctcggagctaagaacaaaaccggtttcattgatggtacactccctcaacccgatcctactagtcatctcttccactcttagactcgctgcaaccaaatggtaatgtcttggattattcattgtgtttctttggatataaagagcagtataatgttttgttgatactgctcatgaaatgtggaatgagcttattgaccgttttagtcaaggaaatggacctcgtctttttgancttcaagaatctcttacagatttacgccaaggttatgaatctgtcactacatatttcaccaagcttcgggctatatgggatgagatcaatgagctccgaactcgtcttctatgcacttatcaagcatctgtcgataacacaaaatttcagaatcaagaaaaggtctttcggtttcatactggccttaatgagtcataccaggcggttcgtgaccaaatacttatcaccgagcccttcccttctctttcgaaggtgtaatatcccgataagtctaatggtgaataattaaggtttatatatacattatgagttaatcaggtaataagtaggattatgatcctactaatctatttagcataaaatttaaaattttctataagtgagtaaataagcgtaatttataaattacggagatttatatagcatgtgtgaatgcaatatgagctatatgtggaataaaaatatttttaggtccagcgaccctgaagatctaataagtggataaataggcgtaattttttaattacgaagatttaattaaaatacgtgtatataatatgagttatttatgaaataaaaatattttcatgttcggcgaccctagagactcgattggaggccaaaaatgtcacaacagttttagttagaaatatttatagaattattgggataagttgattttagaaatactgggacattttaggatacttgaagttagctaaataccctaaaaatagagatttcttaatagctaagaaataaaaagataactattaataataaaaattttattattattattattataatattattttatatgtataaaagttatcgtaacttacttaatatatatataagttaatataaatgttactataaacataaatgaagcactacgaacgaacgctcgttctccctcttttaataaaactttatccttctatatttttgttctttgattttaaacccaaaatttagcgatttaagctctggtagtagcggaatagaaaatccttgaagagggaatgcttaaggtatggtttaattatgttttaagctaaaaa

SEQ ID NO: 16395 - DNA, 3888 bp, Cannabis sativa
ttcggtttgggcgatttacaaattttttttgtacagccctatctattacaaagttttttttttttttttttttgataaatattacaaagttaatcaaactgtgctttaatgtataagtgtttgtgtcgttattatatgtaaattcggaattttttgaattcctatgcttcgtgtgggattctaattcaaaaaggtttcacttaattacactcttgtaaaattttgttattattatttttttttataaatcaaacaacttcaatggataatatcattcaaaactatggatgaaagaataataggtaaaaaataaatataacataaactagtaacaatagccttgatccagccataaggagaattgatgtttttatttttaatcaaatcatttatcataataagactatcaaattcaagcacaacatttgtccacccatgagtccatgagtcttgatccagtatattgcctatttaattcccagtgcttcaactacatcaggttcaaactttacaattttactatcacatttagtgcaaaattttgttattgtttatactaaaaacaaaaataccctttgtataattttctcagcttatctttctaactcaaaacttatttgatcatttctttttctaaaactttctccacaatggattatccttggaaccctcttttacaaaagtggaatgaaagatcaagaacaagagaaaaaaaaaatgaattgataaataagaataagcatatgcatcagactataagcggtccatgtatcgaatctatcgggccctagcaaaaaaaatattcaatatgaatatcgggcccactatcaggccctatgtcgggcctatcgaaccctgaccaaaaattatgaagaataatgaacatcagacctacatcgggctaatatccgaccacaacaaaatatacaaatttaaaactaccattgggcaaactatgaggccttatatcgggcctatcggactcaaacctaaaaattatgaaagagaaaacatatcgggcctaaatatcgtaccctatcgggcccacatcgggccataacaaaaaatttacaaaattccaaataggcattgggcaccatcgtaccctatatcgggctcatcgggcctagacaaaactattgggagttggtcagacaatcggaccgaccatcgggcccctatatcgagcctttgtcttcaaccccaaaaccaacatagcatcacaatgcatcgggccagccctaaagatgcattttctcgccaaaaaaatcacagaccctagatctaatccaatacaatatctaaccctagatttaatccaaaatgcacatatcagaccctaaatctatctaaacaatattttaaccctaatcaataagaaaaaaattcaaaaattgaaagaagggggaaatcttaccttggccatcattgtgctcggttggtacgatggtgctcagtcggtcgagaaggtggtggtgggttcgagagacttcgagagacaaagagaaaggggaggaagagagagagagagtcggtttggaatgagaggggtaaaatgaagtttagtaaaaattaatccattttacaaattttgtatatttttgaactagtggaccaattttagttcaattaatgcataaaaaaatcaaattttctcacacaaattaccgataaaataataatgatataaaattatgtcaacaatttttttttttttcaaattataatttttattaaaaaataaataatttaaaaattagacaccaacaattttctttttatttttttcctcttaaaagttagaagaatgacatagcattttctccctaatacatatttttttagctaattatttatttaaaagtcatgactcatataccaaaatgactcaaatagagatatcaaaaaccaaaatctgtcaatttcgagtcataggacgttaacatctacccaaaataaaataaaaaatccaagtgttcaattaatttattttccaatcatccttacactcactttaagcacaacaacaaatattgctataatcatattataattgaacatatgtttatataaagaaatataatatctatttagtatcttatgtttagttatttatattttcaaatatgtttatatgatattctatgattcaaaattatacatacttttagtactttaaacatagactatatgttttttatggtgttgactttaggctatttttatatttgacgccgttatttagtcatttctttgtgagatttgtgcaaatctattttcacttgattttttttttttttttcgggttatgtttttttaaactattggatgattttttttttccaaaaaaaaatgaactatatgtaattaaactgaatttaaaactagcataatcaatataattgagggcaatttgattatattaataaaaatgattgtttaaatatgcatttttttttaaaaaaaaaaatgaataattccactaaaaggtaaaaagttgaaatccaactattattaaaaaaatatataatatcaagtcaatattttgataaataatacaacataccatgtatgtagtatctaataaatacaagatcaaaaagttttttagatcattaacttagttgagttggaattggatagtggaaaatgcatgagtggatatgtgacaattaaagaagtgcatataaggatatacacttgttaacaatctttagttcacttaattaagaagtacatgataatggacatgttttgttgcatttgtctatgtacatagtagtaagaaataaataaataaaaggattttgtctctaatgtatatttggaaattgtatcttggttaaacttggatattaatagaaaaatcatacatgtaaagtgacactatatccacattctttaattaattggttgtggtccatgcaatatcacatacattaagatagaactatactaccaaacacttaaatataatacattattttttttgaatgaatataatacattatttttaaatacatgtataatgaattaaacttttaagatatataaaatattaatacaattaaagctacataaaatttgttgtataacaataatttatgataaataattagacatattaatttttttaattaataacttaagaaaatttgttattacagtactatgcatgaaaactatagtttaatcgttaattacatatttttaaaaatcttttcttatatttttaacatatataaaagcataggtaagttttttttagaagtggtataggttaagtttatagtacacttctcatctgttttggcatttaaaaaaatagtcatttttttttataatcatgtacgttataactatttaagagcatttataatttttttgaaaaaaaaaactataatatttataatgacaaaaataaaatttaaacaattatttactaataaccatgtgtgcaacaaaatatttaaacattatttttgatactataaactatttagaaatttttgaaaaatttacagatagtctttaaaaactacaacgtatatgactataaaaaattaacaaaaattctcctaaatgctaaaatagataggagatgtaccaaaaaatctcttttggcaagtatgttatagattttttaagaaaaatatatatttatatatgataatccaacaaaagtaaccatagtcgaccctagattaaagtcggttaggcctgcccatagggtccacctagtctaaaggccctaactttttttgccttttaaaattatacattttttattattattaatcttgagaaatactacatattttattagagcattgctatgagacacccatgatgtctagcaccacgatgaagtgttacactataattggt

SEQ ID NO: 16396 - DNA, 13100 bp, Cannabis sativa
  modified_base (9081)..(9081): a, c, t, g, unknown or other
gtcagaccatcgagctgataagacaatttaattagcaatctgggcgccaatcacgggagaatatccccctcgttagggaccccaacagggtaaaagatccttatagtggacctcaatatgggccggaagttctcccgacgacttacaccaaaaatacctagcaagtcggaccgtcaaattcgaggccacaaaatcctaacgtgggcctcacggaagatggctaggtattgccagggcattaccttgggcaaaatagctagaattttcgtccccagattgatattgcaaaccactctaatgaaggattttgtggacccatagccgtttatgaccaatacggacaacttcaatacttccaatatgttccatgtactccccactaacaaggtcggactacaactcaatgcagtcagtcattttcaagtaacaatgaagatggagcagatagtgcaacatgtgcccaacgacgtcgtgaccatcgagctcacaaagataatccaccaaacaatcctgatgctacaaggaggtcaccaggccagtcagttttcaatagaatggggactcaactaggcaatctcaggaatacttagaatcaaagaagagagcaaagagacagggtgactcccccaatgtttaaccaattaatgtggataattatgtgccagttgataacctaggggaaccacaagtgacaaaccgagccacagacatgtcaagttgatccaggggtgcaagcccaaattgatcatcttaagagcgttgtacaaagcctgacctgtcataactttcagtgatgaagatttcaaatatgtcatctattcgcacaatgatcccctcctagtggatgtacaaatcgcgaacaaaacagtggcacagaccatgattgacaatggagcttcatctaatatcttacaaaaatacttatgaaaaaatggggctttaactcaaagatttggttccttgcacgcagttagtctatggattctttggccaaagcatagcacctcttggaacatgtcgcttgccactcacggtaggaaaatctctagccaccacaacaattaaggcttgattcttggtggtagacgttccttttgcttttaatgttctgataggctgctcggccctatatgatttaaaggcagtaacttttgtatatcatttatgtgtcaaattcccaacgagaaatagagttggttgtatgagaggcaatcaaaggattggacgggaatgctacaaccatgctttgactaaggctaagaaagaagaaacatcctgccagaactcaagaaaaaggataagttattgctgaatagcgatccgcccaaggcggggatgaggatgtggatccccgcttttggggaaccaagcacaaatattgggccggtagaagaattagaagaggtcgacattgatctagatattccaactaggaaaatcaaaatcgataaaggtttgttgctcgaaataaaatcaacattgataaaatttctaagagctaacctagatattttttcctagtcacatgaagacatggcaggaattgactcatctataaccacacatgcccttaatatagatcccaatccttgtcccttacagtagaaaagaaggttacttgacaaaaaacgagcacaaacattgaaggaagaggttgaaaagttctgcatgaacagattaatcgtggaaggcttctttccgacctgggtagcaaaccccgtcctagtacctaaacgaaacaagaaatggcgggtatgcattgtcttcacagacctcaataaggcatgtctaaaggattgttttccatttccaagaattgaccagctcgtgatgctgcggtcggtcatgagattctaagcattatggacgcctattcaaggtataatcaaataaggatgcatccacccgattaggaacacacaagcttctttatagatgttggtctctactactataaagttatgttgttcggattaaaaaatgcaggggcgacctactaaaggctagtcaacaagatgtttaaagaacagatcggacgtagcatggaaggttatgtggataatatgctcgtaaaatccagaaaggttgggggcacaaagagaacctggatgaatgcttcaaaattcttagaaaatacaacgtgaaacttaatctcttaaaatgttctatcggagtcagctcgggaaagtttcttggttttattgttaatgctcaggggatagaagtcaatccagagaaattcaagtccttctggatatgaatctccaacaaaggtaaagtaattacaaaatctcactggtccgatagccgcactaagcagattcgtgtcaaaatctactgataaatgtgttcctttcttcaatatcgttcgaggaagcaagaagtttgattggacagagtgtgaaagcttttcaaggactaaaaagcaactcgcataacctcctatcttatcaaagcctttggacggagaagaactaggggtctacctcacagtgaccgaatttgcagtaaacgcctttggacccgatctactatgtcagcaagagatgacctatggctacgaatcaatgttgccctatggaattggaaccaccgtcacacagaaggctaatgtatgaccaagaagccaaccacactgacacttgatgaaattgaagaatggagagacttagcaatcttaaagctacaagctcaccaacaaaaagtagcttggtgcttcaataaataagtaaaaatgaggaagttttttgtaggggatatggtactcagaagattattcttaaaatctgaagacagtgttgtaggcgtgctcggacctaattgggaaggttcctatcaggtgatcaaaatcacaaaatcaggagcatataagcttagtcggtatgacaaaaacatgaagctaattcttgtaccaagatactggaacggtgaacacctaagaaaatattactagtaaaaagttgctcttaagtgatcaccttatgtactgttaccgtgcaaatgttgattgattctatgtactaaggtccaatgaccgttttcaaagcactttattttgtgtatccactgcaacctgcttggaggaaccagcagcaactccctcaacaggctggtcggtctgattggtttcggccgttttagttcccttttctgccttcatctccttgcaagtttgaagcatggccgccttatcctccggtgtcatataattaaaattggcgtcaggattggccgactagaactcaagaactcaaagaagatgttggtggcaagttggaaataagagttaaattccccttcttaccaactcactttctcgtctaggctgacttggaagtggccacttcatcctcaacatcctttactttctgttcaagctcgctaacttgttcggtctgcttttgaagaacttggagcccctcacgctcatcctccagctcgttggctcgcttagtggaagcttcaagatctttctccaatttctctacagatggagtgtcagcaatttgtcgttcgagttcgtcgaccttcttcttcgcctcgagcagatccttgttaacttgctccaaagttagatctttctcgaccaactcctgccgaaccttcactagctcggagttatctattgcaaattgtttggccaatgcttttgtctgggaatagatatactcgacctgcaggttcagcttaaagcaaaaaagagcaattcagtaaaagaaaaggccctgtacggtatggccgaacaaaagtttatgttgaaaaagaatactttagtcagctcttttagaaagcctcccctcaagactgccagaggataattcagcacccttcaacttctccctgttctccgcatggactctgtcaaggtagttgcttcatacctcttcagctcttttcatctctacgggaattggggtataagtttttccctttgatatttgaacgggagcaggaggaggaggcaaatccttagaagtctttgtggtccttgagctgaccggaacacgtggagggtcgtcaacggtaaccttgttgtcctcaggcacctttttaggaggtggcagagccaatgtttgagagcttttaggctctttcttttgaattttgctcggactctccggatcatccgcccacctttctcttcatagcttgtgtaagcctgtttgacattgctgtagagagtagaagcaagcgattagaaggtataatcaagacaatgaaaaaagacaagtgtaaaaatgaatgtttggacgtcatcatctgaagaatcatctacgtcctcttcaattgtggccttctccttcccaacaatatgctgaatgtttggacgggcagactcctcaacatcccttacaaggatgggcttcttaggcattggcttcttaaccaccgaagcatcctctttggtatctcatctccataaagcccatacttgataaatttttccggttgttagcagtgatatgttctgagaaaacgttgacatctccagaatcgctcatgctctattccatagtctgtgtttaaaacttggctggtcataaatcttggcgtattgaaaggcaagatgatcagtctccatctcaggggcgatatagcagttgcgaagaaacccgctaatcttcgtcacggaggagtggtttgtgtcaatccgccacgagcactcaagttgagaaaaataaaaatagcccgaacgaccatggtccgaactagactttagataaaagaactaatttatatcgtggggcgaaggctctcccaattcctgctgcgcgtacaagacgtacattgcagccaggtacttaatcccctttaggtgaactgcgtcaggcagattttgtagtagttagccaaattcacaaaatatggatgaagtgacaggagggcaccctgttgagcgtgcaagccggaccacgcgcacaagccctctccagggtcatttgccagttgcccgttgaagggaagaaagatcgctacgtttcgagcagtcctttcttgtctagatttctcaacctcttctcggttagctcggaagggggagaaatccacattggagcacattcctcttgatattatgatggttgggctttctcaagctctgtgttcgtatagtggcgaccttttctaagacttcgccccgagcagtgataggctgcccgccctcagtatacccttcatagccacggaaagacatgacgacatacttatcatacctgccctggtttaggacctcttgcacttcaacattgccagtcggaagaacctcttctccgtcagagctatcgttgtgcggtccttgcaacatagccagtaacaacacgaactcggagtcgtccggaccgatcctgcggtaagtttgcatagttcgggccacgtttatcgagctaggtagacgtctggacaaaggatgatcagcaactgtaactgccatttttgctttgacagtaggtctcctttaaggctctgggtgagcctctggcaaagtctctagaacacttagacagactacgtacgtccagttagatggcgggtcggccttaatcctttgttgtattcccaaatgaagcgtctgtacatgctcccaccaatgcagtccagatagtaatgatgttgcacgaatggcacagatagtttagctttgtcgctcgaaacctcccggtcgtcaaaactagaaattgaccttttgcttgaagaagaagattctacgcgaagtctaggctgatcttcaagaagaagctgcaacaaatcttggtctatgcggttcttaccaccccagaatttgctcgagttcatatacaaaagaaggaaggggaggtaaatgctgagcaagaaggaaagaatcaatggaaagcagttcccgtaatttgaccagaataatttctggatcgaagaaaagaaactatgtccaaaaaacgaagatctcagcttgaaggtactcaagaacagggacgaacccataatttgtcgaaacgctgtatgaaagttatttcaaggaattttttaaaggaaaacatgcaaatgcccaagaatctaacaactaaggtcagtgcaagcatattcagtattaaaagatccagattctaatcctagtagtgatgaacactcgtagcattaacccagattttgcaaaaaacatgtattgtaaaatgcaaaaaatttaagataaaaatgcattgaaaggttagatacttactcactatagatattgctggaaggaatgcacaaaaccgaagctggaattagcattggaagatttgagaattttgagaattcttgaagatttgagagtgaaaatttgcgctgatagtcttgagtttgtaaaggagtaaaagagtgcaaatgaggatttctatcatcttttataggttgctcgaggggtatattagtaattcagttttcaaatgggatttcccccaagaaaggagtgtaatcaacacacttggagtgtataatcgtcagcacactccccaagagcatgattcctcttgtcagaataatccatgcctcaagatttgaaaggacatcttgaaaatccgaaaagacgaatacgttcacccacctcgtcggacacgtgtcacctcatttatctagtacgtcgaccgagcaagtccacgtacaaactgaagttcccacgaggacttggggggcaaatgttattccaaaatctgcatggatgacgtgacacttctctggatgacacggggaatgtttccaggatctgggcggagggtaccatcttcggattgccgcccagtggaaatgacctattaagtaattgttgtttgataatctgaacctctttcgtgttcttattttgctctgtattactcatattcttttcgaatctaattattttcaatcactttaaagactcattggccaaaagcgaggtcaacaaatattattcttttaaccagtaaattaatgcaataatgaacttagaaagaagtgaccatgacctgggacatttgttgagctgttaggtttgtggttgttgctcctcacattgttgaggttcaatttatggatcatctactaactcaagaactgcaagcttcatgtttaccaaacatataaagcttagaagggattttatctttaaaatcaataatgctcattgaatttgaggaggaaaaggatgaattgctttgtccaaatgtaattttatcctaactattgatttattgcacctaagccgcaataaaaatgatttcttctattagggaacatcttcaatcatgaaatacttccatggtgaaagtccatcctccatgttgtcaaaacaatcacatgatggttttgttcaagatgctgatcaaccgtcacattcaggtggttcctatcttctttgctttactttggttcataatctttagtatttctgtttcttataataatagtgccatttttcaggtactgaaagcagttcagaaattaatttaattcagcagcaaataaattttcctggtgaagataccattaccaagggcaagatgccttgtctagatcaacaagaccacagaaaggacattcagaaagaacaggttatgatagttttgaatgacttgtgattatcaatatttttttttatatatacaaaaattttgagcatattatggtccctgatagtgggacaaagaagagtggatgacttcatagtggaagttgttttatttttgtgaagtcattgcaaatggaagatttggagtagtttctggtttgcattgcttagcaattagcattccaggaggtctgctaaagataacttaggcggctcatctctgatatgtaacggaccatgaaaataagaaagaaagtccctcaaaaacaattccaagtgtaaattgtggttcattgctgtgttgattttttcactcctatatttattagggggcctttgtggcagaggaaagtggacttcattacttaaaattaacaatagaacttcaaagatcctaagccaagtgtagaatatctaggaccaagatacatccccattcttatcgaccagaatatgtttggctaaattagtcatcataggcatgctttatgtcatccttaacaaaattcaattttagaaatatgacagtttcttactcttcgattttcaatgatgagattttcttgtcatgcagattccatgtcacttgcctttagagcgtggacaagatgatgtcacccaagaagcttgtttgtcatcagtaggtagtaattagtaaattgtatttgttactttatcttttacctctatatgtctcatagaatcataaccaatacatggtttcactatagacacagaaagctgttcaggcattaaccaaagtgaggaaaataaagtttttcacggggatgaaccttctggtcaatgcggcgtgtctagtttgaatagaccggagcaaaagagaaaggcattgaaagaaaaggtttaatggcttttacctcacttcatccttgattcctccagtttactttattctaatttttctcatcgtgttaaactataaaggaaaataaatagctatttattggagattagaaatgctataaactattatgccaaaaagaaattagtgggtattatttagggagcagtaaaacgtattattatgtcgtgttcgtgcaggcgtgccaacccgcatctaattttctcaaccctaacctgactcgtaaaaattcgtattgtattcgcgttgacccattttgacccatttattattaggagttatagagaaaataatagatgtttggttctattagaaaacttatatgcatttgtttattaattttttttacatttatataataaaaattttaaaatttaaaatatttttaatttctttttaaagaaaattaaattttgttatttttttaactcaacattgattcgctaaatatatatttgtacatagttatcattaatactttattttattttatttatttagaaaaattgtgtcaaattcatgttaagtggatcgtgtcgtgtcgtgtttgacctgttttttatttgaaattatttcacaaatacacaaaacaacaaaaaatttacaaaaatacagttgtacaaaattttaaatattnttatgattttatttacagaaaatacggtcttttagtgtatttttatgttgtactcttgttagtatgttgattttttttgttgttttgatgttatttttcctgttacttttatatatagtttttttgttattttcatagaacattctaaagtgtaaaaaaaaaaatgaacgtaaaaatatatataaaaaaaaaaataaacttgaagttataaaatttttataaaaaataatattttatataattattcttttttattttgtgttaagctgagtcgatccgttttcaatccgcgttttttatggtgaaaatcctattcatggttactcctttctcccttctcctttaaaagagtagaatgttaaatttaagatggttgtccaatccatgatattccaatcaaccggagaagggcatttctacattatgaatagttttttcttttttttcagtgtacattatgaatagtttaataagcctttttattgacaatttttgtagccgggcgcacattcaatcttgagattcttcaagaaaattgatcagtcttgccctacagtgaaagaacatgacgatgatttgcaaaatgttgaactagcatcaacaggtaattccagttcccacttatcccatttatcttactgttgatttcataaatctcatatacgacttgtaagctttccaataagataatctgtttcgaattgcattaaggagttgggctaactgaaagacctttagaagtcagtgacaccaacaatggacaatgtactttgactcaatttgaacacagagaagcatggagttacaagattgatgaaattgacccttctgtagttgatgagttaccaccagaaattcaggatgaagttcgatcgtggctccgtcctctaaagcgatccaacatagcgaaacaaggttctagtattgctcattatttcctgccaacaaggaaaacttgaattcagctacagtgtatcctgtacaggagcgttttcatctcaaaatgagaagcccttttcatacctgggaatattcatgtccagggtgaaaaaccagaagtgaaaacataccttctgactttctgatgtctgtacatattcatgtagtttacagtgtttttctgtttttttttagtagtatcgatttatttttatttttgttcataatgctctagttgcatcggaggtaacaaatgaataccaaatgtgtataaagttaattagtgaattttactggcctaattagatttaggagcaattttttggttctttttatgataaaaatttccattcaaacactgttacaaaatgggcaggttcagcaaaacaagcttctatgaaaccagttgaggaaagagatacattcatttctctaaggtgatgtttggttggaggaaatagggaatgaaattgaaaggaaacaatttatattttattactttgtttagttttgttttaaagtattgtaatgtcattcttagtctagttatatttttattccttccaaccaaacactacttaatgaagtgtttgttatgtgagtttgagttggagagagtagagttagagagagtatgaaactttgaggagattaatattaccactattttaatttaaaaaatgagacttacttgaaacacaaatctcttcttgaatcgtttttttattgttattattaaaaaaatagtaataataataaataaaaggaatgagtcagaatgaatcaaaagaaaaataaatattatttttctcccactattttctctaactttccacttcccattctcaccacttttcacataacgtaaaaaaaaaaatagagtttattaagagaagaaaattagacaaaaaaaaagggggggaggggatcgacaatttacaaagaaaaaatcagagaatgaaaggaaaagtcactgctattgttgttcgtcaaattgttcaaagtcttgaagagttcccatgccatgaaatacattcattcatcgctactcattctcttcttctttcctattcatcgatggaatgccctcattccataatgaacataaaatgttctcatatatggaatgccttgctaaatataaatttatggaatgctctcattttattaaatttatggatgccctcatccatggaatgccctcatcccaccaatcaaaggatgttctcattcatagaatgctctcattctgccaaatataaattcatggaatgctctcattctattaatttatggatgctctcatccatgaaatgtcctcattccaccaatcaaaggatgctcttatccatgaaatactctcattccgccaaatataaatttatataatgctctcattctattaaatttatggatgctcttatccatgaatattttcattttgacaaaatataaaaatactcaaagtctctatttattttcttttaaaataaatttgactaaattgttttgattgtccaaagttgataaagaatttttggagatggtctaaaatgagatataatcaatttgaaattttaaaacgaatatctattctatataaaatgtgcctatataacagaattcttggtttatgaaaaattattgggtgattttttttaaaaaaagaattttctattcaaaaataaaataacagttgcgtcaacaatgttcaaccgtcgattaaagttctatctcgtccaagtaaatataaaagggtttgggggtccctctagggctatcaaactggataagtggggctgcttcttttggtttttggcttaggtggtgtttggcttgatttaatgtaatggtaatggtaatagtaatggtaatgcaatagaataagaatggtaataggaatggattacaatattaggtttgtagttggaatgaacattctaatcagaattattgtgtttggtttggtatgagaatgtaatggaataaaatgtgtattgactaaaatgaccatattgcgtttattataaaattataaaatattaaaaaaaaaaaaagggtaatatagactttgaccttttttttactatatttttattaaaatattattttttttttctttgtaatggagtgtaatgtaatggggattacattggttttagtatgtaatcatcattacaatactcaatgtaataagcattacattgtaaattaaaagggaaaagcaaacaatgtaatggacctattcattacattacgattaccgttacaatgaaccaaacatcaccttagttttttggtacactctcatctttttctccttatttttatattatcatcattagcaagagaagataattctttcataaaaaaaaaataagagaagataatttctcattctaaattttttcttgattgtagcagagaaagattcaaaaccaagtcgtataaacttcttgtatttttcccttcacatctgcttgaaaagtatgcttattacgaagattcatacttcttgacctttttctttgtttcattgattgctgtgattactgtttattagtaatatttgtataattttatctgggttttgtttgaattatctctctctgttgtacctatcgcgatgacatcgtctggggctgtggttgcaaagaggaaatcaaaggaccgacatacaaaggtggagggccgtggttgaaggattcgaatgccgccggcatgtgctgcatgaatatttcagctgaccaaagaattaaggctgaagtcagatggcgagaccattcggtggctattagagaaggcagagaagaccataatcaaagccacggggaccggtaccatccctactatcgcgatctctgtgggtgggacccttaagattccaacgacatcgtccgcatctatatataagcacatatatttaatgtggttattttattttttcatatttctaaagttaacgtattaacattttttaagggaaaaaacagaaaaatttcaaaaagggtaaaatattacaatattactatgggccggcccaatcaacatttatacagcccacattgaaaaaattacaa

SEQ ID NO: 16397 - DNA, 11542 bp, Cannabis sativa
  modified_base (3247)..(3248): a, c, t, g, unknown or other
  modified_base (3383)..(3385): a, c, t, g, unknown or other
taccacggctcgcctggacgtctcataccacggctcgcctggacgtctcgcatgcatcatgacttgcacgaatgctccaccacttgcacaaaggctccatggctcacacaaatgctcctcgacctgcataaattctccccaacttatagaaatccacaccgactcgtacaaaggaacaccaacttgcacacaagcacaccgactcgcacataggcacaccagctcgtacaaagacacacaagtcccacacctcgatatatgttagaattggatgattcaaaatgttttggaaagataagaaagggatatatggattttatgtttatgaaaatatctaattctaaatgcatcattatgaaaatcctccaacaattatcacttggtaagttggtcatactaactctaattgtgcccgctgacctccatcaaaaatacctcaaacaatcacatatgcatgatggaccttttaaaatcttcatagagtggtgtatcctcctttattcttttccaacgtacccaatactttacttgcgggggaccatgaatctggtatccaaaattcttggacaagtctccgagaatcgtcaatgttgatttttagagttaacactgggttaaccgttgactaatctcgaaggttagatttgcttaatttttggagttaacaacttcctcattaaaaacttctccaagaaaacctagtgggacaaaactcaatcgagggaaaaagagtgcagttggaaattactccccctcattttagcattttttttaaaagagacatctttattcaaaaatgagcaaaagtggcgttgtgccttttgctcattttagcattcttggagatattttaatcgatgcattccaatcttgtgaactatcttctcaaatattgatgttggtaatgactttgtgaataagtttgcaagatcatcactttatcaatttttttgaacattcatatcaccattctcttgaagattatgtgtaaagaatttttttggtgtaatatttagttctatctcctttgatgcactaccctttcagttgagcgatgcatgcaatattatcttcatagagaacttggtacttctttattggttgttaatccacatgttccccgaatatgttgtgtcattgatctcaaccacttagattctcaatttgcatggtgaaaggcaagtatctcaacctgatttaaggaagtagcccccagagcttgctttgttgatcccaagatatagcagtgtcactgcatgtgaacaaatagtctgtttgagatctagccttatgtggatcagataaatatcttgcatctgcgtagccaatgagttgtgacaactaattattagaatagagcaatattttatcaatagtaccttgaacataaaaaagtatgtgcttaatctctttccaatgtttttatgtcggagaataactaaatcttgctaataaactgacagagaaaggtatataaggtcttgtgcagttagcaagacacatcaatgctcctattacactaagatatgtcactttaggaccaatgagctcttcacgttcttctctaggtcagaaaagattattattcacatcaagtaatctaactaccattgggatactcaatggatgtgatttatccatataaaatcgtttcaaaatcttttcaacataagttgactgatgaatgaaaatctcacttttaaatgctcaatttgtaaaccaagataaaattttgtttttcctagatattttattttgaactctttctttagatagtctacaacttcagaaaaattttcaacagttacaataatattcaagtcatcaacataaataataatgataacaatggaaagggcaaagcaaaagccttgtcttcctctcttgtggtttataatgactccatctaggagatggatcaaaaccctaacaacttcagttcatacaagatgatggagaacttgtctaaggaaggtggagttcgtaacatcccggacttagtatggaacaaattgtcgatcacagaggagttcgcttcccggagcaccgacaagtttagtgcttggagctgggcccacatttcgagtggagcacacttacccctgaagacttatttcgtggagctttgcttaaaaatttggatttctcccttccagctaatcccctcatcttacaagctcctgattggatggtaaattctatgtaagatacggaagcttgaagttcccagcccggaggaaatattatattgttatgcggtcaagcctcaacccatgcgcataaacaataggaaactagagttttataagctggagaagtatccagatgtgcgttgtcccaccagtttcacgctgcaatctcctgacctttgggaatactggttcttctctttaggtttcccggtgaagatggtgccaaacctctctctggactttaaaataccaggtatgagcttttgcattttttcttcacttgacattgttatgcctttttccataattacgactgaggtggtttttattcatcggtggcagcacccgtgccttgaaccccagagagtgaggaattaaagaaaagattggctttgtacagatccttttgggaagaggaattgaaagtagaagacttagtcaccccccaactactctgggaacatggactcattgccaagtcccaaagtgttgacaacatcagcaatataggtttaggttatgctcaacaaattatcgttgaggtctccaaaatcatgaaagggcccttgaagaggacaaacacttgatggcggattgggcattccgccattctaaccccctgactgaagaagaagaactcacaaagagatttgttattgcatactcgaatgagggtgctcttggagccaatatttcaggaaaatgtaaaaggccatttcgtttatttcgtacccccaacctcaataagataggtgaagtcattagggatcagagtaatcacgtatcatctctagacatttatggtagatctcttcctgtccatatctttcccgggctttaaagagtatgacaactttgtgggttgggaaaacatgggattttagaatagagtattaatgaaaataatatttttttttaagacaaattataaattttatagggataaatataaaaatatgtaagaatataatttaaaaatataaatttcatgggaataaatatgaaaattaaaaaaaaaaaaaaagtataatttttaggggcttttttatttttanncttcaaaataattttttttttgtacttttacgaaattttacaaagaaatccctattgcaactagcactgcaacctaatttgcaacaaaaaatcgtatagaaacccctattacaactagcgctgcaaccactttannnactcaaaccgtaaatttgaaaaagaaaaaaaagtttaaaaaaaatagtatatgggataattcccctaatttttatatgaacaaaaataataaaaattaaatgttagtttattgaggcaaaaataataaatcatgttaggaagtattcttcttatgttagttcgctaatttgttgtttatttagttttttatttttttaagaatgaagaatatttattcattttttaaaaggatttcattacccactttgccgttagtggtttgtgcatttgggaatgagaatgttgaatcctttttatgtatgacatagttcttaaggtggaaaagttttgttattttgtggaagttacatgctttttaatggataatatcaactcatttgtacacttgagtttcaatccaaaactcaaaacaaacaccccaaatgaatttattgttaaaaaaacaagtgataattaattacttacaaaaaatttcattctcttctaaaccattaacccgaaattggaaaaactaaataaaatctcttcattattgcttttgaaaagagtacacctagattacaagtgagaaaattttgtgaataataatccaagtaaatttgctcaatcagaaagtttgccaaaaacataatggctaattaggatttttatctcctaaattttgacatttactaaatcacgactcctgaactttttaagtcattaaaaattctccctgaactatttagattgttagattcaatgacttccttccaattttactaacgaatacctgacgtggataaaagttcaattgacacaattcagtacatgtcaaaattcgagtgacaagatttgatacatatcaaagttctaagggcatgatttaatgcatgtattattggcacgttagtaaaattgaacagacttgaatagaagtccttgaatctaacaatctcagtagtttagaaaaaaaatttaacagtctgaaaagtttgggaggacatgatttgatattaaatatcgctatgagatattagtggcgcctaacactacttagagatgacgtcttgtaattggtaacaatatttcatacaaactattattttaaattatatgtagtggtgattgaacccaagatttaattaagtggggtgtaatttttttttaatgacactttttatttatattttaaatatgagaatttgtggttataaatgcaacattaaatataatacaaaattcacaacattatcattgtttagtgtgctaattcacctgtattcatctatttattttgtaggtagttttggtccaggtgtttatttgtatcggatgcctcttgaaggtggtctcaagttgttttgtctaaatttttgagataacttggtcttatataagtcgctttgtttgtagtgactcatattctgactctgtatatctttggctagacaattagcttgttgactggaaattcttctgcgtcgacggttttcatagtgtgatttatatcactctctcaaatatatatataatacaaaatataataattaacaataaaattatagttttccttaaaaaaaaataataaataaataaaattgtatattattacaaatatacttaacttttaccttctctattagaaatagttgtatattattacaaataataataatagagtaaatagtggcataagtatagagggtgaaatctataattacgaaatttgggcaccaacaacctgttaagaacaaagagagagacaaaagtttaattgggagcaccggtggggtttcagccaaaaggactccgacgctcaagtcagtatgattgtagtaaaaaataacaataacgagaaataaatgaaatgtaaatggtagctggactgatgaacggataagtggacagacggactaaaggaacaactactgtggtgaggcttaagagaaaagtttcaaaaggacgactgtctgcttgagtaagtgaatagtgtgagtatcgaatgttcgatgccctgcatctactgtatggtttcttttatcgtgtgttctcaataccgttgccctccatccacgccacccattgaacttgttcaagttgattgcttccttaattttaagggagtagtaaccgtctttctgactggttcaatatttacttggctccactcgtttggctgactggttgggctcggacccgattgcggggtgaactagctcatggcccataagctcacatgtttgtcaatttcaaggcccaatgagtttgtctagctaccttattgggcttaataatatcgggttcattactgatgagcccgtctaacttgtatatcgagcttcttaaacatgttgtaaatattaagtaacttttttacccaatgcttgtaaaactgtaatttttttttttttaattttgttagtacagactctattattatctcaaacaatggacatataagttatagattctaagtctagacagaaatatgtagtatgcgttacttctaaattttcttttaataaatccaaaacgaagtaaaaaaattagaggaaagttataattttacaaatattagatacttatgccgctaaaaataaatattaaatttatgtcacttagaaacttaaaactttgagtacttatactgtaatttaccataatcttactattataaaagtggattattagtgtgatatttataaactattttacccatacaaatttaattttattacaattctatttttttttttttttttgtctataccctcacaattacaagtgaaacttctttcaaaactacagtattaatccttttcttcaaactacaatattaatttaataatataataaatgcagattgtaaccgagatatggggccacgtgtcaaaagtgcgcagtcataacagcgcgaattccatactcgttgacataacaagtagccgttggaacacaaaacacaacatttcatttgtcttttttgtttttttaaatatatatttctcttcatcaacttttacttttatttttcgaaagtattttcacacaaaagagttgccgacaattatatcataaatttctccattaaaataaaaaactgttatttaatttttaatatatgaaaacaaaccagaaacggaagcgtcggttagtaagcaaacgagatgacacctcagttctcctctgtagttttatattatttattatcataaagttaataattctccatgcgttttcttttaatcttacttcaacggacagtgacagggcatgatcataaacgactatatttaattatacgtgtacaataatagtataatatattaatactaattaatgtatgtgtaaagtatatactataaagatctatatacatccctgttaatggttttgatatagctttttttagattctttgaggctcaaggaaaattgagtttcatcatctctttatgtagataaagtcttactttgagtttgactcagattggacttcacccacttagtgattacgagtgacagagcttcctctctgaatctgagagcttgagccaaaaaggtttgtaattttctcttttcgtttgggaaaattcgagggatctaatgtgggttatttatttggtttgttttctgatgcagtctttagatattttgtgtttattatagcttaaactattttgtaattctgggaaagcaatctggggatgtttttaatgggtctcgttctatgtttagtttgtcacttgaatttgattttcatttagaactgcatttacttttcttgcaaaatgtattttgtttctacatgtccctgctaggaatttttggcttatcactcataaaagaacttagtaatacatataaaagaatctaccaaaccctctgccaaaatgtcaaaaaggagcactgtaagtcaacaattttatcatgattgatgagccatgtttcgtttacaatctatctgggtgattttctattttctttgtttatttgttggcagagatgactttggttcatgtatctacaagaacctttattataaaagtcaaaaagaagcaatatttaatcaaattttttaatatgaccaatgtgcaaaaattggtgaagttttgagtctttgctgtttgtttcataattttcaagctcatttccatttccctctttctgtcttcagtttacagaagaaccattgaatttcaagtccttgaagtggaaaaatggcttctctaaatgatatagcagttggagcagctataaatatactcagtgcatttgttttcttcctgatattcgccatactccggattcaaccggttaatgatagggtctactttccaaagtggtatcttaaagggttaaggaacagtccgttgcgtgcgggtgcattcataagcaaatttgtcaatttggatttcagatcttatgccaggtttttgagctggatgcctgctgcattgaaaatgccagaacctgagcttatagaccatgcaggattagactctgctgtttacttaagaatttacttgattgggtaagtttgtttatttgatctaaatttaagtatttctcatgctcctcaaatgctcattattccagctttgttgtttttcatctcattattccattttttgaactgcaggctcaaaatttttactcctattgcctgcttggctttttcagtcatggtaccagtcaattggactaatgtcaccttagagcgttccaattttacatatagcgatgtagataagctttccatttcaaatattcctcttggatcaaataggtaaaattcaattcaattatatatcatttacacttgttttagaacttcccaacctgcaatgacatctaattagatattttctgatgttttcttttattgcatttgttgcagattttggacacatttagtcatggcttatgcttttacattctggacttgctacatattaaaaagtgagtatgaaacggttgcatcaatgaggcttcatttccttgcatcagaacaaaggcggcccgatcagttcacagtatgccttcgctttgaataatcaagctagtatagtatgccagttatttcaatctaaaatgccattgaaaaccagttttctctcagtatactgctaaaggttgagtttaactttttttgttgtaggtacttgttagaaatgttccaccagatcctgatgaatcagtaagcgagctagtcgaacactttttcttggtcaaccatccagatcaatatcttactcaccaggttcgattgtcgtgtatttattcacataagtagtttacaaaactgtggtgtgcatgagtacttttccacacctttcttctttccaatttgcagactgagtttttgatttttatatacagtttctaacattaagcactgtcaatgatatcttttcaagataaacagtagttttgtggatggtaatttaatgtactaattaattccctagtcatttacaattcctgtacagcactgttaaatgaactttaacaataattgcagtttgttatgtgctgaattattttgcatacaggttgtttgtaatgcaaacaagctttctagtttagtgaaggagaagaagaaagtgcagaattggcttgacttttatcagcttagataccttagaaatcaatccaagaggccaattgtgaaggtactgtattggaaagaaaatagctgatttttctcagttcataagttttgtttgataaatgctatatgacatttttctgtgtctaattcatgacaaattatttttaagcagactggttttcttggtctttggggaaaaaaagtggatgcaattgacttttacacatccgaagttgacaggctatctagtgaagtaagaaactatcctcaagcttcttaatggcccttgtttagatttcattgcatattatatattctgatcttaaattgttaaaacactcgtacctacttttccaacatcatttaaatattttccatgatatatatccaaagctgtttaagatacatgcacaacactgatttatcatacttttcaactttgttttcctttcaaatttagtttctgaataggaataattgtgcattgcactgagattcaaaatcattgaacaagcctgattttctatttttcaaatgaacatcagatgtcttttgagagagagaggatttcaaagaatcctaagtctataatgccagcagcttttgtgtcgttcaagtctcgatggggtgctgctgtttgttcacagactcaacaatgcagaaatccaaccatgtggctgaccgaatgggctccagaaccccgtgatatttattgggataatctggcaattccatatgtttcactcacaattaggaggcttattgctttggttgccttcttctttctgaccttttttttcatgatccccattgcctttgtacaatcccttgcaaatatagaaggtattgagaaagcagtcccatttctgaagcccataattgaattgtgagtacctttttttttgttgctcctatggttttcaaattgtcactgagagagagttttcaaattgagtactgacatcatccattttatgcaggaaatttataaagtcagttatacaaggtttccttcccggaattgctttgaaggttttcctgatgtttctaccctcaatattgatgttcatgtcaaagtttgaaggatacagcagcatatcaagtctcgagagaagatctgctactcgatattatattttccagtttataaatgtatttcttgggagcataatcactggaactgcatttcaacagctggatagttttatgcatcaatctgcaaatgagtacgtaccaaccaaccccacacacctttgtttattttatatatatccattgcacaaattaatggttactctaccctgtgtaggattccaaaaacaattggtgtctctattccaatgaaggcaacgtttttcataacctatattatggttgatgggtgggctggagttgccggggagattcttaggttgaaacctttaattatgtatcacttaaggaatttcttcttggtgaagactgaaaaggacagggaagaagcaatggaccctggaagccttgagttcaacacaggagaacctcgaattcaactttacttcttacttggtcttgtttatgcagttgtgacaccattcctacttcctttcattatcatattctttgctctggcatacgttgtatatcgtcatcaggttagtttgacaacttacaaagattaagagtttcttatataattatattgttttaagaagttatctaacttgaattcttgcatgatcttagattataaacgtctacaatcaagagtacgaaagtgctgcagctttctggcctgatgtccacggccgcataataactgcacttatagtgtcacaactgcttctaatgggattgttaagtacaaaaaatgctgctcaatcaactccattactcataacactccctgtgttaaccatatggtttcacaggttctgcaaaggccggtatgaacccgcttttatcagacatcccttgcaggttggtcgtttttcaagtcatttacatggcatttcatattgcatgtttctgaattccacaaagttagatacataatcttgttcattcttttggcttggggtttcaggaagcaatgatgaaagacacactggaacgtgtaagagagccaaacttgaacatgaaagccttccttcaaaatgcttatgttcatccagttttcaagggcggagatgatggtagtgaaagtgaggtgtctttagaagacttaatggaagagcctgcaatggtgcctacgaagcgtcactcgcgtcgaaatacaccaatgcctagcaaacagagtggttcattaactaaagttgatgaggattattaaacttgttactatctctgtatatttttcatctctttttcctccctcttttggcattgtaaattcgcagaatagtttagaggagttcacagtgtagtgaaattgaaatgataccaagatttttaggtaggagtgttaaagaagctcttgttgaaaatagattttgaactatttttttttcttttgctcattttattaatttttttgaagttccatttttttccctataaatttgtattaatcacaaattgca

SEQ ID NO: 16398 - DNA, 9405 bp, Cannabis sativa
  modified_base (4110)..(4112): a, c, t, g, unknown or other
  modified_base (4176)..(4183): a, c, t, g, unknown or other
gcaaaatcatcacttgtaaggatatttagtcagatggctaccattatgcataaaatatatgagaaaaaagcaagaaaaaacagatgaaaaggagggtaaataaatgctatgaaaggaagtgtagcagaaatttatcaacacatacacttgggagcgggggcatatcaaaaggattaaaaagagagaaaacagatgggtaaataaacgttatgaatggaagtgtagaagggcaactatcaacagacacacttaggagtggggacttactacttatatgactacctccgttcactctcagatctaattgagaaaaaaattcatgaacataaaagatcaatgcctagtagaacagaaacatttggaaatgtttgaaaatgattaaaatttctgcgtgtcttttttttctttgcagttaaacaggcaaggaaaattcatattacacggcattatcacagggacatcataataagaaagctaacttggaaaatgcactttagaactttcaacattcagaattctttcacaagaggtgagagagaatagagaaagttatgaatgagtgtgtttatgtatattaattgtatagattagacaactatatattgtgcattacctgaatatacgctcaaaatcatcaaaacttccaatgttagcccagccatagtcaaaatcaccttgttctttgccttcgtgggaacttggatatatttcagcatctttatcaagctgatcagtccctgaaattagaatttcaagtataaatgaaagggagccgcaatcaataactcaaacttactcccatggcttcgccaactaatacatgtacatatgcaggtagaaacgctacacttaccagacaatagtgttattttacttccttatctgtttaatgccattagaaattttcagtaatttaaaaagaaagattttgttgtttcaggtgctactgttctagaatttcaaagagcctatacaaaatgacaaatgagggaaatctttttcatcttttattaattccaccaactgagcataccctttacgattttaaggactccaacaagatattaccacttcttacagtatactgaaaatcacgggttactatcacaattaatatattgataattcaaggctcttatttgaagattcaaatgtggaaaatcctttacatctttttattaaatccaatacccattacaattttaaggacaccaacaagatattatcactgtttacaaaattgaaaatcatgggtcactatcaccatgaaaatattgaaggctcaaggatcttagttgatctacagaatttgttgaataacagaccaaaaatcaattttccactccaatatatgttgtagttcccacagtactttaaattacacttagcaatttcaagtaatacataaaataggcctggatgtgtaactagtaagagtatttgtgtaaagaaggacctgtaaacaaactaacatttcatagaattacttcagtaagagtagcttttcttgtggcttagaagggctaagcaattttgttacctttttgtagtcttgtgtacttacaaccatgtgtgttattaacaaatggtatttttaactatgttacctgttgacgagtcaaatttcgtaatctcacttaaggcgttagatacgttggtacccataggttccctttcactattagataaaggcaaatcaggccaggactccacccccattcttgaatcagaacttttatcatggttgatcaaattggtactactttccacctgttctttacgtaaatcaactttagaattgttctgctcagtaggcttatttatattggcttcttgtttccattccttcttattgcgacaatcttcacttttggcaggataaggaacaatatggtcaccattctcagcagcctcatcccatattatatttgctagctgaaagagcaacagagttttcaacaattgcagaaatcaaccaaaagacatgttcatagaaaagacagaacacaaaaacaattacaacaccatctctagctcaatatattcaagtaaatggaacaaagacaaattcaaacatcacaagcagcacaagagaattcggtgcacactttaggaaaccacgagaatagaaactaaagcatattattttacagggactcctggaaaagcactaccggtgcgattggtctggaaaagcactacggtttgggagtaatgaaatgaaaatgaatcaattttccttccattactttgcttggttgcatttagaaccctcacataaggcagacgaataacaaaggacaaaagcaaaatttctacaattataactgaaactagacactcatagtctgtggaaaatatgaaaagaaaacatctaattcgatacattcccccactctctaatacaatagttctttgcatttctcatagctatttcagaaagtttaaaccattttgtaattgtcacagaataaccactcacctcattagtttctttttcctctattttgagaaaaagaccaaatatgctttacttgtcaaaatatgaccatttaacttagtttttattaacatggcatgttgattccttaactagaatactgaagccaacataattctcttcgatgtttctcaccatgtgaagtcactcaaattctgctttctacagtcaatagattgccaaacaacccctaagaaaaaccatgcatcaattacttatttacttatttcactaacctaataaaatcaacaaatccactacaacaataccaacatcactaatttcagagttaatcacataaaaaatattcaatattcccaacatggattcaaccctgctcggaaacgaaattaaaagaaacttaaactttgataacttgtatgttcctgtaaacccaattacccccaaaacaaaacaaaaaacattaaatgaaaaccacaaagcatacatatgcatccccacctatacaaaatttaactgtttttataaactatccaatatgtagagatgaatctttacatgtttatgaatgtaaattttcgttgaacaattaagttaaaacttttaagcaaattaaaaacaaaagaaattacataaattaagaaataaatagaactcgtaaacaactattcaactaaaaaaattcctcaaaactattcagctatttaacacatgtatccaaaacttcatacaagtatgaaaataacagtaagaagaagaagaagaaagctgacctcctcctcgtcccaatcaaacatttctgacgaagaatccaaaaccaaaatcgaagaaacacaggtaaggtatttcacacatcgccgacaaatttcagataaagattcagaaagaaaacatcaaagtttccaggtagccaaacagcaaaatcccaaggaaaaaccagagagagagagagaaagaaagcgctagagagagctaagggagtggtcgtaagtgggacccacgtcacgtgacgtcatggaaaagaaaaatggtggtggaattaagtgacacgtggaggggtcgtatcgaaattgtggtcgggttaagcccaatcaaatccttgattcttattggtcagtgatttaagatttttattttaatttattttaataagtaattatggtccagaatatttgagctctcgttttcaggtgggcccccaccccaccttcaccttgtacacctaacattcgattaaacgtggatctcaggttcttttattattattttattttttgttagaagagaaaaaactataaaaatattgttaaaaacataaatttattaaattttaaatgtggtatctaatatctatgatgaatgctaattgttactataattaatttattttttaaatctaattgttactataatttaagattagacattagagatttttgtttagtactagtgatagaattaatagtcaccgtcaacattttataattgttttagtattcgctttagcatctgtaaaaagaataataagctagttacaactcagattatttttttgacttctttatttttacacctcaaaataatttttttaacgaaattctacataaaaattcctattgcaactatagcgctgcaacctaaattgcaannnaaaatcgtatagaaacccctattacaactagcgctgcaaccattttagaaactcaaaccgtaannnnnnnnaaaaaaattaaaaaaatagtatatcggataatttccctatttttttttcttacttttaagtttttttaaaaaaatatgccatatttattacaattaaattttaatgccatatatatcaaaacttatcttttttttttttcttcaaagtcctacaacaattagttctaataattgaactattgtctttattacttttttttttttggctaaatatatagaatagttttaataattaaaaaagatgaatataattgtggtaattttcataaaagggtggatatgtttgtattgtttgagttagcccaatatgagaagcccaggcccaggcccaggcccaggcccagataaaccgaagtggcgagttccagtcacaacacaacttcttggctctctctctctctattggcttgtatggctttcttcggttctgtcactaaactctaactcatcagcggtaccctagaaatatattcaacctcgttcgcttactcatcggagatcggagatcggagagtaggttttttccatttcattcattggttggataacacaattacttcactcacaattcacaacacaacaggtactctacttagggttttgaggctgctaatgtaaactagcagaatttttcaaaatattctgttaaaattttgtatataggcacacacatatatatatatatatatatattatatgtagataagatttagttttcaaatttgaggttttttttttttttgtccaaagcaaatgttatactattggttatgcttataagcaatgtagttttagtgttttactaagaagtagaacaaattgttcatgcatcagactattgaccaatccataatcctgctttgatatcattaaaataatcaaatgtgttttgatttcaactgcaggttgtgtatcattggctcctccaacaaccaaatggtcagtcagttgaattgtatccgtatcttcttaaaatttgtatttaatacttatttgagtaattgacatataaataacccatctttctaccatttcccaggaaatttttaggagggccatactgcaacctgggccacccgaaacttttgctttacaaacagttcaacaagtcattaaacctcaggtatataatatctcaatcttttcttgtctttgaattttaggttatggaataggatatttttaatttgaaggcattgacttggttatccttaattattggaatcctttattacagaaacaaacaaagttagcgcaagatgagaatcagttattagaaaatattctccgaactttgcttcaggaactggtggtatgttttgctatatatatatatatatatatatatatttaagtatgcgagctacatttttatagtatttattaacgttctatgcccttttctgtaaattgaatttgggtgttgaggattgttttctttcatagaactggagaaaaccttcactttgtttgttttaatatactgtaggcagtcagcctcactttatttttggtgcttgtatcatacagtcatgtgcagtacagtcaggggagccaataatgcaatatgggcaatcgatagatgagggggagagttccctgggccatattccgcgtcttcttggtatgtgcatgttttgatttgttagtcttgttatgtgtgtttccaattatttagtgctctagatttgttgcaacttcaactctttaaacatttataatggaagagtataatttcacttttttcatactttgttctattttatagatgtagtaaaatccttggttcctttaatagcaaaaatgtaaacgtatcacgtcaggttatgcttgtaccatttgttgaagctttgatacttaattctttactgaaatgatagtccctttaggacttgcctcgtaaacttgaactacaactagtacaaatcttaaagctaaccaattgtaaaacaaataatctgaaatttgtagagctgaaatattagtattaactatgagtatacattacacacctatctatttaaaaacaccaaaaatttagacttcctataagtttttttgcttacggtggatgttgtggtgcttaaatatgcgtgaaaagatggtctttggaatcactttatcttcacttagtatgcattgtttctttctcaaacacggcccttacctgtctcccccttcctgtacagacattgtattatacctttgtgaaaaggagcacattgaaggcggcatgattttccagctcttagaagatttaactgaaatgtctacaatgaggaactgcaaagatatctttggatatatagagagtaaacaggatatattagggaaggtttgtgctttcttgattgtcatggctcacgggatacatttaatacctatatattgagagaaaaaaaaattctatatatttattaaatgtttcagtgttctttcatccactcaatttctactagacatataattgtgtatatttacatacacattcatgctatttattctgaagcaacctagtcatattttctactagacattcatgttatttactttctactagtcatattttctttctgaagcaacctatttattctggtatgtaaatttattcattcacctacaggttgagctttttgctcgtggtaaacttgtgatgttgaggacatgcaatcaacttcttcgtcgtctttcgaaggtataggaattgtcaccatattgtagattacaagctacaatttcatattgtactaggattttcctattgtttttctttgaataaagtgactccatattgaccttatgaagtgtctacagtttttgaagtagctggcagctgagggtcaatatagggtgtttgttgcttggcagtttgtgatagtaggcacaaattcaaattccaacattaagaatgaggggtttatgtctgtttgttatttatgtctgctgtcatttcatattgtttcttaattgaaattgatgttaattcagttacgattcactacaaaattttgtttgcttgaattgaggaaaaatttataagttgggaaccctcttctcttgcatgtaattgttgtgtccccgtttgatacattactaagtgatgttttattctgatgattggaatttgactatataggcaaccgacgtggtcttctgtggacgaattctaatgttcctggcacatttttttccactatctgagcgttcaggtatatatatagtttatatctgatcatatttaaaagaaaccactctgtataaatattaggaaaatctgaaggaaaagggatcggaaacgatctcataaatttttatatgtatttgtttcttactctgtaatctattttgaaaacttgaatcaatagaagtttttctccttgccctttcatttggaacgcaatagccccttcgaagattaaggtttccagctggctactaactttgggtaaactcaacaatgaggagactcttcagaagtgacagcctttcataaagatcttcccatatgaatttggagtggtgtgggcatagcctcgcctttttcaagacattatgtcttgcgggaagaaacaaggcccacttcaagtaggaagaaagaggtctggaacatagccattatagctacatgttggcaaccctatctcaaaaggaacagttgtatctttagggtatcgaagaatgcatttaggaaaaaattaaatattttagtcttatgatctataggtcctacagttctcttttgtcggatgtcttgcgagattggaatctgtggcattaatttattgattttactccctttctgtaaccaataggactttttatcctcttgtgtaatgttttcttttatgcttaccatgaaaatgaaaatcatttttatgttaagcagtattcattttaatgtttctcgtttgtttattgcttgcagctgtaaatataaaaggagtttttaacacatcaaatgaaacaaaatatgagaaggacccccctgatggtacatgctagttatgcaattcatggttttcttgttttaggttattttactgatcattgcaactttactaatgttcttgattactgattgcacatagtaatcttttctacaaaatttcaggcatttccattgatttcaacttttataagaccttttggagtttacaggtaaacctatcttttgaaatcatggttatgtgacaaaatatgaaaataattggtttcttttaatgacccttcttacctctcttctagagagtaaaataatctactataattattttgtattgactactttgtcaacaataaaataaataagaactagaatagatgaaatattgttgcttatagcataagatgctagagttatttttcttcatgtaaagttactggaattgtagcatagccatatattgtccctctcgatatcatatgaagtgtaatatttggctcttgcccataaattcagcccatacttgtaagagtcgaagttctcttttaactacccatgcagtatggtttttcatttattgcatctatattggtaaacatgcaagcaactgcttatgatgagtgcatgaattgcttataagatttagatttattttaacagttggctctatgatgtggattcttcttttacatctttttgataaataatgcaaagtagggttgttttttatagcagctaattaacttcttcatttattttaatttttattattatgtctttttcttaatatgtaggaacacttttgcaatcctgcttccataagtctcgttcctatcaagtggcagaaattcttgtccaatttattggtataactgaatctctttattggtttttttgtttgctttatatgatattgcctttctttcttaatttattacgggagtgcttattttttctctgttgtctataccggaatactatttcttgaattttacaggttgtgctgaatacatttgaagctcaacctttaagtgatgaagagggaaatgccaataatttggaggaggaagcagcaacttttagtataaagtatcttactagcagtaaattaatgggtttggaggtatatgatgttgaaacattttgaaatgtatttagcttttactttgtggttgaccaaacctttaatttattttttcccttttccttatatttctctgggatggggttgtggataagacagttaaaggacccaagttttcggcgacatattcttgtc

SEQ ID NO: 16399 - DNA, 4912 bp, Cannabis sativa
gttagaaaaacagacaatgctatttacaccatcccatgttgaatcagaattattaaagcttatcaaggtccccagatagctttcctgaatcctgacacctaaaacatgtaaagaaaaaaggccacacctttacaattgtgggggaaagggtaaaaaagaatgaaggggaagtggctaaccttatattttctctggtatatacagctattcatccatagctaatttcatgcacaaaatgcagtcctcgtatttcatggaacataaagctccttcggcttcaagccacaaattcaataaagcttgttggtgtatctcttcggcaagctggtgattttctttcattgcttttctattattttcctgttggtataaacataaggtacaaaaatatgataggtaattgtcacaatcataaaatcaggggtgaacaaaccacattttcttctttctaaccccatagacataacacacaagaatatacccttcaaagttaacacattaaaatatataattccacaattatactaggttgttagatatagttagctaacttcttatatctcaaggatgagtaaacagttctaacataagataaccaaccacctagcaaagtaataagcaatgtaaacacccaatagagtttagcaaaagagacagaaggaagaaattccatattttttcaaatcagactcaaaacagatatgcacacttccctacctcatgtattgatgtcaacttatcagggtagtccagagtgtctgtatgtgccaaatcaaacattggattattttctccaaccctgtgttttataagctcataaagattactgattatatgttggatcatttcatgctcatcctcattcattgaacctaaatcattgcaacaatttcgaaaaaataactccaacagatatcttattatattaaccatggtggcaacatttactttcaggcatttagacagactgagataggaaatgaagtagttcactagaatcatcaacaacaccaaccccataagaggatatgtttggagtgctccccatcacaaggatagatatattgacattactattgtgcgcatcatccttagttctatctgcaaagccttcaacatttacttctgcaacaggcatcttttgtgatgtgaagactctgtcatcaagaaatggtttaacccttaacggaaaaccgagtgaagaactgttgtgtcagtttctaagcattacgaaattattttccattgattgcagtagaatgttggtagccctttgcattgctgaatgcatgaagctttgatccagctgcattgagcagtttaggagccttcaatccagctgcattgctcgaaccaggaatctttgatctagattcataagaatctttaagctgtttctctttgtatgacaatttaaatgaatattctgtgttcacgttggatgaaaaataaccttcaacgccgttactcccaaaatgatctacattttgtttggcacaagaagggaaaaattgaggtgcttttgggttaatcctgctaattgtctttgtctctaactcatcatcaagagagtttgagtttaaagactctgaaactttgaggtgagatttcatagaattctggactctcattgcaagaactaattgatcaactatactgtcatgcacaacatccttagctccatatgcaatgccttcaacattcacttttagacatctcattgggaagactgtcagcaagacacggtttaaccatttgcagcagcaaactgagtgcaaagctacttttagtgtttttaagcatggcagatccttttccaagtctatgaattacattagaatgttgataactaggaggctttgatccagatgtattgctcaatccaaaagtatttatttgggatgcactgcgcaattcagaagactttgatccggctatctttagcggttggtctttatatgatgaattaaacatttgaattctcacactccaagaatgaaaaactataatcttcaccatagtaattctctatgttatctacatttcctttggcatgaagaggtacaaattgaggtgcttgcatgttcaaactgctacctagcaccaactcattatcaagagaggatgaccttaacaactttgaggcccgggagggggattttctataactttggagtccaacttcaaggactgatagataaaccttactattaggcacatcattcttcaatccatcagcaaacccttcaacattcacatatgcaacatccatctcctttggtaaaaagactctttcagccagacttggtctaaccatttgcagcgaactgagtgtagaactactctgtattgttttaagaatggaagattcttttttcgcattcatgtattgaattggaatgttgatagccagttgcattgctgaatccaggaggctgtgatccagctgcgttacgcaatccagaagtctttaatctagatgtgttggacaattcaggagacttcgatccaactttattgcttgatctagggagctttgattcatcttcaaaagaatcctcaagtttttgcgctttgtatgatgaattataatttgtatgatcatctcccaataatgatgaaaaatagtcttcaacacaattattctctaaataatcaacatttactttggcataagaagggacaaattgaggcgcttgcaggtttcaaattgctacctggtaccaaatctttatcaagagggtatgagctcaacaactttgaaactctcaagaaataatttctagaattctggagtcccattgcaggaactgctagatcttttgtactatcatgcacaacaaccttagttccatgtgcataaccttcaacattcacttcttcaacaatcatctcatttgatgtaaagacagtatcaacaagacatggtttaggcgaactaagtgcaaaattactttgtgaggttttaagcatggaaaattacttttttgggttcagtaattgcgttagaatgttgatagctagttacattgctgaacccaagatgctttgatccaattgtattgcttgaaccaggaagctttgttttagaagaggcaggtggtagtttgaaaccacaagcacctcgattgttatcaccaaaccagattcgttatcatcaaaccattttgaagagttttccccgccttcctcaatgttgaattgttccatcactacatgatcagtaggattatcttttaatgtaagttgcagcttagatttttccaagacaaatagattagtacccatataagaaataataatcttgacattggttatttcttttctcttttctgtgaggctttcattttggtcatgaagctccctcttaccatatgcttttttactagaagaactctggttactagtactgacagcatcattttcagtcaaaattcacagctggagacaaaatgttgcttgatggtgaaatggtcttggcaatgactaataatccaaccatgggacctgaaaactcaaggagttagacatatcaaacgtataagacaccattcaaagaggcaacacatgatacaataacttaccaaggatattcttttgaagcattaatgaggaagacacatttaatgaagttgaaaccttagaagagctacattaaaatctactacgaaaagagagatattcattaagcatatcctcactcaatacaaaaaataaataaataaatgggtagtccatttataatataaacaattgtgctttcatgtactataaaaaaatttcaagtgagatttaaatttgagagcaattaaattttctccaaaaaattgtaataataataaccacgccttcagaatgaaaattaaacaattttgtctttatttgtatataaagcctcaaatgatcaccaaggttgaaaaaaaaacacatgtcagaagcaaaatatgattcactaaacttgacaacacaaggtattgaaatttacaaagattccaaagaaagctttgaaagccaaacaaaaagtaacctttgtaaagaaagctttcctaaatcctgagcttgtgatggagaatcccaatattcttgggatgaaagaaatgggtattgagggaacacatcatggtccaccaaatctgataaatcagttaaaaaaaaagccaatgtagcaaaccaaattgatgagaagaattaagaacaatagattttggtaatggttcgacttcatcttcccaattgacgctaaagaaagcagaatcagtataataaaaaaaaaacaatgaggttgcttggaacaggggttaagagttcatggctgaaagcactggtcaatgaattcaaggtcagtggttgacaggaaggccgactgctcatggtgaagagttgagccaaggctgacaaccgggaacgtgaaactgcagccgccgtcgccaacaacgatggtgatgaagacgaccctttcttgcaacccatatgagaaaagagagaaagagagaggaaaaattgagcaaagtctttgttattactcaactgaattttacaattagtgaatagagcttatatagctcagtttgatcaagaaaatgttggttggaaaataaccaacttgtaagagaattatgacagctacaaccacaagatcttaactaacttatccaaaggtgaatctaaaagcacccctcaagatggattgtagatgtttatcaaacccatcttggagataatattggaaaaatgagtaggtagtagagctttggtgaatatgtcatcaaagttattttgtaaagatacatgaagtagcttgatggagccttattggaccttctctcggataaaatggcagtcaatctccacgtgcttagtgagttcatggtagaccgagttttcactaatgtgaatggctgcggtgttgtca

SEQ ID NO: 16400 - DNA, 1865 bp, Cannabis sativa
tatatgagttagaactaaataaaactgaaatacattgtttgtatggatttttgttttcttagaaaagtttgagcgtgaataactgttattaataaccaacttcggcatgggtatgctttacaaactttgggctatattggctgtccattatatattgtttgaccttatgagagggatagaaagaaagaaagctaattatctatgggtcattttgcgtgtgcactttttcctttccccactagtatataaaagtcgatatgttcgaatatgtttcttcttgtgaaatctatatttatataaatatatatttagaattattatttattacatttgtaaatgaatatttatatatatatacatgtatgtgcatgcgtgacattaattgcttttttgcgcaaatggattttcttggccaattatgaaattagtatatggaaattatcgaattgtattgaccatatatgtgtatgtatagatataaaatacataataatatgatgagggttgccaaaataaatacgtaacgaattattaattcatgatcaattaggattaaatgccaatagagtatatgctggaccacacacttaataaaccagaaaaatgaagatatgcattgggttatcttatgtggactataaataatgcatgtgaactcttcttattgaattgttttttttttatatatattcttcaaacttaattaagcatgtgaactcaagtattccctttctttaaacaaaactctagctaaatattagtttatctaactcaaccggataacatctatttatatgtattgatttctattccatgtggcaaatgcatgtgttgcgaacaaattcaccaaactagctaacaataactaatttcaattcataattatgatactctaagaaaatatcacaaaacttagacagtgtttaattatttattaggatagctggcacaattgattagttactcctaccaactaattaattaacatcccaatattacatatatatatattttgttattatgttctggtatgaaaattaatataataaatatttgcatgcagattttacattgatgaagttccaataagagaagtggtaagaagtgaagaaatgggtggagacttcccaacaaaaccaatgtctttatatgcaacaatatgggacgcaagtagttgggccaccaatggtggaaaatacaaagtgaactacaaatatgcaccttttgtggcagaattcaaagacttagttctagaaggctgcccggtaaacccaattcaagaagttcagaccaccgtggcttgcgccgagaagagtgccgcacttgagagagaagactacgccaccatcacgcccgaacgacgctccgcaatgcgcaagttccggcagcgttatatgtactactcttactgctatgacacgttgaggtaccctgtgccgccgccagagtgcgtcattgtcccctccgagaagcggctgttcaaggagactggtcggttgaagtttggaggaagccaccgccgccagtcccggcggaggaaccggccgattgttactgctaccactgttccggatgacctatctgatatgtagtgagatatattttatacttactgtttttattgatgaaaagtaaatttggataggtttcagtgtgtggagttaattaatgtacattttctcaatctttcatgataaatatgatacataccatcatccatttaataaatacgtatcccttgggtaaatttttgtttcattaattagtactttggaataaaaattaaatgaataatacaaaattattaacatgatattttaattgataaatgccaataacagcaataaagaataaagatgtcaact

SEQ ID NO: 16401 - DNA, 7475 bp, Cannabis sativa
gattctttacgggacaacgattagctatctccatttagtctttctctcaatagtcaggtcctatctccattacatttcctctttcttcactctcgatcgactaactaaatcccgaatcccaaatcgcaccactacccgctaggagttcgattctgaatctttatatataaaaagtggctatttaaccagttttgttggtttaacagaatatactttaaaaataataaaaaaaaaatattctgttaactttaacggagaagatcgcctcttttaattaatgccattcaaaccaaaatacattttgcgattcatctttcgtctttaacaaaactatattgcgattctttacgggacaatgattagctatctctatttaacgattagctatctccatttagtctttctctcagtagtcaggtcctatctccattacatttcctctttctccactctctaccgactaactaaatcccaaatctcaaatcgcaccactacccgctaggagttcgattctgaatcagaattaatagattctatgtgtataacatatatatagttcgtatttcaggatgtgataaaacaattttgtgagtttggctatgaaagcttagatgtaatggtaatataagagattgaattgcagagacatcaacaactagagaaacattatagatctactcgttccaaaaaggtatcattatttggattttctgaaacattatttacagtttgattatcccaggatctctcactcccactcccaatcaactgtaagcccttcctccacacccgaaattccaatccgattcattattatcgaagccaatcccaacatcacgaccccaaattctaggcggcctggtctcatcgccatcaaatgtggtatgacaagtataaagttttgaaattgagttttttgtagaaatatgtaaatatgaacctaatcagttagaaaatgggattagtgcacaccagttgtgaaaatattcagaattaatagattctatgtgtataacatatatagattgttcgtatttcaggatgtgataaagcaattatttgggtttggctatgaaagcttagatgtaatggtaatataagagattgaattacagagacatcaacaactagagaaacattatagatctactcgttccggaaaaggtatcattatttggattttttgaaacattatttacaatttgattatcccaggatctctcactcccactcccaatcaactgtaagccctttctccacacccaaaattccaatccgattcattgttatcgaagccaatcccgacatcacgaccccaaagtctaggcggcctggtctcatcgccatcaaatgtggtatgacgagtataaagttttgaaattgggtttttgtggaaatctgtaaatatgaacctaatcagttagaaaatgggattagtgcacaccagttgtgaaaatatttaagcacagaatatctggttcttcatagattcaaaggtgtgtgcatcctcttaacgttttgtaaattctctgttttattagtttcaagaatatatactcttgtaggaagtaccatttattttatttattactttttcatggaataaaatgtagtgaattattaattgctacgtacatctagatataactcttcagtctttattgtgcttaattttgatataagtttgaatttcttgttaactgctcttcttgtattgattagttgtgtctggtggggagcatgttgatgtgataacaaggatgttgttgctgtcaacataaaaaacagaaactcctatgcaaatttggagtttgtactccacctgtatgacaaaatgcttactcttcaaaaagtccattttttaaggtttatccttctttattgcctcttttttttagcactgctgacttgattttctacaacattattgcataagtatcatttagtatgggtggtggtgtcttgtttcctatctaggttgttttgtttgtttaaatggagcacgtttgtcggttttaacaaattgggttttcttgctcaattttagctaattgtcactcacagatagtaagaagttgagaggttgcgtggagagaggaacatggtggcaaacaagatgaaaggaaagcttgaaccatcagagcgccagaagctatagaacaaggtatgactgattagcagtgcctttgtttcgccatataagattattcaatttgttctcattattacttgtcatttgttaatgttttttctcatgaaagaatctaaaagaagagcttcttagtttggaagaagatctgcctaaactcaccgacgaccttcagcagcaagcttaatgtataccgaatttgaccatctagatgttccaataggcggagaagattgtgcaatcataagaaagatggtattcttgtatcattctcctaggttaaggtgtcttggcttttgttttgttctggttgcttcttacttaacaatgtgctttcttaggttgtttcaccgcgagagtttagcttccctgtaaaagatcaccaaaaacttgggaaagagcttgatcttcttgatttcgatgttgctttagtggtatcgttgatgattgttaatctttaatcattatattttaacatgatggtctaaagtcccataaaaaaacataataaagttcttattttcaggagagtggatcaaagctctattatctgaagaatgaagcagtcatgttagaaatagcgcttattaattagacaatgtcacaaattatgaaaagtggctttacaccttcaacaaccccagaatttgtccatggagaattcaattgtatgcagatctaaaataaacgatgagtccaaagtacaatcaattaaccattcaaactgttgagtccatggaagattaagataaagttctactatgttttgtgtaatttttttataatgtattctatattaagattttatttaataattcttttcctctattttatgatgacactttttttttttagtttttgctacataatgtttcctttaaattttacaaaacacatatattgtttctttaaattttccagaaacaaataataaatgttaagtcatatgttgttatgacttatcataaaccatttcttcacattaaggataactactatatgtgaatatgtaaatattgagaataacttgtttttttgtattattaataacaatgtacatatcataagtttatatacacaattatgttttacttatcaaatacaatgacacacagtttactttaataaaacaaatcgttcatataatcatacctttagtcattgaaatttaaaaaaaaaaacaaaaaaagaaataccaaaaccttaaataaaactaagatttacatggctcggcacgtcacattcacctatagtattataataaaaagctagtaattctagtggacaccctgaaggggtactacaagaatatgtgtttttgtaggcctataagggaaagtgccggaattattttaaaaaagagacgctaattgaaataattttgtctatatatataaaattgtgttacaagtttaaaatgatataaaacttttatatcattgaaaattatagatgtcggaaaattgttgtgctccaacagaaatatcaaaccaacaaaattataattttatgacaaataatataaaggacaaaaacaattattaagataactaaataagcataaacataacaacttaaattttccattaagtattaggtcccgtgaaaaaaaaaatatcaaattaaatataatttaatttaataactattataaaatatatttattattcgcgaagtattatcactagaacaatattaaattttaggtgaacattaacatatatatatagacatgtctatagtaggtacattaattttgttcttatagtaagagtattttttatagccatagataataaattcaatagtaacaaattgataagtatacaacaatctatctctatatctatatatataatttttttgttaagagtgataacatgacatcttaattgagctttgtttgtgattgcatgatttttcaaatttttatatttttgttatttttttttatcatttaataaagtaaaataatttaattaaaaaaataatagtctttttattttttttataatacatattctattcttttcaaaaataataataataaataaataaagaagagagaagtgatataatttacaggctctcattaatatattattgttcttaactttttctattaaagttatgattataaatattactagttagggttccactattattattatattttcttaactttattaccattaaatcaacaattaatatggttagaaaagtatctttaccatagggacaaaatcaaagtctttaccatagacatttcttatatacatatatatctatataatactattgttagagctgatggtgtggcaaattaccatgttaggaacttcattttcttaattttttcctagtttcttgcttaatacttttgttaattagattattagttttttaaaatatttgcctaaattagattttcctttttcctacacacaaaacttaattttcatatatcatctcttctcctcctttattttcgcctcttcatattctttacttcctcttcatgtgatttcttttctcccttctcttccatctatgtctgcatcaggtaaatatattcctctcccttgatattctctctctcccctctttctatatgccgctctctttcacacttcttttctttaggattgttttgggattgtttctaaagatgaatgggattgttttggaactgtttccaaaaatgaaaaatgaatcttttctcccctctttatatctttctctctctcacactgccttttctctgagatttgtttctctattcttcattttcaggtttgaagatttcttttttcattttcattttcagatttgtagatttcttaatcaggtacacgtaactatatatttttgataatatgcaatacactcaaaatcatatatatcatatatatatattttgttagaatgtaaattggagttagaaactcaaatttgtcattatgtttgtatggaagggcaatcataaacacacatgcatgcatgcatgcatgcaaatacaacacaagcaaaaaggtcgtttcaaaatcgtggcgggaactgcgaatatgatcgtatgaatataaatatacaaaactatactataaaagataaatattatttgcatggaccgtttacatattattattagtcataactttatatgaagaaggattaagacgtaatttgatctaactatgaattgatgaagaaaatagattagaagcgatgatctctccgctttctctgtggacaaaaaattcttttgataaatacatgtaatttacgacagcgattagatattgacgataatttgatcaagtttcgcaattgatcgaattgtttgcatttctgaaaccattttatatgtgcatgtgtaaataagtttatatgcattttgttgatttttttcttcttcttcgctgtgtttattgattcatgtgtaaaattgataatcatatgtgcatgttcatgtgctttcagattcgaaggtagtagttcaagcgttggattagcgaagatgtatcaatcctaattggaatttctagctgtgttgctggtactgttcaaggggagagaattccctctgtgttttccatctatctttcttagttattgaaagcgtagttctttcaaaaaaaagttggaggaaattggaattggaaataatggtaggaaattgatttgaaggtttgtgttgaaattgtttgaaaattggggttcgatgtcaatggggattatcaggaatgatcggtttcgaagattggaatttaaaagacggtgattttcataatttaagaagttgagagattggtgggagttgattttgtttgatggggaatacatgcgtaggcccaaatcttggttctggtggtttcttgcaatctgttactgccgcggtttggcgaacccgaccgccggaggacaaccttcatcctcctcctctaactaatcaagaaagtgaagctaagcctgcccaaaattcaggtcttgattcggttcgtggttcatctaaaggatcacatgggtctaaaaatggtgatcgttcaatgccggttcagaacacacctcctgaaactgtgaaaattgctaatgatcaacaagatcgcccccctcatcctcagccatctcaggctcatcccctgcctttacctcagcctcagcctcagcctcagcctcaatcacaacctcagcctcaacctcaggttcagcctaaggaggtggaatctaataaacctgataaggaaggggtaaaggaggaaggtgcaaaggctgcagatacttcaaaacccaagaaaccttctcatattaagaggctttcgagtgcagggcttcaagcagaatcagttttaggaagaaagactgcaaatataaaggatttttacagtgttggaaggaagcttggacaagggcagtttgggacaacgttcctttgcttggagaagatgacatctaaagaatttgcttgtaaaacaattgcgaaaaggaaactgacgacatctgaggatgtggaggatgttaggagggagattcagataatgcaccatttggctggtcatcctcatgtgatacagattgttggggcttatgaggatgctgttgctgtccatgtagttatggagctttgtgctggtggagagcttttcgataggattatacaaagggggcactatacagagaggaaagcagcagagctagctaggattatagttggtgttgttgaagcatgccattctcttggtgttatgcatcgagatttgaagcctgagaactttttatttgttaaccatgaagaggatgccccacttaaaacaattgattttgggctttcaatgttctttaagccaggtttgttgtagctgtttttgggtgatatgcctttcttgtttctttgtggacttaattttgtgatgaattgctgttggttttccctgatattatagataaagtatgtcctttgtaggaaaaagagctgagtcctaacaatccttttggggaggattaaaagaaatggcttaaaccactgttttccaagtggcttgtgcttaatttatcatagtttatatgagacaaagtagctaacattgatatgcataatgttgtattatggcagtgatagggtgttttagtgaattagccaagtaacactgatcacactatgttgaaacgcacctaaaataagctctgagtgctttcctctttatttagaataagaattttctatctctaatataggaaaatgttaatattctcaggtgaaacgtttactgatgtggttggtagtccttactatgtcgccccagaagtgttacggaagcattatggt

SEQ ID NO: 16402 - DNA, 5255 bp, Cannabis sativa
tttggtacatgtcaaaattcagggcaaaaatcctaattaaaaaaaaaaaaaaaaaaaagtgcagcgtgttgtaaggtaataatgagggtgggagggggttagttagtaagagccatgcagcttaaaaagttaggcaaatataggcgcatgcacttggaaattaaaccaaacagtcaaatacataccaataataaaaagcaaattcttttgaacaacacatgcatattaataaaaaggaaattcatgcaacaaataataaagccttccttcctttcctcctagctgctatagctaggcaaggccaagacacttgattaattagtttatttgccatctcccattccaagagtgttcttcactgcattggttgctccttgagccatgctcgaaatttgatctccagtctgaaattaacaaaataatatatatatatcaaaataaaactaattggctggccaggtgggctatttgtatgtaattttgtaaaataatcataatgagcccatgccattattatacctgttgtaagaagccaggagattcatgtttgacgcctatagcagaggcagcagagtctttggtggattgagcagcagtttgtgtgttattcgccgcagtttgggctgctattgatgttttgtccgacacagtttgggctgcgcgtgatgcacccttcattgcctcatctgcttttacctatatatatatatataataataatgtgtcaactatatatattatatctatatcaattattatgatcatcatcactaacactaaattagaaaaaaagaaagacttattattaatattatatattagtacctgaacatctctgctgatttcgctagccttgcttgagatatcctgacttgccatttttgataaagaaaacaaaaaagttggttctaaatgtaggatggattattaatttagtaagtgtactgaaagtatgtgaaagttgtggatctatttataatgggttgatgttgatttgtagccacataaaatcatcaaattattatcaaccccttaggcttgcatgaaatcaaaatggttcacagggaaatcttatctttggattttggactagacaaggcatagattcctgacacgtgtcagtcttcatggtgaaccacttgtggggttacagtggagttttgtcgatcgttattaatattatgttaccccacctatatacccatatccatatgctagttttttattttttttctgtaaggcccatatcagatattttcttcttctctaagattttttttccttcttttttcggaaatatcacttttacattgatgaatgatattttttatttattttttttttcaaaaacaaaataaaaaaaatatttacatttatgaataatgtcatagtcgtcgacatggggatactagtgtagtaatgttttataacatgtcgactaatttgtagttatttctttatagaagtcgacaaaaagttaacggtatccaccgaaatatatttaaatatagaaaaagcaatttcaaataaaatttgtgttgtcttggttgttcagcttatattatataggagtactttgtaaaatatgggtcgggtcgtgttgtatcgtctaattgaaagatataagtcttttcgtgttatgcttacatttttatttttaaagagtaggctcaatttttttcgccttactcgaatttatgtcatgttttatttgtgttttcgtatttttcttaaacgggtcgatccatttttatattcggagccaattattaacgtataagtattttttataacttcaattatatttatataatttttcaataatattttacacataatcattttaaaaaattataagattattaaaatttaaattattacttataaataattaaatttttatttcatattttataaataaattaatatatatagttttaattgtatatttctaatagttttaattataaaattatttatttagtgtttatttaagtttaattataattttagcatattataggatttttaatgtgttgtgtcgtgtttttcaggcttgtctcgtgctatgcttttagagttagtctattcgtacttaagttgtcgtgtcattcgtgcttaagcacatattttttggctcgtgtcatgccaatatatatagcatcgtatcatattgtgcctaataaactcatgttttttggtgtcctccgaactcgtgccaatttcgttgtatgccaaaaaccacaatccatttttacagcactatatactctaaactgattattaatagtaaatggtaaatttactattaatgtgttacaacttatcaaggtcacatgtgtcataatataaattctatatttcactataatagaaaaattcaatatgcatctcataaaataataaatacatttcaatatttaaaagattatgcttaaaataatttttaaaaattagtcttaatattttttttttaatttttttctcacattattttgtgttaatttcaatatttatttgaattttattttcgtaattttttaaaaatcatgtattttttatttcttttttgttataatatttaaaatataagttatttttgtttaaaagatattttttcaagaatataaattaagagaaagaaattagaaaatttaatataattaaagatattgtacataaaataaaaattattaatttgaggtgcatttataaatttattagatgcaaataaaacttcagcagaataatttaagaaaaaatttcaatagaataataaaaagagaaaaaattgatagaaataaaaatatagaggcaaatatcttaaataaattgtgtttggcggttaagatttttcctccttaaaaaatatcttaatttttttttttttaatataataactaattttgttactaaaaatcaaacttaggttattaaataaggaggaaattttttccaaccaagaaatctcgttttccatctatagtgcacaatctcaccatgtgttgcagtattaccattttgcattatatattgaagatatatatttgaaaagacacataacaagaacctaataaatctaaaaaatatctttaccctaatccagcctaaaaaaaatgattaaattgacgacaacttcagaattactttctatatcttaaataaattttaaaaattataatcagtaaataaaatatactcaaataaattgttacttgctaattagaaggacaaatataaagattacaagaaatggcttgagcctcttcattggtcgcatgtaatgaagattctcataaagatggaacaaaaaaaatacgtcacaatgattatttaataaacacataataacgctacattgaagcctaactttttaagatgttcaaattaagttgaatgattgtttctcaatgctcttttaccaattcctaatataatctattattgcaataaatttatgcgtgtcttgttagcctgatctgtattaattcgtgtttttcaaagaacaaaccgtgtcgtattgtggtacaaaaaaatatgattcgtgtcgtctcatgcaatatttttaaatggtaggtgcccagcacagtccgtataaatttagtattttcatattgtacttttttcatatcggcccgtattttttaaacaagccagtctatttggtaacactatagtggcggaattgatgctgaggaatttttagttttttgctaacacgatgaatttttaattagttaagagcttggtaagcaaaatacctaaaattagctcataaaacagatcccttaagcgaaaaaaaacaccccaagatagtactctaagcaactttttttttttttttgaaggaaaatactttcttattattattattattaaacaaataaggattcgtactctaaacaacttaccttgccctatcataatacttactaaaaagatagctatgttatatacatattgcatttgcatgtggttctattatactcaattaaagaagcgtgtaagcgatctgcgctgaccacgtgtcagtttatactaaatggcaccacgtggcgacatcgtataggctgagtcattgagttaacctttccccaaatgtcacatgcccccgaggttatgcccccttcgttacgagagcatgacacgtggcatacaggtgtcagcaaataaaacacgtgtctatgtctcaccctatagaaaaacactatataattaccctcattgacacacttctattctcatcaagtacaagcaaaacacagttccataaatattattcatattaactccattgccaaactcacaattcacttttttcagtcgaaaagaaacaatggcatcccaagaccaggctcgcagagctgctgaaactaaaggccgtactgaggtaaagtcgttcgtatcaaattattttacagctttatttactctttttcttagaaatatgacactttttgttttgttttgggctttttaccttatcggaaatattatcaaaaattttaacagaaacaaaaaaatatggttgtaagttaattttttttattttttttagttactttatgtatttttggaaaatttgtcttttataggagaaggcgaaccaaatgatgggctcagtaggggagaaggcccaagctggtaaggacaagaccgcagatacagcccaagcggcaaaggaaaagaccgcaagtgcggcccaagcagcaaaagaaaggacagcaaatacggcccaagcggcaaaggacaagactgcagatacggcccaagcagcgaaagagaagacgaagagtgcggcccaaaccacgaaagagaaggcatcggatacggcggcaaggactggagagatggcccatgaagggaaggacaaggctgcaggaattcttcaagacactggggagaagatgaaacagatggcccaatcgactgctgatgctgtgaaaagtacacttggcatggctaagaacgatgaagaagaggattctcctgcccctttcaagaccaggggaagggactattagaacaacactagaaattaattagagcaagttactttttgttgtcgtttttgtatttttgtttgtcgtttttgtattttctttcatgctcctcctgcgtttcaaagtatcatttcatcatacatgaaaatgaaatgaagtgaagaaaactgcattgaaataataaaatatacttaactttctttttttactatttagttgtttaacagagctttgttttggtacaaatttcat

SEQ ID NO: 16403 - DNA, 3058 bp, Cannabis sativa
tagaagaatttgtatgagaaaaataggaatcataatctagctttggaaattcacaattagataagtgtaagcttaataaggagggagctgttttaaatgaatgaaaccaatctatggctttggtgaaatttgtactactcattttaaagattgtcaaattagagagatgagaaacccatttaaaactattagaaatcaaactactcatagccatagtgtcactgagatcaagaatacacaacttggtgatatttccaagttgtgaaggaatatttcctattagaggattccctgagaaattgagatattctaaatttgtgaaggaatctataaagttggggattttagtgaaaccattgtaactaagatccaaatactccaaatattggagttgaaccaaagagagagtaatttcaccataaataggaccccaacgcataccagcatcataataggtaaaattaggacgaagatcaagcatgataatatgattagttaaatcatggcacctgattccgctccatgtgcagcaattcttgttgctgcttgtccaagatgataagcggttctgataatcaactagaccttgcttgaaggtaagaagagcttgtctctctgtttctatacacttgtatgcatgagtagtgattgcattgcctaccaagaacagaagcaccacaataactttcatattgacaattcaaatttattacaagtaataatgcaaatgcataattgatatatatcattatatatagatattttttttcctactaacttttttatttatatataaaataaaatgtgtaaatactattttataaaagttattaattggattctttgttttgctaaataataaaatactatattttttaaaattgtacaaatagaaatcaaaataaaatttaataataatatgatctaaagatgttatgacaaaagtaattatattttttatatttgtttgtgttagaaattgtttaattagttatattaaaaaaataaaattattaaaaattaagctcaaaattttatttttactatttaaaataaaataagatctattttaaaaaaaaaatgtacaattggtaactttttttaaaaaaaaaaaacaatgtccaaactcaaataaaaatttatatggcattccttgattgatcactgcccaccacatacaaatgaatcgattgattgattgatgaataagcttggaaaattagatagacatttccgtataaaacatatttgtatacagctggaggattcattacttcttttggaaaatatgatttggattaagatattttcgagaatgacttcaataattggggctgggacctcttcaaaccagtctaatttattgtgtaatgtaacctaatgcatgtttaaccaaattatcgactaatattatctctacaggacacctaagataaatttgtctttcaaaatttaaagttatgtcatcttctaacaacacattatcttattagtaaatacatttctattattaataactattactattaaaagaaaatcagatttaaccatttctaagagaattttagacaaataaacctaatttaattagtcaaaaaagcaaaagtttcaatttgaaaagtaataatactacctaaaaaaaactaaacaccaaacaacaaaacaatattaagacaagttggaaaaaatattattcacaaaactagaaaaaaccaagaagagactatcgaccaaatcaaaacccagtctataccaaaattgaaactactatataaagcagaaaagaaaaaaaaaaaacaaacaactaatgctaatcaaagtccacacatttagttagtaactgacaaaattattataattcatgtacaaacttaaggagataaaaataactcatactactttatttagattcctttagtcagtaataatccttataattattatattattttcgaaagtctttaagacttttagaaaatataattatccactatatcgaaactataaaccttgaaggtaagaagagcttgtctctctgtttatgagtagtaattgcattgactaccaagaacagaagcaccacaataactttcatattgacaattcaaatttattacaagtaataatatcactatacatactaacatttgatattttttttcctattaaataaaaatttatatatgtggcattccttgattgatcactgcccaccacatacacatgattggttgattgatgaataagcttggaaaataagatagaaatttccgtatttgtatacagctggaggattcattacttgaaaattcaactttttttctttttcttgaaaattctttgtttgaatttgttcattaacaaaccatcacctcatttaaatggtgtttaactttcatagttaatcttttttgaattccatagcatatatacgaataattaattagtgttggtctcttgtttttttccaagtcctgttggttgcagtctggtgaggatatgagagcttcgagtgatgatgatttctgtgattctgtcactggtttgaggacttactgcataggggcgagttgatctggtggaggagtagcttggtccctttggaagcttcagaatgatttgttatggagtaataaaattaaagttttctccttaaaatatttattaattacatattaaaaaatataattttaaaatattataaattatttttatctataaaaaaataattaaaaatgtataaaaaaaattatataacatcattttttataaatatttataattatcataaattagaatataacattctcattattataataattattataataaaattttaataactcacaacactttaaaatttataatttactaaacatttttattttaatttttttttacagttctgctacaactgattttctttacagcacggctatcctgtttttcactgttccaacactaaaactgatatccaaatagattaccgaagagagcttcttagctatagtttcaaattaggtaatataatcgtccttgatggttttaaatattt

SEQ ID NO: 16404 - DNA, 1868 bp, Cannabis sativa
ttctgcagttaaggcagcggaggctgctagagctgcagccgaagaaaaggctgcaatagcagcaaaggcggtggctgctgcaaaggcagcattggatttgattgcttctttttctgaagaagctgtcaacaaggaaagatatctgaaaaagaacaagtcaaaaaagcatgtacaggttcagctattgtacaaaaaataccaacctattcagaattgtaagaaggatgaggaattggcgcgtaatttgcatagagctataaacagctcaccaagaatatcaaagaactctcctagtcccgaatacaagggtcataaacacaagaaacttaaagccttatcgagttctgataaaactagagattcaaatgacaaatactacacatctagttgtaatggacaacgagaaattgcaggcgaggttgattttgaaggtcctggcagagagttatgcgaaagtaaagcagatgacaaggtatgtacatatgataaagcgggacaatcagtagatattggagaagcagaaataggtcagccaaaggagaaaattttagatgatatttgtggtggtagtggtaaaaagagaggaagagtgaagctaaagaagttgcctttaagcatgtgcaacttcagggagcaagctactactcccaaaggcgaggtggatatacgaaacacgcccttgactgatatgaacatgggaaatcctaaagctggtaatatgtctttgtttactactactgtagagtcttctggtgagggagtgatgccaattgaggcgaaatcagtttggaaatgtcaggggttcaaggcacctgaatgtgtcaaacaaaataaagtggtgcagtcataataattatatgtccaactcctccaaaccccattgttgtgacataatatggattccaatccaagatagaagtttgatagctgaggtaggattcataatcataatgatgctcttcttacagaaaaagaaaagaaaaaaaaaagaacggctttcgtttgatcttttttgtttaaaacttgtcttttgtaatgggacatgaactgaccaagtgtaaatttagatgttaaattgctttgtatccatgtttttacaatacaggatttgccttttgttcatttgacggcagatcatcaagttgagattataggggttgcaataaatgtgtaaggttggttgcttagtagagtcaagagtgtacttcattgtgccttttttttcttcttcttcttcttcttctttttcttattattattatgtagatacagacaacacagtcaatgtctttgctacttttttgttatttaatggcaagttaaattcattatgttttaaactacaatatgtatctatcctattagaattgtaaaaagaatgaattttgtagagaaactttgctataaatggtgtcttaatatgttcaaatctcttttggggatgttacccttattaaatttatgctacacagagacaaagatcctaaaggaagaagcttcagatgaaagccagcagaataagtcatgtttaactctgctttaagtactgtccagaatttggtgtcccagtaaatgtgattaagaaaagtggttattcttttcttgtcttttgacaatggattccattccaactaaacattgggaaacaccaaactcagacatatgattccatgtcggttgatatattgtactgtagtagtattttaactgagatgagagattaattaaagatttgatctttagacaagacaaggggagaggggagttatccttagttagttgaagttgttttcaaagctaattaatttgggcacccaagtgagagtcagtgtcagtcagagtatacatctcatcaaataataaagaaa

SEQ ID NO: 16405 - DNA, 4084 bp, Cannabis sativa
  modified_base (27)..(30): a, c, t, g, unknown or other
aaacgtgattaactgctaatttccaannnnaactaagcggtctttacagtttcattctcttcctcgtcagccgttaacacaatctgaagcaatttttgctcacactcatgacctgggtgaaatttctcatcacatttgaaacatatgcctcgcgatcgcttctcttgatactccgcttcagtcaaccgtttgtacgaaggagtagtcacgggtcgattgttggtgggtttgtatgccgtagatgccattgatcctgtcgaagagcttggtgttttgggctgaaaaggaaactgttgggttcgaggtccaaaggagctgaaagtggatctagtgggtgataacgggccgaaattggatctgtttgggctgggcttttgggttgggcttgaattcatcaaatggtgtccttcttccactctttgagttgtatccatgatttgggctaaccctttgggctgcaacatgtggagggctgccctaatgtcttccttaagccccttaacaaaactaccctcaagaatgtggtcgggcacgtcggggacccgagacgccagcacctcccaccggacgcaatattccttgactgagctggtctgaatcacggacaagaattcctcggaaatcgaccccaccggtaccgcgcggaatcagagaaggattaattgtttgagcatagcccaagaagtaattggcctgcgttggttctcccactggaaccaagaaagagcatctccgtcaagtcctacaatcgctgtgtttagcatcatcgtttcattcattctacagagaagaaaataccgctcggtacggtagatccaaccatctggattttcaccgttgaacaaagggatctccatcctcggtggacggaagtcttgactgtacgatcgtccggaatgaaatgacccaagttgtatctctggtcccgttggaatgtgtagaggagataccgccattcttgctggatatttcggaggttgtagctccgatcgttcgcccaccgcactggtttcgccggtcgaatttccattgccgttcactgctcgttgctgcctatctgcaattgcagccgccggatcaggagtggtccttcccgctgggatcaagagctgagaaatttgactcaccactgcctccatctgcttagtaacaactttctcgatggtggtttgaagctcttcgtgcagcttcgagacctcttcttctaccttctcctctataatttcagccatgttgtctttcttaggccccatgaaagtggagctctgataccaaattgatagagaaacaggtatagaatgcaatatttaggaacaacaattagtaagaaaagagagtagagattgtattgataaaatctcaggtaattcgagagcctggtccctcctcacattcaattacagtttagtcaaaagtgccctcttctaataaacaatcctttatttatatctaataccccagggtcttaacatgcaccccactctacccaaccaacacttcactaactgaattacgtagcagaataattatctgttgcacccccatctttagccttcctagacctctttctagcatacacaaaagttagtggaggcttatcaatttgcagtaatgtaagcaaaagttataactttagcggttacattaaattggtctcttatatttgaattatttattagttcttctgattattttgaccgtgatttatgcattgtctaagagattctaattttgttataatcacttaggatctttattagagaatattattagtttatagtgtaatttttcttagacatctttgatttatgtacgtagcacataatttaacaattagtgcactcgggtagatgtcaaactaacttagatttatcaaattcttattatattcaatatttattgttcaaaaaaagaaacaatatttataagaattttttcatttttatatttgaaaatatatatattttttttttttttgcatttttacgaaaatcttcatataacaacctacatagcaattaaaatttacataggaacccatgtaaaaattactggggcgatccaaattgtatatttaaaaaaaataaaaaatagtatataaaataatttttttatttttgaatttaataaaaaattaaaataataagaaaattaaaaagagaatagataataatatttgaagtgattatagtgtcatttcaccatattatgtctatgctttatacaatagatataaattattatatttgtattgtaaatgtaggttttttttatgatttatttatttgagcctttctagctaaataagttacattataataaataatttgtttaaaggaactagccagttatttacatatgcttaattatccacgaattgggtaattttgacaaagggttctatggatttgttagtttgttaatagagaaggaaaaagagcaggtgagcttaatcacttccaaagatgatggattagatagcagttgtagataaacaaagttagtagcaagcttttctaacccaccaaggtaaccttttataaaggagattggcctgaaaaatagtagcatagatttgagaaatggcagagatagaatggggacagacttcagggaagaaggtatggcaaccaccttcagttccatttctatgggaagtaaggccagggatgcctaaaaaggactggaaaccagaggttacttcacatactccactttccactcctccactcaagctcattgcctcagttcctttccagtgggaagaaaagcccggcacaccactaccttctttttcacagccaccaaaagaatcactaactgcactttttccattaccaccaacatatggttacttctccaaggatgatgaaattgatgacaatgacaaagattacagcagcagtgataataatgatggagaatatgataatcgaagtctgtttaaaatggatcttgaaacatttggttcggaaacagatgaatcatatcattctccttctgtcctagcaaactgcctggtgtcggctgcgacttctgctgctggtccagcacgcaacacttatttgactgaagacaacaacagtgatatgctagactccccatcttcactagcatcagaaacagatagcagtacaggcagctatgcaactggaaattcaagccttgtgggagcttctttcctggaatgcctcttcccattgattccacctaattctggatttcttggaaaggttgggcaaccagaggagtctgaggcaccgcaagaagtgtggtatcaaaagtttgatcatcaaaataacgacagtcacatgataaggaggccacaaacactaggggagctgataatgatgagccgaaggaggagctaccgaagaaaggctgttcaaatgagaaaacagaatctgtcaatggtaaacctcttatcccatgctcttactgtcaatgccattattacctgagagtctcagactattatctaatgatgctatcatatgccatgaaagaagattgttataaaaacactccactataacaaaaaattgaaaacaataaagcaaggaacgataaaaaataacccatacagattattcagattaatgcactatcatctgctacttttcacaaggtaatcttaaacacatattttaccttttgggatgtaactttatgataggaattcacaaaggggggagcttttgggtgctgcatctttggatatggcaacaagatgatagaagaaatgggcatcaagaggaagcaattgccccgactgaagctggcatggtaaaaacaaagctgacacttcaaccaagtttcaacatcactttggaatgagttgttctccaattagtttctgaagcattttagttttcttatcctaaattaattgaaaaagtgcattgtaaaagagattttagctgataatgatattatatgaaacttcaccagaaaactttatatctaaatcccttacttctaaggctgaaagcccaaaagagttcaaaattgtaaaacaaggtgattgagaagaagaaaaaataaaacaataaatgaacaaataatttaactgtgagatatacta

SEQ ID NO: 16406 - DNA, 4899 bp, Cannabis sativa
cattcgggtttatcgttcttagtacaccatttgcaggaacagaaccctctaatctgttgtatgaaacattgagattctccaatgctggtgagataccaaagttttcaggtattccaccagttagagagttgttagatagatctagaatggctaacattgacatcattgataatggttttggtatctctccactcaattggttgttccttagatttagattgactagtttctcacatgaagcaatgcttgatggaatgattccagagaaatgatttgatgaaaggtcaagcacagaaattgaaggacagtcttgaaactgacctggtatttctccttctaagttgtttttggatactaagaagttttgaagactaggaatagaaaaaatggtggaaggaagagttgaatgaaggcggtttctagagaaatcaatgaaagaaagagataaagaagaacatatgtcatttggaattaaaccagtgatactattattagctaactctaacctttcaagcttctcaagtttgccaaatccaattgggattgtccctgatatcagattgttctgcattctgacccgaacaagcgatgaacatgtcgataagccaactgggattggacccgaaaaggcattgttgaaaaggataagcttggtgagatttcccctgtgacacaaggttgttggaatctcaccagagaatgagttggaagatatatccaaccattgcaatggtgagttctttccaagatcatttggcaaaggcccagaaagtgaattgttccatagctcaagaatctccaatttaggcaagcttccaactccactagggactgaacctgataaactgttgcacatcagattcagaagctgcagattcttcaattctgttatttcatctgggattttccctgataacatgttatcagaaagatctaacaacttgagtgaaacaatgctgccaatttcgggtggaattctcccttcaaaactgtttttgtacaagaaaacagtctccaaactcttcagtctcccaatctcagttggaatctcattaccaagattaccaactgacaaatcaagataccttagacttgtaagattcccaaactcagctggtataccgccttcgaattcattatacccgagaatgatactctccaatgaagaaagctctcccaactcaggtgggattaaaccagtgagattattcccagaaagaccaagaaacttcaactttttcaagttcttgaaagatttaggaatcaccccactaaagaaactccctcttagatccaaactttccaacaaagtagcattcccaagatcctcaggaatcaatcctgtgaaatcattacttgaagcattcaaataagtaagcccagctgctctcccaagaccaacaggaaaactaccaatgaagaaattctgactcacatcaagactctgcagagtagtgagattagctatagatttaggcaatgaagaagaaaacacattattgcataagttaagagtaatcaaactcttcagttttaagatttcatcagagacaatcccactaagattcttgtgggaaagatcaagtttttgaacatgtccttcattgttgcatgaaaccccactccaataacaatgagctccaccattcttccaatcctttaagctattcaatggatcaataagaccagctctgattgaaaccaaagcagacacttcttcatcattatgacaaaaacaaccaatgaaaaaacaacaacaacaaaagaagtataacaacaacaactgagttttcagctgcatattggggttttgtgtttataattctctcatataaatctcacccctttccaccattgccaaaaaaaagaaactctctgatactaaccaagtctcaactcaagtgttttagtatatatgacatgttatgttatggtgttgttataaatataaatataataataaactagttatgttattaaattaattggtgggattagttgtaattgtaataataataataatattatggggtctcgtgagatcttgggtactgtaacagctattaatctgcaagtaatgacggggaagctttggacttattggaagcttctccgacattaaacatgggaggagaatgtgttctttctcaccactcattcagtgaagttatatatacttatatataaatatatatatatatatcatggtcaacatgagtgagtgagtgtcataatataatacatctctatttctttctctcacaaacattttcacaaacactttgtcttatattatagctaagctactacttaggtacctataatctagtttatagagtaacttaactatatgtagtgttgttactttacattaaacattctttcaagacttttaatctagtttttattaactatgcaaatcccaatgaaacagattaaaattaatttaaactaatgagataagaaacataccttggaattctattatgattgtgctttttttttttttttgcttagatagtaattaaagtttcaataaagggatttttttaaaaaaattgaatttactagttttagtttaaagtacaccttatcatagggtattattgttagggtcctttagtctatattttagcctaattttgataatttttttttttgtgaaatgacacttgttcgaatcccattcgttccctagatttcgtttttaagtgtcaatgttggtccaacagagtactttcgccgttggggcttcaacaatcttattattacagagtcaatttgaataccagtcaatcttaactatacatacattatatatcacaaaaagtaggtggtcaaaatgtttatacaactagttgaagtgttagaaaaagattttttttttcataaaaaattatcaaaattaaagcaaattgtacatttaataatctaaacagatgatcgaattatttagatgagtaattgagatgtttaaataattaatcgaaatttaagttagagattatttgcaaaaaaaatgtcaaaactagaccaaagtgttaaatttaagtttaattattgattttaaataaatatctaagtttaattttaacacttaatagtcaagtacttataaaagttttaaaattataacataggtattattactactaaaaattaaacttaagtatttatttataactagaaaattaaatttaagtatttttgtcgcaaattactcttattttattatgtctattaactatgagaaacataaagtgtttttctataggaatattttaaagtgaaaaaaaagtcttaaatggttcaaaaagcaatactaaacccaaaaaagcttattaagaaaagaatagattttggtaattgagatctttctttttaagtcctagcaaacgtgtgaaagtggtacaaagctccatggcttaatgatttaggtaccattttcaagaagaaatttttttgccaaagttggtaaagggtaacttctaagtatgacaaaaattcagaaattattatgtgtaaagtataactattgtcacacccattatgacattatatactatatattatattcatattagttctacaataatcaatatcaaaaacccatttgagattagattggaaccaattagtatatatatttaaataataaccacaatgtttttgaataatattttaaagcataatcagatcatgtagacattttacccatttatccagctaataataaacctaagaaaaaaaaacatagttttaattaatcacttgttataattgaggaaaaagaatctttccatgttatgaaggtgaactcaaaaacactaagacaaacatttttgtatctaagaacattttgatgtgggcaataccaaaaagtatggtattgccattataagttatattattataaatcaataaataaaattcatttgtatatatatgacaaatttgattagatattgtttatacataataaaaaatttcaattgaaagataagtggaaaagatttgtcctttcaatgagagtataagccaaaaaaaaatagcataacatggtgttttgtaatttgtataataggaatttttatgtttttataatattaaaagaaattattaggaaacaagagaaagtatatgaagataaatactaaagaacattaataatatttagaattattgttattattagtataattattagacgaaaaaaatgttaattttagaatgctaatctatgaatttagtattcttcaaaaaaaaaataaataaataagtttattgctctggccaaaaatacaattaatccaacatgaagtatataaaaccctagcaatttacctaataattaaattgataaatacttactaacaattttatgaaagaaaaaattcttttacaaactctttttttttttaattatttttttttatatttttgaaaaaaataaataaaattaaaaatttggtcacatgcaaacatgtgagatgtggtatggagattataaaaatattcactttatagttatattgtgcagatataacagatagggaacccatgtgaattagcagcttcattgggaagcccccttttattttttcttgcctattattggagtgagaatattttggtctttttatttattttctatataattttatacttatttataatgggattattttattttaatcaatcaatcaaccaatccattatttttattattattattattattaatgaaaaaaaaaatcccatatttagtatcatagatgggccttcacatggctatggaaaaaggctctcacacacacaactttggtcattgcacgtgtggcacatgcaactattgtggagcccacaaccttttgggacccacttttttttttttttttt

SEQ ID NO: 16407 - DNA, 2237 bp, Cannabis sativa
tcggatgtctcatccaacatccgagccgatccaattggatttttaaaatttgcatctgatccgatccgatccaattatgattggatatccgattctagtggatcggttaggattggatcggttaactttatgcacacccgtattttttaggactcggaccttagactaaagcccaaaaacaattgctagaatgatctagtatatatatgagacctttggtctcttaaggagcatcaaataagtgtgtgtaaaactaagccccaataagactatcccataaacttagtctaaaattataagttttctaaatagtgtgtaagtgtgagtattgtctagtaaataaaaaagtgaatgcttggtcgtgtgtattgataaagttgaaatatttaagtcttggtgcttttttatcaataaagtaattaggtttacatttgtagtggtatccaataaattcaatttcaaatttgatcaatttattttgagttatatgtaataataatcatttaatttataactcataaatgagacactttgatcattattatgatcaagttttaccaattaaatttgaaaattttgtactgaatatgtatgattttttttttttttgaatgggaatatgtatgatttcaaatagtgtcaaataaatattattaagaacacaaaacacatggtactagtcttatattttaaaaaacataggttaccaattgagtaaactttagttttttaatggtagaaaagtagatggtttttattattattgttctcgagacaaatatacagatgagtaaagaaaagaatatgtatcaaagctttgcagaaataaagtgatattatcctactccaaagaattgattaatacaaaactaaaataacaactctcaaaaagaaaagtgggggaaagaatcctaaattagaccatgatttccctgctgtggtgctgtacttggaggaaagctgaaagggtctccaaatggatttgaagatcctacatgttgcgactgttgttgagaatattgattttgttgaggaaattgaggtgaatattgttgtggtaccatcatagtgttggcttggtatggttgttgttgttgttgtagcatcatttgttgctggttctgttgctgttgctcctgatgttgttgggccattagtgccatttgaacatttgttgggggcgctatgttgtttgacatcatgaacgggtcaagttgatcgaaaggattttggatacttattccactttgtccatatcctgcattctgtagatgtatttgtctcctggatgattcgtcttcatacaagctatcaagtagtagtttgttgaaaccaccggcctatgttaaaaacacaacaatgctcaatttagatgtctttacacaattggccgaaactagcattggagatgtgtttttattttgattctcatttaatgaataaaattccataacaatgaatttggcagagtacactaaccaatttgctgtccaccacatgattagcattgctgcttggagctgtaaccaaggctaattcccaacctggtgccccaagaagatcattcaagctatgatttgtagattgtgaatcattccctgcaaaaattttcacaaaaaaagatcacaggtaaggaaattattttagtttgtagttgaatagtctttgaatttatgtgcagcagatccaccaatcgcgacaatctataaagttgagtatttcttatatgattgctcttatatgtaaaaaattattatagtaaaatatattgaagcctaccaggtggaattatggcaagagccaaagcattgctttcttcaatttccaaggcttttgaatttacttctcgcagaccctgaaaaggagataaaagtggacaatgcatattgaagcagtagaaaaaaccccaaagaagtctagaacatgtgactcaaatcttaccaggaaatcaggctcttccattgatatcaagggtagagcttcagcctcttcctttggttgggattcttcaactgtttgttcaactgtttcttctactggttcatcctcatcaacttgtttttcattttcttcttcaggttcctcaagtttctgagactgctgatcagactgatcaacctcttgatactcctgagagtcacacaaaaaatataacaaaaccgatccatcaatttaggtcagaggagaaaatgttaaatagagaccacaattcatttttttattgtgccataatatag

SEQ ID NO: 16408 - DNA, 5161 bp, Cannabis sativa
aggggattagggtttcataagcatttttgggtagcgtgcctaattatttaaggcgttacagaaggagtcaaaagtcttccactcgcaaaggcccataatgagtccattttggaaatggatcagaaagccaactgcttttgatcttatgggatgttgcaagcttattctcaagttgatggcctgtgtaacgtccctggactaatgtcgcacagactttccatcatgggggtattttcatccattagtgttggagggttcagtgtatggatttggtccctaatttctagtggtactcatctcccctgaggacttacttcgcgaatctgattgcaaaaattgggattgacccttttcaactaattccttcgtcatataggctcttggttgggtgatatgtgatctttaaaattaaaaaactagaggtcccttccccggaggagatcctttacttctacagtgttaaggccaatcccatgaggatagaaaggtcaaagctggatttcttctgactggataagtgccaggactcttactgccctatttgttagatggctcacactcatgacctttgagaatattggttcatttcttttgggtttcctactagcagggtgccatctcttcggttaacctttaaacttctaggtattctaatgatttaccttgagttttccttctttttaaactctactaatttctatattcagactaacatatttgatttgaagcagagcttccccctcaaagtgttaggactaaggagataatcaagaaagaagcttgatatagggccttctcgaaagagcaattgaaggttggggacctggtgacaactgaactcctctataggttttgcttggttatgaaattccagagtattgacacagtgagccttcgaggacaacgccaacctcccaaggaagtgaaggaggcaattgccactcacttggctgttaaaatcaaaaaggcagccaaaaatgataatgtcttgaactctgattgggggttgtgccatcccaatcctctgctgcttatcctgatgtggggacaccaagtgctagtactttgggaagaggtaatggatccttgcgcatcctccatatccatagcctgagacgcatgtcttggggaatcaaggaggacttgacagatatttcttaggcataaaccaccgtagataccccatgaaggattacatagacaaagtagaacaaataattaaaagcccaagaaattcagggactcctttggatactgtcaaagtagaccctttgatggccatgtctctgctgaaatttaaggagtatggcagcttcattggtcataggggcattatagcttttgctcgtgaacaacctacaacacttcgctgaatggttgcacccacgcccaaagtttctttactagattcttcttcttgacgctgctattttccatataattgtatgacttgcaattgttccttatatttactcatattgttgcttcatgtgcatatacaccagaatccgtgatgttcaagtattggagtagccagatctcagctgctatggacaaggccaagaaatcctaagaaaaaggcaaggggaaaattaagaccagggcttccaggactcagaaaccgcgtcccccctcaacttcctcatcatcagacatctaagagattcctcctcccaccatgactagacctactacacttggccattctacttcactagtggggagaaggactctgacacatccccgaaggcctctcaggctctcgccactccgggagagcagccctcacaggacattccccgttcgagaggaaagatcccaaaaatcacaccaaacatgggggttctgatagtagtatgaacgaacttgtcctttccccaaaagggactcccgttaagtctaaacgcaagggatcaaagacttctctgggtcctgccatgaagaggataaaatctttaatcccaaacctaggggcatccaacgtactattgactagcctgctgttacaataatagcaacaataaccataacaacaacaacaacaacaataacatcatccacaacagcaacaacctgggcgagagcctctaccgcagtagcagcagactctatcccctcttcaattacagattgtgtcatctcagttatcccacggccctctcagtctcctacactttgacacaatcctaggtgcacaactcctaggcctgcctctactgatccatctcagcgcgtcgtaggggctaaggttccttcactgggattctccttccccatgagtctgcctgttctcggccatgactacctcacaaaggtatgcaagtttgctacaattttgaaaaggtgccatgagcgggaacaaataaatcttcaaaagtgggctacccggctatcttttctcaagacaactaaggttgcagagggagtttgttagctttctttttatggcccagttttggatcttgatgcagtaagccataatttggtacctaaggtgggcggagtcgtttacccttatgctccagagatattagacaacatgaaccttagtgtgagcaagcttacatccaaaaaataggttgtgagcagctgtgttgatccatacacactatcggtggctgctaagcaataggtagcagcggtcaaccattcttcctttcgatacaattttcattaccaaagtgaatgtgtgaccttttccctttattttcctttctctagatggcgttgttcgtagagaaaactgccaaagaactgggtaacatgaccattgaactatttaagttcatgctaaagttcaatccttaacaatttagaacggggccttacgtgtagaagttgagcaagtcaagacccaggctgcctctagcacccaaaagatccaggttgattgggaggctaagctcgcacttgaggagaagaagtgggataccaaataccagaagatgtacttagatcacaaggccaaaactgagcaaaagttcgaggggactgtatgctcccatcaagagcacctaagcaaggctagggggagagggataaagatgaagcccatgtgatgcttcaatttgagaccatcgccacctaaatccaagaagtcagcactctctatgaggatatcctacaaagggaccaactcattcaaggccttctcatgacaaatataagcaagagaaggaacgaaaagagtcgttgatgacacaacatcacaatctgaacattcttctccgcgaggcttgtcataaaaaaaccttcgataggagaccattgataagttacaaagtgttatcccaattttcacactttgatgtggcatcacatgttggtgacacgtggacttgattctccatacctgcctaaaagagatgatccgagcagaacactgcatatacctgcccagataaggtcctcctagccaaatagtggacaatctgaatagcatatcaacacatagcaattttagcatttgtatcgtgaagcacaagagcaatccctataaatttgggatcgtatcacatagatatggcaagctttccaaatcccacaatctgtgtattctatatatgtattatgtattcttaccaattatagatattgtaagcaaaagggaaattttccctgaagcatgtagccctataaatagtgatccattctcattggaaaaggggttgagagaattacttgagagagatctaagagagcatactcagagatttcattgcaagagctttaagagaggaatcacaatattctttgttcttaagtcaatttaaatcaaggggagtaggctattaccgaacttctcggggtcaaaccgctttaaaaaaccttgtcttctttatttatctttttaaattatatctgaattatatcctttatcacttattactaagactcactgtcgttggctaaaagcgaggtcaacattttggtactttcattgagagaaagaatcaccaatttttactttactttaaatttaatcataaacacgatggtggtacaaactcgtagaggcgtggttgatcaggtagatccactggcagtgaatcccgcactgcagacttcaaggaatgcaaaggtcccaccagccacaaatcctaaacaaccaatcacgcaaccaccaaccgtgggtcacgatgtgacgtcccctttggctagaatcacacctggtgtgcaagaaactggaaataccagttcaacaaccaatctaggtattcccagaactgaggtttcgctagcaacaaatgtccaaacaactgttggagacgacactgagatccagaatctccgtaatgctcttggactcatgcaaggccatactaatactctacatcatgatcacgaacagctctgtgctgcagtgaacctttctttcgaagagcaaaggcgtctattcactggttggagagataaagaaatggaaacgttgcgggctcaacaaggagccatcgacgactgaacaagataggccaccgtactgatacgaagtgcctaccaagttactaatcagcaaccagcgtccagcataccattgggtggctcagatgaagatctagctaggaacacttccgaaactctgaatggtcaaccgaacaatccccggtcacaggttctacctgtgggccaagcggtaggcggccaaaccttatctagaaattcgtcagaacgggttatacctaataactctgcctagactagtggttctggccaagtgctcggccaaaccaaccagtcacagagacaacctggtgcatctgtatttaatagactaagaacagttcatgatctcagggaaaatctaagtagaaggagagggttagacaaacaatatgttccaccagccactcagcccggaccccgtgctcaagatccaggttaaggagatcctaatgtaatagtggtcggccaagagaccgaaaaggttcatccgtccgtgcaggcatagttggatgaactaaagaacatgttccaaggtgtgccggtcagaagcacaatgaactcgagttggaccgagcacgtggatcccttttaccccatagatcaatgttctagagctaccccacaagttggtccaggtaaaatctacattttgggaacatgatagtacaattgagtgggagcgctaaagatcggaagagcgtcgtgtagggaaagagtg

SEQ ID NO: 16409 - DNA, 4903 bp, Cannabis sativa
  modified_base (261)..(274): a, c, t, g, unknown or other
cacataattcgtacttttttaaaaatagaatatctataaaatatattttttttttttcaaaataatgcaaatatttgcaaactttttgccttagaaaccaacaataatttccccatttttcatggggtttttacaacacatactagaatttctaacttttttactttttaactgtggggcagaattttttcaaaaatactgtgtactgtattaagttttcacggttgttttttagttgttctactgttgttttaattgttnnnnnnnnnnnnnntacggttgttttataaaaagacaatatttttgtaaaaaaaaattgtgtgagtaaaattgtaaacttttattccaaattcagtatttttgtaaaaattccatttttctttctaattttacaattgaactatccactttaagttatatgattctcaagtttgtccaatcttttctaatagggccctttttagttcttcttcccacaaaacaagtattgggcctgccaaatgtaacccatttaaactaaaacaaggcccaaataaacaaaaaagcaaaagcccaacaaacatatcaactctttttcttccccaatcatcacacaattgccacgtggcataacccaattgcacagaaacacacacaagagccacttaatgactccactaacatgatccaacccaaaacaagtattgggcctacccaattttgacccattggactaaaagaaggcccaaataaactcaaaaaacaaaaaccaacaaacatctcaactctttttctctcccaatcatcaaaaacacaaatgccacgtggcacaacccaattgaacagaaacacaaagacacaccagagccactaaatgactccactaacatgatccaatccaaaaaaagaaccaaaacctctgtcatttgtgagtttggggactttgtggcaaacgtatcttcatagtcttccacaaatgtctctaaacacaaagtaaactcacaaaccaataattcaattcaatcaccatggctttagctccaagtagccatgtttctctttacacttcaccattaccaaaatcaatcctaaccaccacaacagctactaacaagttatgtttttcactcaagaacacactgtttttgagcaattcaacctcttttggcaacacccttttggcgaaaccattgaattttgtagtaaaagccgaggctgaaaccgcttctgagagcggttccagccaaggagaaggaaaagaagaaaaagaagaagaagaagaaccttatgaagagtatgaagttgagatagttcaaccttatggattgaaatttgctaagggaagagatggtaagacttatatcgacgccattgcgcccggcggtgaagctgacaagactgggaaatttagtgttggtgatagagtcatttccaccaggtttgtttgttgtttaatttttcaattctaactattattttttttttatgtgatatgtgctcaataatgtttagtgaaaaattttacacttttgttgtgaaatttgtttgaatttgttttctattaaaatgtctgaataaaggaatatggtaatttagtttaaagcttttagcattggtttgagctttctatgcaaagtcttcaaaaagacaagagcttgatttagtttttacacatagctatacaatttttttgaaagagggcaaaataaagatttgatctttttagctcgtggcaattcaatcttgggatatttctagttttaaatttgttagaatttttctatttacaaaaatgatttagtttcacaattttttgtaagaatatgtttcagaaacagaacaatttagtttaagaaatgtgttataaaagggcactaataaagctttgatctttatagcttttagcaaatcaattttgggatagtaattttacacattaggttgagtatttttctatatgcagaagtcttcaaataaataaaaaaagatttgttttcacaagtctcagaaacagaacaatttacttttggaatgtgtcacaaaaagggcactaataaagcttttatctttatcttttagcaattcaatattggcatactaagtaattttacatattggtatgaattgtgcataaatttcccactaaaaaaatgtcatcaaataaaaaccaatatgaatttcctacacttttacacattgttgtaaatctggtttgaaatgagcttgaatttgctaatcaatagtgtgaaatctatttgaactacaattgaattttctacacaaaaatcctcaaaaaaaaaaaaaatatggcgattttagttttcgcgcaatctagtatggaaaagattgaatcaaataatgccttaagggaaaacaaattccaagtctttgaacaaaaacttgtttaaagttttcattttgtgttaacattttagttttaagatgaaaataattgaccaaaaattgttgtaaaaaattgcgtgcagtgcagttttcggggatgaaatatggcctgcagccgaatatggaagaacaatgtacacaattcgccaaagaattggtccattgctcatgagaatggagaagagatatggttagttatatactcccatatctctttctactttatttgatcataacatgaaataattgaacaaatgaaatcatattttactcgaaattttttcagggaagagagaagaggatggcgaattgaccgagaaggagatcattagagccgaaagaaactcgggtgtgattagcaatagagtgagggaaattcaagtgagtagtactaattaattggttttgttttaaacaataagcacaatttttgttattttttttttagttttgattcgattcgagtaaacgatttcagatgcaaaattacatgaggaaaaaagagcagaagcaacagcgcgaaattgatcttagagaagggcttaaattttacaagtatgacaatgtctaattcaatgtgttttgattgtgaattttgggacttatttgattaacaaagttgtcattttttttttggttttgtatagaaatggtaagtatgaggaagcattggagaaatttgagtctgttttgggatcaaaaccagatcttaatgaagcttcagtagcaagttacaatgttgcttgttgttattctaagcttaatcaggtatggtttttaattattacttatctataatactatgtgtttttaaagtactattattaatgagttaattttcgtaaatagataacacaataacaaagaaaagaaaatacacacaaattaacttattaacaagaaaagcttggaaaccaaaaataattggaatttttacaaaaatattgaatttatcacacggaattttatacaaaaatactatatttttataaaacaaccaaaaaataacaaaacagaacaattaaaacaatactgaaacaactaaaaaataactgtaaaacaacagtgaaaatttaacacagtacacagtatttttgatgaaaaaagttgaaaatttcggtatgagttgtaaaaaaccttaaaataattttattgatgaaaaaattggtacaaaatgctgtaggccctgaaatttttggagcccattgtaaaatatagcacttgtataaaatttacatataaaatggtatttttcagaatttggattccttttatgttctaaaataaaagttccttttatttggggcccaagcccaaccctaaatgcaagaagtgtagtggttatggtgaccagccagaaattaacatcatcatagttaaaccctattatataaatgtcaccctatgaacttttgaaatccgattcgagaaattcgagtcgccatacagtaaaaaagaaaaaaaaaaatatattagaaaattataaattttatgggattttataatatttgtgtaaaaatatggctctttttttttctcaaaaatattatattatgaaaaaaattcaaaaaagttaaaaaatattaaaaaaccaaataagagtgacaaggtaaccagatggtaaccagttaacttatattgtttttctcatattttttaatttttttctaagattttctaacatttttgagaaaaattcatatttttacaaatttataccttaaaacccaatgaaaatttttcatgttatccttaattatctttttcacaaaaattatcatttctttgaactagaatagctaacatttaaaattgtacctttgttgttttaacagatacaagctggattatcagccctagaagatgccttgaaaaatggatatgaagacttccaggtaatattaattatacaacaaagttacaaaaataccacaaattatatcactatttgaaaaatgccattttctaaaataaaataaaaattgtttaatgtttttgtgaacagagaatcagaacagatcctgatcttgctaccctaagagcatctgaagactttgatccattgctaaagagatttgatgagtcatttatcaatgaaaatgccattaatgcaatcaagtccatatttggcattttcaacaagaactgaaattgtactattcttctaaattattttcttatatataaattgtgtaaacttatgtaaagctaacaaaagggttggctgaggcttttggtttcagggaatcaatttgtttttaatgtgttcatattgttttcttttacttctcttgaacaaatgttgtgtagttttgaaaagaaaaatgttttttctttcattatttcaatattttcatcattttgaaaacatcaaacatagtatatatcaaccactttgtcttcaattgaaagaatgataaactggaattacttttcagcgctagttgtaagagaggtttataattttttgttgcgatttaggttgcagcaataattgcaatagaaatttctatataaaatt

SEQ ID NO: 16410 - DNA, 4498 bp, Cannabis sativa
  modified_base (4409)..(4416): a, c, t, g, unknown or other
ggcggttcttaacaaaccatcgtcattaacctatctcgtgggttcttaaccgccgagatagggtatcctaaccaccgtcattggacatatttgacaccatgtgacacacctatctcggcggttcaaaactgtcgagatagagtaccctatatcggcggttggtttcaaaccgccgagataggatagtctatctcggcaattttgaactgccaagatagggtactctatctcggcggtttttaaccgccgagatagatcaacacatctatgtcgacggtcagattatcggcagttgtgaaccgccgagataggtctatgtcgtgggtttttaaccgccgatatagggtaatttttttgtagtggttgtacttgctgaaaaactagtctgatgcctttaaagtgtttcaaaatttcaaagctgaaagtgagttgcaattatgcactaaactaaaggcactacaaatagattagggtggggaatatagaagctttacgccttttcttaataaaattggggtattgcatagacatccttgtccaactacccatgaacaaaatggtttagccgaaagaaaacatagacaagtagttgaaaatgggttgaccttgttagctcaagcctctatgccacttaagttttgggatgaagcttttagagctgctgtctatatccataataggttgcctacccctgcccttaggaaccaaacacctcttgtagttctgtttaaacgaaaaccagactatgaagcacttagaacttttggatgtgcttgctttcctaacataaggtcctataataagcacaaattggagtttagattagcaccatgtactttcttaggctatagtctaaatcacaaaaggtataaatgtttagactcaagtggtagaatgtacatatctagggatgttattgttgatgaaaattcctttccccttgctaaaacctctactactactgctacacctattaattactccactgaatttttcactactggcattataccctctgcttcaaataacaataggtaagctgttaatcccatatccttcccacattctcagtcctttgaaggttcagcttcctcttctacgcaattttcatcacatgcattctaatgagtctggccaacatgttcatattgacactcaccattttcctgcactttcaacatctaatactcaagagtctcattcttctacagatgctactgttcctcagtttggtaccacaagtgttgcagctactccatctcggcctattgagactgcaacacactctaatgttcttgttgatgttgatgtttcacaggattttgatagttcagctgctgtttctactcaacctattcctgttgagattgtagtacctgatgcagcacctactacagtatcatcctcaaacagtggtcctagcaatagacctatcaattctcatccaatgcaaactcagggcaagtctggaatcactaaacctaaggtgtatttttagagaacctcaaactccagctgaagcattacagagcttgcattggaacaatgcaatgttagatgagatgcttgctttaattcgaaacaagactgggtctcttgttaagaaacctccaaggagaacagctataggctgtaaatgggtatacaaagagaagttcaatgatgatggttctgttaatagacataaagcaagattagtggccaagggttttcatcaacaaccttggtttgatttcactgagacttttagtccaattgtgaaaccaataaccatcagagttgttatgaccttagctttagctcgaggctagaaagttcaacaattggatgttcataatgcctttctaattggcaacttgcaggaggaagtttacatgacacagccacctggctttgaagatccaacagcccccaaccttgtttgtaaacttcacaagactttatatggacccaagcaagcactaagggtttggtttgaaaagttgcaccaatgctagcttgctgagttttggcttctttttctccaaatcagatcaatcattgttcatttgttcaactcctcactctatcacactcatattagtgtatatgatattttgatcacaggaagtactgattcaaaaattgtctcccaaattgtaactgatctaaatgccaagttttctctttgagatcttggagagttaaactatttcttgggaataaaagtgaattacactacagaggggatgcacctgtcacaagaaaaatatgttaaggatcttctctgcagagcaaaaatgcagaatgctaaagcctcttcaaccctgatgacaagtggaacaaaattatctgcctatggtagtgatcctattgacaatatatgcaccagcctttgcagtcacattgggttgctgttaagcaaattttgagatatgttagtggcacgattaaacatggtctgcatctcaggagacctacatcttcctcaatggatcttgtagccttttgtgatgcggattgggttgcagaaggtcaacttctagatttgctatataccttggtccaaacttggttagttggcagtgtaagaagcgacatacaatttcaagaccaagtacagaggcagagtatagaagtttggctagtgctgttgctgaattgacttggatgaataatctattcttagaactaaaggtgtcattgccacgggttcccaccatctggtgtgataatttgagcacgattttgcttacagctaacccagttcttcacgcaagaacaaaacatatcgagctcgatctatactttgttcgtgaaaagattcagagtgaagtggttcaggttaaacatgttcctgcattgatcaaattgcagtgggtcttatatacaaaagccatctcaagcaataggttctattctttcagagacaaacttagaattgaagacctttcaattctaagtttgaggggggctgtcaagacaagtgatcaactaactagttagtaactaacttttcagttagttattttctaactgttttctgttgttccagctgagctactgctctttatttctgatgtaacaactttttgttgattgtaatctgttagtaccatttcttgtatatatacctgaactgttgtttataataaaatgagattagtctttcaatcttcaccgttctcttactttgcttttctctcttactttctcttttattcttttaatctgtactgctatggctaagagattcaacggagacaaagttaataatcactaatctaaaatttattttcttttcgtttgatttcagtttcactaagaaagaaatttgcctcttaaatacccactaaaagatcttattatttatgagatgcattgcaagacatgatcttattatttatttgtgctttggagaagcttgatcacttaatgatatataatatcaacattgtataacaaatatgaaactctttcaagggaaattgaaaatttaatgcaatcttgtaatgttaatcaaagaaacaacaattaaaactgaaactaaagtctctctaatatttcttatataatcttaaagatagaaatttcaataattagtcttcttaccatgaatgaaatgctttcttctacaatttttcacaaaataaataatctcatttgtccatggatattctattcaggaagaaaaaaaatgttagagatgatttattggcgtgttcataaatttccttttattttataggaatttgaggtaaactgtaaagagcaaatgccatgtcatgagtgtaaggagcttgagtacagcaattactattttgtccagggtgattataacactattataaaattggcttttcctatcggtttatgattgtcttttatactattttccaacggttcttaaaaccgttggctttgtgggtgtcataaaatgcagaattttaaataacggttaataactgttagaaaaagtcactttaattgacggtttataactgttggtaaaagtattatgaaaattaaattaaattactttttaatatatgtttttataaatatatataataatatttatttttattaaaagataatactaattaaaataaaaaaatcaatatattttaataattcacaatgtatacaatattattctaaacaaaaaatacaattgaaaataaataataaacatcaatattataacttaatctctaaacaaatatgtaataataataatctctaaacaaaaaaatatgtaataataatatcaatattacagatcttgttcttcaacaaaaaaaaaaaatatattacaacttaatctctaaacaaaaaaatgtctccaaccgaagtgatggtcttcttcacagtgatgtcttcttcacaataaaaaaactcaccacagtcatgttgggttttatgccctnnnnnnnnctccatttcaatgtaatctttattctttaaatatcaatcaagaaacagaagtattttcatcactcatttgtgtgtcatttgg

SEQ ID NO: 16411 - DNA, 6828 bp, Cannabis sativa
ctttcattgcgattatataatttttgattgagaaattagggaaaatgtagctaaaatttaattttttcacaggtttttaagaagggtttgtgatattatgcaatagtaccagtggggagatgaaaataggaggaggtattataagtttcactgtaatttatttagaacccagactaaataatcaggtataataaatcctatttattggcagtgcaaagaatatgtgagagaatatgcaaataggcacgtgcaacaaagtaagggaaacttagatttattggattatcttgtctaagtttgaatggatgaggaaattaaattacaatccaaaagtaaaacgtaattgaataaaacagaaaaattatttggtgaaaattactctttatcaacataatgatatcatcttcctattgactgcatatttatagagtgaaaataaaattataaacattatgggtagggttagtaaagtttttttttctgacagtttattattgagctttgtatatggtaactgtatatgattttaaatattaaataataacatttagggcctgtttggaagtgtaattattagagtagtaactaacattttagtaaatatactctattttgtttgggtgtgaattagtaattacatatggcaatagagctattaattacagtgtaattacatctaattctctctaattacatggttcacgtgtaattatataatgagacaaacacggtaaattgagtaattaccttgaattacacctaaattctgtaatggctttccaaacgtactaatgtttactataatttagacttgttttatactaaaggatattatattaggcaagagcagggggtaggtgtttgagtaaggtgtctctggggttggatcccctgctaggactaaaggctatttttttctttttctttgttaactaagaaaaggaaaaataatctatttgtgagtttgtaatatcagattatggtgaagtgtgttatgtttttccatttccaagttccacgtagctaagttatgtttgttgttttatgaccataccaataatcatttgctggtataatttattaacttgaaacatgcttgcgagatttgttgttttctattgaatgaagctatattttgcaaaatggatgtctagtggaaaattgctggccttcttatacattatatgtttttcttgccatttgattgagatggatttctattttactgctttgcatgcacagagagtctgaatgagattgtttcaggatctctaatttctttttgtatcaattttttttctccatgtcagttttttaagtatatttttatgttgaaaaataaagaaattaactttaatgctggcctggtagaccagcactagcttagtttattacttaaaaaggtgataagatattgtcatcaagtagtataagcccgtaagtgtgaaacttttatgcatgatggaaaaaggacaaaaaaacctgtagtctcatattcaaagctatagatatgtaggtcatgtaatttttttctctttggttcaatgattgttatctttaggatgaaaacaaagagattaacatttaagtggcctggtacgctaacactagcttattacttaataaaacatttgtggatatagaattagcccgtttaacttttcgaaactatgtggcactagcgtttccatatatggattatctttacgatgtttagaagttggatgttctcctatttaccttactaggaaaacacaaactgccactaactaggaaattactctgagacaaaggaatgaaaccgcatactaactcccatcagatttgataaggaagctcaccatttgaatggtggaatatttataatagattctcaaaacactcaccttgagaacaaggtaaaagtttgggcagctggtaatgttacgccttgatattagtctcattagtataattgattatgattttagaggccgagttgtcaagtctttaggtgctgagattaaatgtcttttagtgagctgcctaataatcctaaggtgttagttaaagaaacagttaggggtgtgttagtataaatagaggggctgattaattgtaagagaggaattgatttgtgctgttaagagtaaaattcactcagggagatatccaagtgtcttgaaaagcttggaaaaattgtaattctttctttgatatcaataagagcttggaaaaattgtaattctttctttgatatcaataagattcctattttctaattctttctatattggaatggaacaatagtgtatcaggtacagcgtgtttattttatcagttcattgccttaccagcatccagaaattggtgggttatagatactagggtttctctcgttctatgagtaggcaagaaatggagattcactaaactggccttatttctaagttctgtttgtttatactaacctgagcagctgtttatttatctgatatactatattctactttagtttttaattagctatataaatattaaaaagaattcgcagacacataacataaatttaagacatctgccttgtatatataagtgagggcaactaaagggagaactatgaaatttcacagattaaaatcactagcattttggatttagctagtttttcttttcttgtttcacttgactgttgaagagggaaaaataggtcttaaactgaaatgtcatttacaattttttaacgagtatgtcactcacagtgttttttttctgctggaaactcagtgctatttttatttttgtttttagtgctggctaatataagtaaaatatttgataccaataaaggacagtgtatcttaaccattaagtttgtgtattcagttacgaaaaaataaaagttggtgtatgcttcttttttattcttttgtctattccattgtagtagaaattggagagcttatgtgtaggatatgtatatagctaatgtactgtctcttgaatagctcgaacgtcgtgaataatatttgtcttttctgaatagctttaaacggtaggtgttgtatactatttcatcctaaaataaagcttttctttactatttttttaaatactaagtttttgttattaaatagataaacgtgaataattcacatgttatctttctgttgagtactaataggtataaaacattaagtttttcattagatagatgtccacaaatgggtcacatgtcttttaatatctactttagcttcttataaaagggagttatatgtctcttcccttatcttgttttacttcatatactcaattattgaagaacaaagaacctataagtttctctatatagatcatgtattaactcatatattagcatttctccatctttatgagtgcatattacgttacacttgaattaacatcttccatgaatgagaaaattagtaattgaagaaaacgagcaagggaattatatgcacaaaagaaagcgagaagaaagacttgagaaaaaaaagaaaaataatatacagcaagaacagcacgcaaataacatcaaaatgaattagtaaacacaaaaaccacatcaagtaaacaaaagaaatagtctctgtaactatgttcataccacttgaaataggtaggcaaaacaagttacttttatgcattattataattttttttttgcgaattcattttcacatgtaataagttttacttttatcaaattggatgagtgtttcgcatgcgttaagcaaagagaaataatatcattgcaacaacatttccttttctgcagttgttgagcagtgagcacttaatattcttagtattatgctatacctcgtatacagtacacgtattctaggagaagagctacaccacataccacttaattatttttagttagttatgttagtagctgactagattaaataagagaacgctgcctggacaaattaattaagtccaagtttcttaagattcctcttggtataaatagctgagtagagtttagagagagatatttatgtaaagtttagagatttaatctctggttgggagttcccaagtgactcaaatacttggcaattttgtaacttttctctgttctttatatcgatacagtaatctcttcatctattgcctaccatattatttgagctggatgtgcttgtaacttataagatataatatatatatacctatggttttttcagcttatttacaattatgcttgtctccaggaaaatgataaaataaaataaaatatcctaaatttacattggtgtcattgtttaaaagcgatgccatgcgaactctgtgttgcttacttgatttatgagattagtcagttatgctcaatcaaaagattgaagatttgttaagtggtttagattttctttttgggaattcgcaggttcctgtagctcctctgcaacgaggtgatggcacttctgttttccctcaaagctggaacaatgaaactcttgaagttggtgatcatcctcctgagaaagcaattcctgctatgattacatggacatatggcggtaacagtgtggctgttgaaggatcctgggacaactggacatctaggtaagcgttgaaatctaagtgtgtttgaatataaactacatggtgacaaagatgaattgcgttatgtggccaggaatcttatcatatttgtgcatgaatttatgccaattgcttataatatatttttgtggttgcaggagaattttgcaaagatctggtaaggatttcgctgttcttttagtgctgccagctggtatctaccattacaagctcattgttgatggagaatggagatacatcccagaacttcctttcatagcagatgaatctggtgttgtctgtaatcttcttgaggttaatgtatgtatctatcataaccttggttatgcattttatatttcttcccatttctttattattgtgctgactaaaaatgttttgattttctatcataaccttggtcgttgtgtatgtataacctgtggtagattgatgatcttcttgttatgaatttttataacccaaattctatgatttattggggacctgtacatataacctgatcccaagacttctagctcatgttacctaactaccagtgtcctcttgagcttgaaatacaaagagtacaattgcattactaacccacctacacggctatattgtttttggtggtgcttatatttatcctaatcatacaagtgaaccacactctggtgcatttgggcgtacaccaactttatttgttatgctacttttatttgtcagagaaggcaggggataagaaatatctgtttgtatagattacctactctactttgaattatgtcaaatacgaattgaattttcgtaaacttttcctgctttgtataggattatgtaccagaaaatctggagagtgttgctgagtttgaggcacctccatccccagaatctagctatggtcaagtatttccagctgaggaagatttcgcaaaggagccggtgattgttccatctcaccttcatctaactgttcttggtatggatagacctaatgaagcttcttcttcttctccttcctcacctcctaagcctcaacatgttgttcttaaccacgtctttatagagaaaggttggccttcccagtctgtggttgccctgggattaacccataggtttcagtccaaatatgttactgttgtcctctataagcccctccaaaagtaagttatcccgtttttcgaaacttacctctgtaaagaaatctgttagaaatgcattgtccacataaatctgtgaagctaatagttcgcgtttttagaacaaacaaatttcgtgtcgtgtttttactgcaatgcttgatagttttttttacttacgtttttcttctaattggatttctgtgtgtcctttctaccaattgtaaaagtgttttcgggtcttagcttacatgcacttttttgctctctttgcttattatttattttacggggacacaacaatactatgaagaaaggaattgcgttcagaaatgctttgaacaaatgtattaatgctatcagagcctattgtgccttgaatcgatacctgattacacagattgttcaaaagctcagcacgaagaactaacggtgttataagaatgtaagtaaaaataattcacattgatttatttatttttgctttttgatgccacacctaagtttttctagtccagtaaaagggtttcaatcctgacatgggttttgttttttttgcttttttttttctatccttttctaaaatatatattttaagtcaaattgagaaatactcatgtatgttatataatgtggttaacagtgctgttgttgtttttgtagtttcaagtttccatttagaatccctataaaagatttgtaaggtgaaagaaaattctgaccgaatatttccaaccaccataactgttgttaatatttcaaaagcattggtataccctaggttggccatgcaataaaattatctgaagttatttttattatatggaatataatctgtgtatttggttggtcatttaaaacataccagaattcatacagcatagcatatcgaagcaaatatatgggtgttgaaaagtacatagtaggagccataccatcaaagatgatagacatgatctaatattttacttgtttagaggaacaaacaatcacgtgctcgatttctacggctacctttcttgcgatctgatgaacccgaccttgattttctcacctcttccatcctcttctgcctttttctgcaaataatatatcaatagttagccaattctaacaacaatttttt

SEQ ID NO: 16412 - DNA, 2875 bp, Cannabis sativa
  modified_base (2813)..(2814): a, c, t, g, unknown or other
atgagcacatgagatcatactaatatatcgttcagttggaagaaataaaaatgagaataaaaataaaattgaatcaaatttaaaatgcataaaaaaaactgacaattttttttctctacttgtattggaatgatcttttcttccattttaaaatagaatagtcactccaccaatatgatagaaaaattattccatttagaataacattcaattacttaaaaatgcaactaaataaaataatggaataaaaattgtttctttttcattccattctaattcatttaatctgaccaaacgctacatgagagtaaaagagtctttaatctcaaatagtgtccttctttggtctcatagtaacaaaagatattattacaagcagggaataataaacagttctcatgactactgtcttctgttgtggcggttttacagttgattctttgacaaaagtggtgatttttttgacactttttttgtccatcttcacctgcaagctaatacatatacatcccagatacacagcaaaatttctcaagccaagaactcagttcaaaagttactttggacaaagtttcttctttgagacttataataaggcaacaatgcttaaactcccaaggggtttaccaagtggcaaagatgacagttaggatgtgtggtaaggcatatggtttccatgtttgattttccatacatcaaattctcgaggccattgggggcaaactctgatggacaccataggcctaaggttttacttatgtgagaaggggtaaacaatgctgagttggctagtgagagtcttttggtgattttgtgtagggtgagctgccttttgttgtgtgagtgaagctagaatcggttatgcaaagattcgagtaattctctctgcatcatggggagcttttgctctctacttctgtaagagaccttggtctcaagttttccctcgaatgaaataacagctccccatttcatctctctcaagctactgttctattaattactgttgtgtgtgaaattacttactgttctgagtttattgcagcaggtactcatcagagtcatggttgagttgttagggcttcgagggactaggttgaagtgcacacaagttagtccgaaatatcacttatgcagcagctgctactggattcatccaccttctgcaaagcttttcctccaccctctccgccacatctaccttcccatgtattctacaagcacccaacaaagcattccacaaggcttcgtctaactctattttcatacccaaaatcaactcctctgcttcctctactcgtccagccctccctaacatgtccaccatacatgtataatgctccaacacaggtcttattcgaaacttctcttccatcatattgaaatactctttccccttctctataaacccgccatgactgcaggctgtaagcaccgtcgtaaaagtcacactatctggcctctcaccggcctttaacatcatatcaaacaatccaaacacctcactaaaactcccatgcataccataccctgccattagtgcagaccatgaaatctcattcctcagaggcatttgatcgaacactctacgagcgccaactaaatcaccacacttggcatacattgtgatcaatgcattcgagtttggcaagtctaagccaaacccattaaccaaaacagctccatgtacttgtctaccgagccttaaggccgacaaagcagcacaagatttgagcacaggaagaagagtttggtggtcaatgggtttgtgtgcaagaagcatttggtgaaatatatgaagagattgggagaaaagattgagagaggaatgtgctctaatgagggtgttaaagaggaatgttggttggcgattggcgaaagagaagagaagatttgcttgatgcaattgggcacaacaagcataagaagctataagttttgttctaatgaaatcatgacttgaaataccaagcatcaaggtttgagcatggatttgctttaggcttctgaggttcttagtggaaaagctaagttcaaggagattggcatagaatggtatgatattgaataaagtcataatcttcaatcctgggaagaaaataataacagatgatatatatatatataaatatacaatgtgtaatctgtaatatgcaaatccatgctcagaataatcagaataagaacaaattaactgattaaacaagcttaatatgcaagaatatagtctggatttgatgttcttattcaaggtatttatgatcacagtagtatctcccaaaggcaattaagcacataccaataataaatattgaactcattttcatcataatgagtagaaacaaaacaatttcagtttcagatgcagatgcagatgcagattcaaagaaaaaattgaataacataatatatctatatatataacatatacacagagaaagatggagagattaaatgtaccttttgtttgaagccgtggcaccgtgacagagctagtccgagggagataaagttgctacctttttgcgccagcgccgtcgctgctgcgctgccgtactggtttttgcatcgccgaggaagatggagagattaacgaagccgccaaacggtcgcgagagagggaaagattgaataagtatgctaaattttattttaatagaaatttaaatggatattttgcttagattttattttgtctttcgatataatagaaatagcatttatggcacaattttttttaaaaaaaataacatacatatttattgtaatagaaatttaagggctcgtttgtaacgccgtattaggtcgtattnnattgtattgtattatattgaatttgattgtatatcatatttttatataatactatgttaaa

SEQ ID NO: 16413 - DNA, 3097 bp, Cannabis sativa
gctaattgccttttctaatccacattactaaagcggtcattacattatcatagatagatttttattatattttaattttttttttttaaaaaacgtgatatatagatttagagtgatattgtgatctatcattaattaattaataataaataaatatttataaacctaataaaacattaaaaaaataagaaaatgaaacagagaacaaatagtgttttttagaatgagaaaaaataattaactttaataaaaaattacaaaaaatgagaaaaaagaaaagtactttcaatcgtttttagattgtcatgtcatcgcatcatatattttatttatatatatatagatagatgctttaattgagtcttataataatgtattgtggtcggattatgtaaattgtattcggtctcatttagtagcaaatgttaccgtttaataaattctcactcttttttttttttggagttgtattcattatttttggtgttagtggttgagatatttctcctcaaataataataataataacaaatacttatatttggtatggaaagaaaaagtatatagaaaaacacttaatttaatacaattttccatatcaaatatgaaaaattaattttttaattaatttatttttacattcttttcccaaacgtatttcttattttttcttatttcaccaaaatctaactgtcaaagtctagcacttgccatagatcaacgctatattggtttgtatagtatactaattgtgttgtgttttattgtattctatgatattatattgggttgtattatattgtatagctagggaattaagccgcgcttcgcgcagatttaaccctagttttgtatttttttttactaatttaattgtaatataaaaaaatgtaatattttgatgtgggtattataaataatgaaaaaaatattgaaattagaaatattattaactattgtgaaaattatattaagtttgcaaaattataaaaattaaaaaaaaaaaattagatgtctttacaataaaataaatttaaaaagaagtttattgaacggggcgtgtaaacaaaaattgaatgccttcccacaaacataaatataggataagagttgcaaaagggaccacacaatatttctgcttttgaaaactaaaaataagaattatataaaaatgttagtgtttgaatttttttttgatataaatatgtacataaaaagattatgttgaacaaaattatggtgataggaattgtgcaccttaaattgtaattttgaatggaagttcatgattcatgaaactacttttttcaacgatgatatttttttttgtgttactgtttttcctgttgattaagcaaatagataattaaaatgataagtagagtatgaagtcgagtttgcctttgtaatgaaaataaaagtgtgaaattgtgataccttttttttgcgggatgatgagagagtattttgaaatacttctttgtacacaatattcttgatgaatgttgggtcttccacctcagcatttattataatcaatccttctcttgtagtgactcgagacactgcaacgtataattggccatgagatataatctgacttgttttagcgattgtccttgacttttattgatagtcatggcaaagcatggtgctaacggaagttgtcttctattaagcttgaatggccacttcgattcattcgaggacatgattattcttggagctgttacattttgaccaatgtttgttcctcagatgatatcacctctaattgaccatttaccaaggcgagtgacaatcaatattgtgccattgcataaaccttctatttgatttagatttttgaggagcattcctggagcaccttcatttaggtttatgtcatgatttgggatgccattaaatttcaaactatgcaataactcaattggatacaaaagatcctcttcatttgtgtttatgcttgctttgcatatactgtttgagcttaaataaatcctcccttcttctggtatcatattcataatcatctcattcaactcatggaccacttcattttttggatttagtattgctctttctttcaaataggttgagtcactataattatgcaatagtgaagggtagatagcttcgagaatagaattcatgggatcattagatgggtttttataaattttaaatggatttttaataagttctttatcaatgtcatcatataatgaaccatccccaatctgcaacaaccatttttcgaaataggctattttagcaacctcatattcatcgacacttccattatagagcctcatattttgattcaactcatatattttaaaaaatggccataggtaggaagaattaagagatgcgtcagcaatatctgctcttgtaccctttggcacaactggaaatatttgccgaaaatctcctccgcatactattgtaagtcctccaaaaggtttggtagtgctattctcataccttgttcttagaatatctcttaaggacttatctaaagcttcaaagcagtacttatttgccatgggtgcttcatcccaaatgatcaatgaagtcttcatcaggagttcagatagtagggtgtcatgtcgaatttcacaagttgactcagctgaaacctccaagggaatatgaaaccttgaatgagtggtcctgccattaggcaataacaaagctgctatgcctgaagttgcaactggcaagactattttcgattctgatctaagttttgtaataagtgtattccatagaaatgtttttcctgtaccaccgtgtccactgatgaaaaataaatgaccttcattctctactgattgtagtattgcttcataagctgatttttgggaaggatttagaacagaaaatgatttgtcatggaggatttttcattttctcaatcataagccaactcttcatttaccaatctattacccgattctctcatcaaagacgaattaggcaggggcagtccatctatgtctttcaaactttttcccatcttttgcatgatactttcaatttcaaacaatgtgtatgcttcaacttgtatatcatttagttgaagatccttaat

SEQ ID NO: 16414 - DNA, 2269 bp, Cannabis sativa
ctatgcataaaaaaatcaaaattttcaaaagaaaaagtagtataagtacccgtttattaaatgtaagttaatgagaagaaatcaatagggatgggagatgaaatgtgagagttaataaaataaaaatcaaacatactcttgtgtagtcctcatcatcttcttcttcctctttgagttcgaaccagaagggagagcgcgatttcagcctagaagagggcggcgagatttcagcccaggcggatgacttcgaatcagacgggactgtgcgactcactgcaccaagatcgtcttttctaaacttcatatctctatacaaaattctagatctctaacttgttgagatgctacgaagacgatcgccactcacttgagcaaagccaataacaaacgctaaaccattttgtttcgctgctctgattgcttcaacaggaatccttaaccatcttgttcgattggtggttgatgttgagctctaaagtcgaagacgacgaagaggaaaacaattttcagattccgatagtctcgaaaggtttgctttttggcaacactatggcggagatgggcgtagaagttggcggtttctaagaagatcgagaagtaaatttttaattgccgcacagaacaacgtacaatctaagtttaaaatcaagtaagtaaaatttcatttagggaattaggtcagagtttgataactcagtcttcgctcttttctctcctagtcttcactcttttctgagctcgctctttgtagatttttgtcaagactctcaagggaagacatagtaatgttcattcgagctgggttttgcagagaaaagggttcctaaagaactagaatcgaaggcgtccatggaagaaattcctaaggtacgttttgggtcattgggtataagagaatctgttttggtttagagagtgtttgatattttcatgtttttgtttgacatttcgcctcgttcatatttatctattttccttgcattgttagctatcgatgcatttcgatacaacgcatatgttaggtataagactattaagtcagttatagttgttgattaatatgttttcccttttcagtgtacgggaattcgccttctcaaaatcagttagttaactgggaatttgctatttctcagcattcgactttaccaactcctttacaccttaactctctacaatcaccaccgttaattttggtagtctgacagctgtggatcaatggagaataccgatgtcttcttgggcctccaggattttctggaacgcatgcgcaatccctccgctgccgaatttgtcaagtctatcaaaaggtcattcattcactttattcaatgcaacaatccgttttctgttttggttgaatttggttaattagagaggcttaacggggatattagagactaaagatttttggtttgtttgtgttttttttttttttttgagagcagttttatagtctcgttttcgaacaatccacctgatccagagagagatagtagtgccgtacaggagtttctggctaagatggaaaatgatttcagggctcacccactttgggctggttgctctgaggaggagcttgagagtgctggtgaagtgagttacctcttacttttacagaatcatcgcgatcatcattaccattcggcatcgtattttgatcattgctttaattatctaatgctcgtttcttttgttaatgaaacttatctagtatatagacagacttcgttagaagtacttgaggtaacaagctcttaatttaggtaacatattaatgtttgctgatgctgggttgtcttgaaaccacctaaagggttgtcccatgaagataatgaatgacaaaaatgtagagagatgtcttgatcgtaacatctgctggtactctggtagttgaatcttgcataccattgtgggcacagtggtttcattagcatagttttcaaaaattaggttttgttgtggaggtaggtatgcacatatccattttgatattaaggtatgtgcaactaacaaaacactttaaagtctgaaaaggaaattggagcatttggattctaacaaatggtcctttttccctttctcactccaacatcccatctcatatttcgtttcattctaaggtatccgagcatgatgaagattgtagtatttgcttccatgctgacagaactctaaattttaggagtatacctagctaagttgggcaagaaccatacaactgtaactgtaagcactgtggtattggtgattaaacatgaagaaattg

SEQ ID NO: 16415 - DNA, 4385 bp, Cannabis sativa
aggtgagttatctttttggaggtgtaaatctggtgcacgatatgtatgtacttggatacttccgctccaactggagtagatcccacttcctatttttgttaacagggattgtcccagtttcagtttggtccttgagaatgattgcggaagtgcctaaataacattttcatgtgtattttctttattatatctgtcagttcatttttttaattaatacaaggccatactttaatcataattgctcctagtacttcttttggtaatcttttttgctatgtatatacttccatattgaaaatggcatacaactaactcttctctcacatactaattcaatagcatttcaatctatttttgcatattgaattcttccatctctgtttattgacatcttttttttccccctaattgacaggaccagcaactcgtgatagagtgtttcaatttcaatagcaacggaaaacatgatttgattgggtaaactttttattttgtcgaccttcatggtttctggatttcctgatttgctttagccaggtgctaaaaatgcttatttcctgctttatcagaaaagttgaaacatcattagcagacttggaaaaacttcaattcagtaagcaaggcgaacagttatatttaccgacagctgtcggacatcatcacgagaacaaggttcttacaacataaaccatattttctaaaccctgaacaatcctttgcttcttgtttactaatttctaactggtaatgcaggtattaaagagccggttatttgttgacaagttttccgagagtgttcaacataccttcctggattacttagcagggggatttgaattgaactttatggtcgctattgattttacaggtctgaattatatatcttctatactcaaaggcatctagccactgtagcttttagattcttgaatgcatttttattaattaatcatttcccctatttatcagcttcaaatggaaatcctcgcttgcctgattccttgcattatatagatccctcaggacgtccaaatgcataccagagagtgagaaatgggttccgctttgtttacttttcacaagatattttttttaaagcgtccctgtaataagctgcctaattgttattcaggcaatcattgaggttggtgaagtggtacaattttatgatacagataagcgctttccagcttggggatttggagcccgcccaattgatggtccagtgtctcattgtttctacttgaatggaagtagtcattactatgaggtcaattggttaaagatccaagcttgttctttcatctagatgtttgatctattattggttgaatacatccctttactcaccatacatatctgtatctcaggttgaaggaattcaaggaattatgacagcatatgcgggtgccctacgtaatgtttctcttgcagggccaactctatttggacctgtgattagttacgctgcatcaattgccagccagtctcttgcagatggtggacggaaatactacgttctgttaataatcactgtaagagctagtgtttcacatgaaacattcttcatttggtttcttttctttgtagattctaatggttgtctcggtttatatcctaagctattataatttataattgtatttattttagccttctcattatgatagttcctttctgctattactctattcgggttataaaattatgctatttattgcagaactacattgtattcttacttcataaaataccatttctggttcctgagctctgtttctgttttataaaaactgaactcttataggatggagtagtaacggatctccaagaaacccgagatgccattgtaaaagcatctgatctgccactttctattctcattgtcggggttggaggagcggactttaaagagatggaggtatctatgccagtttgcttggttcttgtctagatatttgcaaacaaacaaacatatactaagtggttctattacaaatcaaattgcatacgaagaaactgatttccttgctactaattgtctgatctgctattttgtacagattttagatgctgacaagggaggcagactcgaaagctcatcaggacgtgttgcgtctcgtgatattgtccagttcgttccattccgagatgtacaaagtaagtttcgccatccttcacatttaaatcaaagcctaaaataagtgtcaaaaaattgtttttgggcagtggtaacattccttatgcaggtggagaaatttctgttgttcaagctctactagcagaattgccatctcaatttctgacctacatgcgaaccagagatattaaaccaaatgtatgatcctttaaattgtacatatgaaaatcaatttgccaatatttatcttcatgcatttgggaaagaaaaaaaaaaaaaaaaacttttctttttaatgctgcatggtaaggtccctgtttttgttgtggagaatggttttatttcgtatggtcaaacatttggactggactgagataagatggctgcaaaaaatttccatggcctttatgaagacttggcaaaagttctacacttaaatgacacgacgatgtaaaggattactgggacagcaaacattgaagtttaaggataagagaaaatgttttaattctctttttgaaaagaaaaaaaatccaaaaaaagaaaagaagtgatacaaaatcataaattcaggtcttgaattttctgaaagtcaaattttcaaagttgagcaacagagaactctcctctactcgtctatttctcttgtacacaacaactttggtgtgcatacttttttttttttaaatgaatttgattgattgatccatggtaagctgttctgttctgtcattacttattagtcaattaaagaacaattaaagatgagataaattctattttggatcttttgtcttgcaaaagttactaatagaatttttattttgttaaatgataaaatggattttgtttttttcaaaattgtacaagtaaggtcatgaactgagtttttattttaaaaaatataagttttattttgttatttaataaaataaatggtccaatcgataatttttgtaaaatacaaagtctaaaataatatttacccttaaagaagccatactagataagaaaccagtgtactgattgctcattctgtaaataaaatcccttgcagcgtttattaagagattgaaaaccatgtacttcattagtaatcaaaatcaaattcagaattcagtgtgtgatgaagttagtttttcaacaaaatcacattcatcattttcttttttttttaaaaaaaaaccactttactgtatatttatcttattttgtgtgcaaacataattaagctttaaaattacttgctcaaaaacctttgactttcattctacattatttttctattaaaaaacaagcaaatcattccttaaaaatgaaaaatgaaaaagaatacgttgactttgtttttatgaacgtgacagtgtaacgttgttgaccagcacctcccttgaagaaagataagctttgacaaaagagctaccagttgaaagctctcaatggaaacaacaagatattgtatgaaatatgaattgaattggtgcaacacttgatgagaacctcaagtgataaacccaattttttaataaaattagcctaaactaacttgtgaggaggaataaaaacataaaaataggaatatatgaaattaaatttaaatttaaaaaaaataaaaaaattattaataatctttctttctattttaaaatagaatagttattttattaaaatatttaaaaactactatattctatactttaaaatacaagcaaacaaaaaaaaaatgttttaattccatttcatttcattgctatagttctactgtaaaaaaaatgtgatgaatagtttcttatacaataaagtttcttataattattcttttagtgtctagacaagttgtcaaatcacgaagaaaacaaggcaagcgtttgaaatattgaggagtaaggacattaattatacaatgtaattctaatcaaagacttggtaagtatggagtcaattcttctaatccttgatttatgtcaaaacacatcatttgagttaaccgggatttgcgagaaggagaagaatgtctctgtctcacatatcgaaaaaaaaaaggacaatattcatacaaatctaagaactggactttctaaaaaaaaatgaaaaaaaaataattggacattaactggaaaacggcagtaggctgtaagaaaaaacaaatctcaatacaatcctaatttttttatatatttggataatgggagagagagaggagtgttttttattttaaattttgtttgatttgcaatttcaaata

SEQ ID NO: 16416 - DNA, 8151 bp, Cannabis sativa
cccaggccctccaacatacacgccccccctatggccactggagctagcctcaagtggttgattttttttgtaatattataatgacttgcaaccaactccaaaaatgaaaccgttgtagtcaaatcttttatgtttagatttcatatcatttaaatgctttcatttcatagctcattggtgacatgcatgtagtagtgttgtaattctatatttggtttttttttttccctatcttttgttggataaattataaaattatgactttttcttttattacaaaaattaaaatatattttttttccttagtggatcgtggtgttgtgactttttcttttatcatatacataaatcatcacttacaaaagaaaataaaaatgaatttgataaatattaccacaattcaatggttacatatagaggtttttataaactaattaatccaatctaattcatatcatccaatctaatttaatttataaagtgtgaatatttatactttacagattagattagattcaaaaatttaaaatctatacttatacaaattgacaagtaaaagtagaagtttgatgtgtgttaatttacaagtgaaagaacactaataaatattaatcaataatttgcaagactaatcagtaaattgattttggatttctaaagtttcaaaaatatttttgctgctgattaagtaattaataaatttcaacttttagctctaaattatcagttttattagttttcttagccaaacaaggcctaagttaagtagtttaatgtttaactaattaaaaccaagataatccttcaaacaagctgtctaatattattggtgttcaaatagaatttttaataccaaatataatacacagatatctatatatataattatctgaaaattatctttatttaacaatttacttcttatccatttaatattaagaaaacgagaataactaacctaactcctctagaatctccaattcagctcatttgtttccggataatttttcttttttaataactaatcctttatccattattttatatacataaaaataaagtaaaataatagccaattaaaatatttttacagtcatcataagtataatttagtaattttatacttcttttcataaaaaagaggttccgaattcaaatctctcgcaatattaattcatgaaagtaaaatttaattgcttgtgattgtacattcaaatttttgttaaattactttaattgaagtaaattatttagttgaacacaaaactcaaataaaaaatggtgaaaagttagtttaaagttattaatatataaattcatattattaaatgttgaaagtatgtaagattaatcattaatcttattagaaaattttatggtgtaatcaccgatatgttcttatttgtttcagtatttaagatttttaatctattttttttttcatagttatatattgtagttatttaaaaatatcttacaaaattttaaaaaatttatggtatgttcggtaaattttttttttttcagtttagattaacaaaattttgtagtttgttttttggtttttgattaattaatcaaaaaacttgtttttcaattgctcccaacaatatcttaatgcacaaaaaataagatttaagcagtctactatacacatatttttattatatgaaataaattatttaaataatataatttatattataaattatttaaaattttacaaattggttataaaataaatacaatatacacaactataaaaaatatataaaaaaaaattctgataaatatccaaaaaaattacttccaaattccaaacttatttttattaaagggataaatttgttataccaaacaggtcctaaatccaaaacgtcatatgaccctgtctctgatctgtcacttggggccatttaaataaataaataaataaataaaagtcaattattttatttttattattcctttcatattcatattaatattatttctccatatttagtggttgccttttgccaccttcattcttttttttttttctcacagaaaactcttcttactttccgtcactttctcgggaatgtaatgtgtttttctcccaactgatatttttttcttacctgtttttaatttatttcttcttcttctctctgtagtaaagaaaaggtcttttctgttctatctcgttaaaaaaaaaaattgatcttgctgagaatggacgttgacctctgccaatacagcgatttacacccaccgagagcgtgggtattgattgacttgaaagtttagggttcatcaattattggtctttcggcatttttggtgaattgggttttttttttaagtaactaacagcgattttggtatctgggtctgaagtgtgtgtgagagaattgaggggtttaagattgttgatggatacgcatggtaaggattcaaatggctgcaaagatagcccttcagtagattctaaggctgagaaactccttaatggagtagatgatgatagtgattgcaactctttgttgcctccccggagaggtgggatgtctagaaaatcagataaagtacgacgaaaagttcagtggaatgataggaatggggataagcttgctgaggtggtcgaatttgaaccaaggtaatcgatcaatcataaatctttcattcaatttcttcattatgtgcttgttttgtttttacttatttctaattttattatgagctgacttaattgtttgaaacatgattttggggatcgaattgggtatttttttctctaaatagtgcatctatgatgaagttttatactttcagttttattgttttctctttcaaaattaagaaaaaatgaaaattgtaaggactgaataaatgtgcatttaaagatcttgtatggcagggaaagctttggacaaactgctaatgtggtttactttgtttttatttacaaatagtatgtttttgagtaatgttgatttaccaaattatagtccttttttacttgatctggtttacaattgtaagcttttttcaatgatttttaagctataaatgataacagtccaatttgctttgtgcttacacaatagtatgtggattgattgctcaaatcacttattaggtgaaaaaaaaatagtgggagtagttttcattctgttcaagtttgaaatttgattcactttcctaatacctggctttccatttttgggttctttgtttgagaggcaatttctaatattctgataaagtggttgtagttggtatatttgtggtgaaaagtggcccaaaaaaagtttctaggaatttagtggtgaaattaagggcagcctatggtttcataaggcatgggtctttcaaagggcatcagaagaatttggaatggtatctggttttggatgttggatgttggaattgaagaaagtgcctatgtcagatttttgacttggtgctggtttaggttcaaggttttgaaactttctaataagaatgtgggtggacacaagatcattttagagtcctggcttgtaaatttgctggataatactgataaacttataattggttatggagatggggttaatggcaagtatcaaaatttgaaggcttttgctcagctgaatgccttttaattttccctttgaactagaaagaaataagctattaccatctcctttctagaaagctttctgcttcccctgaatatataatgaatatcttatgtttatagcttttagataattgtgactatactgaagaatatgctcatagaatcttagagttacaattgcactctgacccacttaactaattttctagataggctacttagatagaatttaacatacactggacttgtacttcagtctttttgtgaaattttattactttggtagaaagtatcgtatgataaatagtaaatgacatgtttcaggagtttattattaatgacatgactagttatgttactgtcttagcaaaaaaaagagacagtcacataactatatacaattctaatagtttccatcactatggtggaataggtattccttaaaaaaaattagaggaaagaccattccaatacacaaatatatatttgtttatgttaaatttaattcactctatttctgtttttattctcattaccattctattctattgatttcattactcaaccaaacattacatgttgaaaagttgagagttgtgtacacattcttcatgaaatgcaaaaatgtggactgctaatgaaaattttgaaaaaatggatatattatgttatatatatacatgctggtgtgcataggaaactggtgagaaaattttattctgatatgtctagaaatcatttatcttgataaatgtaggaggtgattattccctggcatgatttagcttaagtattgaaacattctattgatcttatgtcagattatgatttggctctcaccactattgttctcttggtgtattgcagcgatgtaagtgactctgaggacgaggaatcggattcttgcatatgcatcataatgtagataacatttcacttcaatacaccagtttatcaggaaattcagcttatcaaacaatcaggcatgctctacaatctacaatctgtttcgacgagtttttttgttttaattatacatagtggcctctcgaagtatagacaacaaagacccgaataggaagacaacattgttcagatttgcatccaatttcagttatattcttgcagggagattcttccaaggtatcaaaacagacaaggaagaagacaagaatgtcttccctccatgtgtaacatatttactgataatgagctctttccctgtttcttttactacttatctcggtatgtattttagtatactataagctcgttcgccataatacttcgatatatatgtttccctccctttcctccattgcctcagcaccagaaaacacaaaatgtctatatatatatttcactgtatatgagtttcaattttgtgtaccaattattgttgtgttcccagttgagactgtttggccatttaagtaatatattcaatccaacagattatttatgccatatagtttggtgtagaaagtcaattatttatgtttggacactactgaaaaagaaaaatagtactttgtttgtttccatctttgcaatacacaaattttataattacacatgtagtaaaaaacttgttcaatattcttcagtctcttatccaagcaataagtctccaaaagacagtgaaaaatgctctctttcacacagacaacttcacaaccaaccaaaacctatcattcacgagacaatcagaagatcattaaagacaaaaacacagaaaaataaaagcacaaaacacaagcaatccaaacccataattctcactcccctgttggaaagttgttccaacaatatgacaaaatatcaaactcaacttgctcttttccaaagattctttctttcctttttgtatctgaattagctagctgtctttctttgtcctttgaaaaaattcacactagatttaggctaagtagtgagtacctagataacaaacaacactatgcagaccccccaaccccaagaacttgagctttgtagtgcctgtttctttttctttttctatttttgtgtaagataaaatgtccagaaagaaattcttgaagaagggtttatattgtatcaatcaaaatgattgaatagttttagaagttaaccaacttgaaaggctggaatcaacagcaatttcttgcaaaagaggcttggattggtaatcgaaaggctgcttctgctgctgctgcgataaacaagaagaacttgattgtcgaaataattgaatgttctccttcctttgttgcttaagtggtgctgtttttgccttggcttctctccattgattgatattctcaactggttttagaacagaatgaagtgatgtagtagtactattgattttctcaccatctgtattttcacaagaaataactttcttctctgaacttgtatggcttactctttcgatatcaatatcatcatcgccatcataatcatcgtcttcctcctcatcatcattgtaataatcatcatcataaagatcactgtcctcaaaagccatatccatatcctcctcttcctcttcatcataaaagtcactgcagtttcggtatctgtagtttaagttaaaagaaccctttgaagtagacaagatttccattttctcatcatgaatctcttcttctttctccaagaaattatcataagatgttgagactggttcataagtctgcacatttagattaaatctaactttctttctgattttcgagctcggtttttgttcttgttgttgctccttagtcttgtgcctataaaaacaacaaaacacaatttataacaaaagagagaaagaaagaatctcacatctttttcacattataatcttcataaacaaccattaacctcaccttggttcaaaatctcctacagtaatagggttcttatgagaagaactaagtctaactatagttatggatgatgaatcaagtggcttgtaactcccatatctctgcaacaacaacaaaagagattatattcaataaaataaataaagggtttaaattcaatatgggaattaactaagaaaaacacaaactttacttgaattgagttgagttagtattactaccttatgagctggttttctaatctttcttttatgggaaaacccaaaacaagcaaggaaacaccccattggaacacaacacacaaagaaagagagaaagacagagacaagtatctcttatggttcaaatttcaaaggttgttgttgttgtacattttcatggtggtggtagagagacttgaagaaataattatagtttaatagaaaagtaatattatatggcttaaaaattacatttaaagcaaaaagagagtaaaagagaaaatgggttttgtcatgaagaaatttaaacccgttttggctccaacggttgttaaaattagagagtgacgttgggactttatttatttatttatttttattataattatgattgtatatatattaaataaataaaaaataaagggtagggacaacataaacagctttgtctgtcaactgaatttttgcaaaattgcggctctgtcttattttaatttttattattttttttgttggaatttatgtaagacagagaagttaatttttgattccatactaaatttatccgttgggttggccagctcataagtttagttataagttcattatttatatatttaagtgttgatggttacattaaatgttcattaaaaataataatttgaaagtttatggaagagtgtctatgacccaaatgggatatttagtgggacagctttattagaggacaacatttaaaagtattttaaggtcacatgcaaaaatatattaactaaaacataacttacttccactcaattggttttgtcaagttaattattataaaaataaaacatttacagatcaataattaaattggattttttacagctgtaataatttttgaatgatataagaaaaccgctcctcaaaaaagtgaaaaatggaaaggcaacatataaatgattgagtaatttaaaagtgaggatgtggtgacactaaaacatgaattttgagtaacaaacaataactatatcaaaatgaggtttactatttgaaatagtctcaccttgttattgtaagaaaagataatattttacataagataagatgcatttttcaatttgatagttaattagttttgaaataaaatttcatatttgttatcaaatacttactttattttacttttgtctagcgcacttttaaattctaacgtggtatcaaagcaattaaaaagcttctattttttcacatttgagatattttagtcaatgtgcctcaccttttagtagaattctttcaaatgtcatgtttagtcttgtggtctcttaaatgtcgttcattacacttacacttttcaagaccaaacgttaagagagtgtatttaaaatagtctcacattgctactgtatataaatataatattatatataagatgaaagggatacttctcacattgtcaattagttttggaaaaataattgagacacacttcata

SEQ ID NO: 16417 - DNA, 7538 bp, Cannabis sativa
aaaaacaaggaaagggatacgtggaagaggtgtaaaggagtatatgggcccaccgcatattctccttaatattattattattattattatttctgagagggaaccaaaaaagaaaacccgggtaaatcctcttaagtttcccgccaaactattattcccaaactaataaaatataactctagcttcctctgtaatcttctcttctctagtttatggtttccacaggctttgctcctcaataaaaatggagaagacataccagtagactacaaaaatcccacctttatcaaaccaacaaacaagaagaagaagaagaaaaaacccacctttattacttattaactttaaccctaatcataacccccatttctcttctctctttctgtagagtttgagtagttgaagagacacaagaacgagaggatgttctactcccatacttttctggctcggaagggacccttgggaacagtgtggttcgctgcccatttgcagaacaagctcaagaaatcccactatatctccactgatatcccctctactgttggtttgtatttttctaataaatttttaatctttgagatttttgttttcgaattggtgattatggttatagatttgttttgttttcttaactaaagcaatgatctttttgggtatttgtaatgactttcgatttttaatgtttgttttagaacgaatcatgtttcctgaggttcctcttgcactaagaatgtcaggccatctcttattgggtattgttcgaatatactcgaagaaagtccattatcttcacgaggattgtactgctatttttactagcttgatgaaggcctttgctccttcttcttctctagaccttactttgccagatgataaaaggcacgcacctgttcaagatgtcactttgccaatcatattcgagctcgatgccatggatttggattttgatgttaatcttgatgggtaagtcttgtgccccatcttcttctttgattcatttgttgatttaatcacacgtttcatgactgcggtttctgcatttgttttcctttcagggcatttgaccaacatctcaagagttatgaagatatcacaatgacagattatacaagtgggattttgttttcattgttattgtttatatctcccgtttttattaaattttagtctctaacgttttcatattcttacattgcagatcaaattccaatggaaacggttttattctctttaaatttacatgaggtatctgtataacacttggatgttttatattccatattaatatctgtggtatttgttttgatgttactttcttcttcttttactaaaacttggttcttttcaggatatgtatgatacttcacacccagtggagaatcctccttcaaatgaaaaagatatggaagagtaagttttaagtagtatgctaccagtccatgattctctagtttgttgtgtgagaaatctgtgcagccattttactttgttttatgttaacagtgttgtccatccagtccaaccagacatagggaatgatgatgaaatcccttttaactttactagccacaacgttccagatgatgttgtccaagatcctggctcaagtcatcatgcagaaattccaatgcatagtggtgacaattctgctgatgttccacttgaacggatgcgagatgatgtacatgatagcccaggaatcccaacaatgtttactagtgttactggtgacactcctgagccaccagcatttgtagaaatgaaggagacagatgctattcctcctgttactgatgataatttgggtcttggagggcaagtttcaccattgcagcaaagttcaggaccacgagcatcggttgcttccttaggagaggacctaataggatctgtttcatatggtgagtatgtttatgagtgctcattttgttttccctatcatatgatcgaagttatgcattgattgtcgaacgattttggaccaattatgtgcagcaatgcaaccatcaccatcagctcagaaaccaaaagttagagcaagaaaaagaaaacagctttatgatgaagccccagtattgactaataagtaagtttggttttgtcaatttaagattaatatctcttctagtgttggtttacttataagtgggttgtgatattttgcaggtttatgaagaaggcacttgaagatcctagtaatttattgcgcaaaaggaggaaaatcccatccactgtgttgggtatatggaagttaaaagttaatttgagaaaggaacaggttttctttgagtcatccattactggtgagtgatgttggcattgtgtttagttccatgtcttcttttgctcttgtttatttcttaattcttttgaatctgtttttgcaggattatgttctgatctttgtaatatttttgacaaggactacatgtcctcaaagcttcagcatttagaggtgggttgtccagattctgcggctccatctcctggttctgcacctgatattttccccgagcctgggcttcccgggtctcctgctcatattcctacaactgcaactgcaactgatgcttcaccacaaaatgaaaatgcagagtttcaaactcctattgacgaaaatataccggaatttgaaggttctacacatgttacagaccatgacaatattattccttcgcctagagatgtttcaccatctgaaactgcaaaatctactccattcccagagatggaaactggaagacatgaatttccaacgccagatttttcggttccatccagacgtgacgagtctgatttggagacacttgatgaatatacgagggatcgtactaatctctctactattcccgaaccaaatactgcagaagcagaagtaagttattcgcgcttcttcaattttctatccaaaacatgtaaatatgtattgtataattttgcttaccttaattatcttctctatactataagtagctaacttggtttaaaaatcaatagcattgggttcatgtaacacatcatttataataatgttttttctttaccaaattatagtgttgtggacctaattgagcatgaattgtgatagaattttaaattagctataatgtttcttgtaggacctgtggtttctggaggctgacaacaatacacctgaaggtaatattttcttttcttttttttttttggttatttgatttgaaattctactaagattgaaaaatgcttttcttttagttttactggtttgaagagtataatttattttgagacataatttcattctgggtggtttgttttggggacaacaggttctcaaggaacacaaggaattgactccttatctatcagaacaaggttttacatttgtatttcattgaagctttctccacttgtggtattataatctgcctactacttagaagcatgctgatttttccatgttttgtgcacagggccatggcacagtttttaaagagacaatcaccaacttccacaatttcagaaggtctatttggagatctcagtttgaacaaactgctagaagggaagacaagaaggctatgtgctcgaatgttctcggaaacactggtaattctccaagtcatttattaagagaaagacttgtaccttatctgtaaagttctttcaattgaaagtgaagtagcttcttgtttgattggtttgcaattttgtatacaaacccaatacttattgggtgatagtgcaagtctcttctactataatagcaaactactttgctttttcttggcaaattcattgatattgttgatcctttttttcaggtgctgaagagcagtggtctagtagatgtacaacaagaagtaccttatggtgatatcactataaagttgacagcagaactttcaaaggctcaaatctaacatgactcttgtgcttgcccagcgctatgtcaggtaacgttccttttcgacttttccccatcacttgtcacaatttcattcacaagctatttgtagactctgcttggtttggtttggttcacttccttttatcattttacctgctatcatggtcactttatatgatcaagtttttgacctatttagtacaactcaacagaaaatggtgaatgatgtatttatttctgtgtttaattaaattccttggagtagcaaatcaaaatgcaaattggactgatatttagttttgtagtttgttttgaaagcagaataatcatttttcaatgtcccttattagtagtgtttggattattttctttggtataagactgagtttattcagatcagtgtgtacaacattattgtttagtatgttctaatctgaagtattttcaatttttgtttttcaggtcattttgatatttttctcataacattggcagatggatgggacaaggttttgtacagaaatcaaattttgacttaaaacagccataggttgtaattatttgtgggttatttatgtgtttggtgaagtttagttaagagccatagtttgtaattagtggggttaattattgtttgttgttagagtttctgtttataagagtactaattcattgtttgatattttttaatacattgggaaaagggggaattaccgtgtgtaacaccttttctaattcttttttactgtacttttgtttctatattttgtttttttattttattttattttttatattcgatcagattgaattgatgctataaaaataaaataaaatatagtttgaaggttgccctgagattttgattgtgaaattatcaacattagttgtgccttatttgtttatcattcatggattttggtaataatgagctttctaaaattcaaataagcaaattaatacaagtaaatcaatttaaaatttataacttgattttgcaaccaaataagtaagtcaatacaatttgcaacttatttaaaaaaataataaaaaaaaaacaatttgcaactaaaacaagaaaatcaattcaattatattattaatataatttagaataatgcttaggtagagttaaaatatttcaaatatttttttattattaaggattactctattattttatactaataattaattatttttttatattattttttttttgaataatttggtgacatctaataaagaaagctattaatatttaacattgtggaccgttaagtctcatttattataaaatcttcaaatgaggtcaagatcggttgtccacggctttaacaccactggtttttttttttatcaaaatgaataactcttgcttcaagaatgaggtcacgagttgcttcatcctgaaaattgaccagggtgctaccagattgcattctaactaccttctctatgcctaaatttccccaaatcctcttgataaatccctcaaacactttgaacggagggttggcacccaatacaaagcagacaatagcatttttccagtaagaagcttctaccgctatctcctctaagtctagtttagccacaaattggtcaccaaccttaaccggctcagtaaagctaattttagtagagggagatggtacctgatttgttttgaacttgctccataaatctctagcatcagcttggaaatctgcctgttcgacctcatcagcccaattacctggtttcggagaaccacgatcgacctctgattcaacaacctcagtcccaatctctgttatcatgttctcaatcgtatcatgaaattcttctatcgcctcaggttccgccacctcctcctggatagaagggagatcttgatcagttccgatgacctccgtggctgcaatggcaggcttccggctaaccctcttcttcttcaccatgggagaagcagcgggagacacttacgcctaatatttgttttacagagaatgatcttgtcaaaacctgaaatgataactttaatgtcaagtatcacataattataactaaagagtattactattgggcactaatagtgcccattgcccaacacctttcataggtagcactctacgattagttaacgatattctctaaattttatttttttgaagttatatgagacctgctacttaattacaccaatagtgatatgatgccagcaaggagggttgccttttagtatttctcataactaaaatatcacattttttatatttgtttctttttattttaattaagatatttaaaaaataataataacttttttaaaatatattaattaataataacagaacaaaatttttctttaatgtcttaaaaatgttaaaaaaattttaaaatttgaaatctaagattaagatataaatttgagaaatacaataatgacgactataagtaaactacggtaatgacaaggaatgtgatagtgtgatatggtgatgaaaataagtaagatataataataacaatagttttaaatgatcgagataatttttttctacaccaccttatttatttatttttataaattttttttaacaaaataatttaaaatactatatataataaattttaaaattttttaataagtaattctaaataataattaataaaattgcacgtttagtttctaataaataaattattaataataatatgaaataagataatatatttatagttttattatattttaaaaatatatttgtaaatagctacttattatagtacaagctatattgtctaattgtatagtattttgtcataatttattcctgcatcatatatcactcgtaacaaatagtgcttaaacaaaattaccctataaaagaaaaaaaaaaaaaattaagaaaatggaattagaaattatccaacaccagccaagttgttatcactctaagtggacatacatacaaatttgtacaatgagaaaccactaattataacacccaatcttcaacataattcccacttttgtttctttgtcaaaatctacacccaaatatatcttttttccacaacatatacactgtaattcttttttctaccgcgttaaaattacctgcgggaaggcacacggttctctccgtgagccatcaacctaaacgacattctttctctcaaaaggcatatttacattacgacaacatattaactgaaaacaaaaacaaaaattattcgaaacgacgacgttataattcattttctctctgtgaaggacttctccagaaacctgcaccgtagaatcgctcccacatttcctcctcaagaagatcaacggtcgatgttgctccttgattacttcctccaccgttgatcttatcttgctccaacgacgcctctttcactctctttatctccgcttcaagctcatcgcgcgttagcccactaggcccactgggcctctgcggtaacaggcccatcttcgctaaacgctgtcgtttctttctctttgcccaagccttacgacaaagtccagcggggaccttgtaaacggcaagaaccagaaggttcatcaacgcacatggaaaacagcaacaaaccgccgcacactcggccgccgtacctcccgctaactcgccgattcgccgcttctctc

SEQ ID NO: 16418 - DNA, 5453 bp, Cannabis sativa
tatgtgttgtttttcagtgatgatttaagctgatattgctcaagaatggagtcggcttttctaaatcgataatggagtttgaagattgtgttatttcgtagtttatttgaaaaattgagttatttttaaaatagttttaagtttagattttattttttttctatcatttaatagttgatataaatatattataacttttgaatttgaaaaaagtcttttcaaaatatataatttcgttgaaaatgttatgaaataaataaaaacaaaaaatcgtgtgattaaagattctgtgtttgtgctcgtttcttgatttgtggtaacgattcttttcttttaattggtttctccagaagcaaggagaggaaacgaatatgagcaattccattgggcataatttggtgaaccaaagtttggttcaaagcaagcttaattcgtctggcattcccgcaaacactttgtttcaaactccttcctttaatcaggtcgcaactcgtccacggaagtcacaatcttccaaggacttttctgagaacagtttggtcattcgaaaatcaaaattagccatgggatcacggcgttcaactgtccctcgtgctgtcttagctacggatcaaacttctgaggtaatggcatgttttttttttcttattctcagatttgttattaatggctgaagtttttgattggttgatataagaagatgaactgatttggtgagctagtgtagttgaattttaagtcttggaaattatttattgttatggccgtggcattggttgtttgtaagtgattagaaactgtggcgtttaattttcatttcttaaactagtttatttatgtctaacatgtttgcattgttttaatagtccgaggaattggtttctgtactgtttatgtttgaccatcatttacctttaagcagcttgcagaaacattcaacctcgatggaaacactgaattgcaggtacatatattgtaagttttagttactcggtgcttattctgggcacatttggatgataaggccttcttgagtgagttgtttaatggagtttcttctgaatttgatccagacaccatgctaacacaagtatttttgtgttttttttttcttctatacgagcaggtggttgttagtgcctccactcaagggtctccagctcaagtaaacattcaagtctcgtatagtagtgactctttgcttcttcactggggggcaattcaagataaaaaagagtaagttcagctttagatggcttttaataggcaattttaaccttgggaatttcagatttttttatttagtttggccattttttactattttcagaaagtgggtacttccttctcgacagccagaaggaaccaaagtatacaagaacaaagctcttagaagtccattttccaaagtaaagttaaccagcatatgatttgtttcaaaaatggcttatttttaacacaaactcttcagagttctgattaatgttggttcatttttctgtccagtctggctccaattcccttctcaaaattgagattgatgatcccacgatacaagcaatagagtttctgatagttgatgaaaagcgaaataaatggtgagtgagatatgactaatttatcttttataacatgtagttatgttaagtaggctaaatggtgtgtttgggtcatctctttctaattttggcttacagcctatgtgttgtgcttaacatgtcatttggttaaagaattagcttatttggatgtaaaagatcctttcattaccctatgtctatcataataatgacacagtccattctgaatgaaaaaagaaaaaaagaatactgaatggaaaatttctttctccttttctattattcacaggtttaaaaataatggcggcaacttccttattaagttaccaacgaaatcaaaatcaatttcaaatgtttcagttcctgaagatcttgtacagattcaagcatatctaaggtgggagagaaagggtaaacaaatgtacacaccagagaaagagaaggtatttcatatgtgctcatgtccaaagtatctctttttcttatttcatttcttattcaggggaggaagaggaatgactgtggattgctctttgcctataaactttttaccaattatgtctgatttaatctgttcattcatcctctctgtaattggatatttatagcttgagttggagtccccttaatgttttcaagaaaatgagttacagtactgattaagtggtgcatttgattaatgacataggaggagtatgaagcagctcgaagtgagttattagaggaagtggccaggggcacttctgtacaagacattagagcaagactgacaaagaaaaatgatgttagtgatgtaaaggagtcatctcattctggttctcaagaaattcctgatgatctcatccaagttcagtcttttatacgctgggagaaagcagggaaacccaactactccaaagatgaacaacttgtaaattccatattcccaagatctttttctttgaaattctaaattcttaattgagatatgcatatggtgtacccactattaatatttgtactttattgtgataaatgtgatgtttcttttatagagggaatttgaggaagcaaggaaagatttacaaaaggaattagagaaaggtacctcacttgaagagatacgaaagaagatcaccaaaggagagatacaaactaaggttgccaagcaaagtaaaaagaattatagaattggtcggatacagcgcaagaagagagacttggtggacattctaaacaaacatgtagctaaacacattgaactaagtttttctaccgaacccaaatccttgtcagcagttgagcttttcgttaaggaaaaggaagaacaggatggtcctgttctgaataggatcatgttcaagcttcaagataaggaacttctggtgagacaattatgtgtttgattctactgtttgttgaaaacatagttgtaagaactggtataacttataactcctgtatctcgatgtactttttaggcacttgtaaccaaacctgctggcaaaacaaagattcatattgctacagattacaaagggccagttacccttcactgggctttgtctaaaagcaatgctggagagtggttggtaatattctaatgtattgaatttgaaatcagtgatttctgctacatttattggtttatatcttttcatacgtttgtatttagtgtaaatcaaagaattaagttaaattgatgttttcaggaaccaccttctgaagtgctgccaccagggtctgtttctctaaaaggggctgccgagacaccattaagttattctgactcttctactgaggtattccaaaacaaatatttcctgcttcatatttcttggttaaaactagggctactagatttaacatctgcgcccagtagtctgaaaattcacaatataatctacaggttcagtatttaaaactagaaattgaagatgaatcttttagaggaatgccatttgttattctgtctgcggggaattggattaagaacagtggatcagatttctatattaactttgctgctgcacccaagcgagtcaagaaggtttttcattgttctattatttggtctatatattagtatttcttgaaactcacttatgtatgtcctttttactctgtattctactccatcattacatttacaaatttgatgactgaattttacacattaaggatgctggtgatggcaagggtactgcgaaggccttgttggaaaggatagctgagttggagagtgaggcacaaaaatctttcatgcatcggtctgttctttcttcaaaattaaattactcttagaaccattgatgtaattgattaagtctactgtccattgtttatatgcctcatttctttctttttctcagatttaatattgcagcagacttgacagaacaagccaaagattctggtgaattaggtcttgcagctattttggtgtggatgaggtttatggctacaaggcagctcatttggaataaaaattataatgtgaaaccacggtacatctataactagctctggattttacttatcatacttattgttgggcttctgagtcttgcatgatgtattactaaatattaattagaaactctaaatctgttaatttctacttcctgtgttgttaattctgtatgggaactgtgtttccccaaattttgatatgtgggttgtgctataagtcatatgtcttgatctgcagtgagatcagtaaagcacaggatagactcacagaccttcttcaaaatatttatacaagtcacccagagtaccgggaacttctgcggatgataatgtctacggttggtcgtggaggtgaaggggatgtaggacagcgaattcgagatgagattcttgttatccaggtggaaataatatcatttttttcttcatccctttttactagtgaagtctaaccacttacaccttaatttgttgttttttgtacaatatttgttggttattttcagagaaacaatgattgtaagggtggaatgatggaggaatggcatcaaaagttgcataataacactagccctgatgatgttgttatctgtcaggtatgcctataaatatttcatgagacctatgattctctagtagttcgcacttattgactcttgttttcattgcaggctctacttgattacatcgaacgtgactttgacatgagtgtttattggaaaacattgaatgataatggaataacaaaagagcgtcttcttagctatgatcgtgcaattcattctgaacccagtttcaaaagagagcagaaggacggtcttctgcgggatctaggaaactacatgagaacgttaaaggttagcttcataggtttttgaagttctaattctttaattggttattattttctcagaatgaaccatcttcatcagctaggatttgtctttgaattttcggtagcactgatcatcaatgaaccattttataaaagattctatctccagtctgctgatgtattatgagagacataaatttaattattgtacaatggccatgcagttgatcttcagtgctagctgataccattcagcaactttccttcccgtgcttttatttttggtcaagtataatgtgttgaacttgaatgtatgatgatgttgataaatccttattcttcacaggccgtgcattcaggtgcagaccttgagtctgctataacaaattgcatgggctacaaatcagaggtaatttgaaactagattcacctcctaaagaggctcggttgctatagttagccttttgatagtatgtttttctcctcagggtcaaggcttcatggttggagtacatataaatcctatagacggcttgccttcgggatttccagtaatgtttgctgactctttttgttgtgacttctgc

SEQ ID NO: 16419 - DNA, 4042 bp, Cannabis sativa
aaatgccgttagatagacacttttaatatataaagatataaatatataataaagataaatatatatgggacagattgcagtactattgcagttttggtgcaccaatgatccctacccttagctgagttctgtgtttgctcaaaatgtttggctaattgtattgataaaaaaaaattgaaatattaacaataaatataaccaattattaattgtgatatcataagacaattttcgtaatttcatataatatatgaaaactatgcataacttcgtagacgtagcctaacaattaagtgtgtgaatcgtgtaaatttagtatctttgtttccttctttaattttgtttgttgcgttggtttcttttttgtgaaaactcattaatatatttagtgtaaaaaatgtatgtataagtcattaataattatcaggaagtaatgcatgtgttagaaaatttgagatagtcctttttcagagatttttttttgctaaaccttttcgggcttttattaatttgtagactattaatattcagaaaaaaaataatagtgtagctagtgccattagaaaaaggcttgacaccatatataagaagctaacaataattaactcgattaaatataaattgcatagtgtatagatatacatatatgtatataaaatatggcggtatatttagtctagaatctcacctactttttcatcaaaaagggtaagcaacagttttgcacgcacacataaaaattatatgatctgatcgatttcaactaccctaagttttgtattaatagtcaatatatttgactgcagttaaatattactgaaatatttttatttttgtatcaaataataatatataagataaaattatatgtaaaagagagcaagaaaaatgaaacattgacattttcttttgtcaattttaagaaaatgttaattattattattaaagcttgaaattaattaagtctgcaataattaaattaatcatcaaaagcattaacagataatgttttgttattaatctctctcaactgtaactgagacagctgaaacaccctatataacatctcttgaagtagtgtgtgagaaaaaaaaacagtatcatacatatgtaagtaattaacatgttataatatctaagtttcattgtataaattagataattaattgaatgcccaattgattagtttcattttctttattgtttcagcaaacctctctgtgcctttattttgcttaatatatattagatatgtaacaaaaaaattgaattatatgtgtatgcaactcaactcaattgatattatatacatataaatatatatatatatatatatttatatacttattcatcttttcttggttgtgatagtgaagggccggggtgttatgtcaaagtgggtggtgaaagggagggaaagcagtgtactgatcactgtataatttggaggtgtgactaaatatataatttatatatatattaatgcaattattaattaattagttttcttagatggtaaggaaatggcactagtaccatccacctgtttgacccgtattttatggcttacaagtcgccccgttgttctctcatccccaacctaattttcttaccccctcatcacttgttatagtttgcaccaaaacccagggctgaactacataacacacccacttgagaatattttctttacatatacaactaggaaacagtccgcgcttcgcgtgcggtataagaatgttggattaactatgtaagagtgacaaaatcgtattcgtgttatatattttagttaatatgcttttatatttcgtgtcagatgcgtcaattcgtttttaaactgcgtctaattttcttaatcctaacccaaagcataaaaaatcatattatattcgtgttaacctactttgacctatttttctattactggagttaagaaaaatgtagatgtatctattaaaaaacttatatatactatgtatatatagtttttatatatcataaaaaaataaaaattttaaaatatttttgatttcttttataaaaaattaattaaattatttttttaacttaatattggattattaaggtgctatttggtaacacttttgttttctaattttttaatcacaaaaatgaaagtagaatttttatttttaaaaattttgttattgaaaaataaaaatgcgttctataacaacttttatttttcaattttaaaaacagaaaataaaattgtattctgtaaagtttatttttattttgtttaagtcgggtctgggttcgggtagggtgctaggttcggcaccaaggctaggaccaggtttgagtttggtcaaaatctgctcggagtccaaaacattgattaaaaaaactatttaaaaaaataataaaagtgatttgttttttcaaaattttaatttttcaattaaaaaattaaaaagtgaaaacagttttatagaacatgtttttcaaaaatattttcacttttccaattttaaaaactgaaaaatgattaaaaaagtgttaccaaatgatacataaatatataattttacaactttattattaatcttttttatttaaaaaaaatgtgtcaaacatgtcaagttcgtattaaaataagtcgtgtcgatttattttttttgactcgcgcctaatttttctaaccataacttgtaagttgtggtgtttgtgttcatgtggccgtgttgaaatccggttttgccacctcaacctctatgagaaaagaattaaaatagtagagaaaattaattatcaaattatgaaattaatagaaaaaaactaaggttagagaaaaaaccaattataacaataaagaaattattttttccacttaaataatttttatatgaatttttgttgcgttgtggaaatcggctaagagtgaaaattatgatggatgtattatttattaaatttaggattttattaagtttaggaatatttataattttctataattttatgaaattatacctctatataatagtaatattaatgatgtatttatgtaatttatatttttcattaaaataattttattatttaataattcatataatgtataaaatgatgcaatgacaatgagtgatatacatacagtggtgacattaattttgaatgatccggatatataaaagagtgttatacaaattatgttagacttttattaaaaaaaaatggtaaatacaggtcaagttcgatctattcatacacctaacttatcatattattcaaaaaaacaaattgaataatattaactcattgcttgatttgttttatgtatagggtaaactttttggtgagacaaaataatagtgagttagtgagatacggtaatgataacgggcaatatataatgatgagaataattttaaatgatcggaatatacaaaagagtgttatatgaaccatatcggacttttattataaaaaatgaaattttgtaaatacatatacatatagacctgactcattttatacacttaattttttttattatttaaatagaaattatataaaaattagtaaagttaaatttctttaaacatcaccgtaaattgtgaattattaattagttatatataatataggtagagcagtatagtatctatagtatctatatacatttaaaggagaagtatgaagcgataacatgacgctctaaaatctcttcaaatacatctatctattatgttcttaattctctcattttttttattatttattcaatttataaatattaattcattaatctccataattttcccttttatttattaatttactatttttttaaataaaaatcttcatatatttatttatttatttatttataaaaaatacatctatacaaatatgactacacatgtatatataaatagctaaaaaaaaaatttatatatatatataaatgagaagtataaagcgatgacatggccctctaaaatctcttcgaatacatctatctattatgtccttaattctttcattttttttttattttttattcaattta

SEQ ID NO: 16420 - DNA, 5648 bp, Cannabis sativa
acgacttggaaaaaaataagaatctgcggcatataataaacgaccttgttagcagatcatttaaaaaacataaaaagatatgagacaaacgctttaacaaagtcttacaataaaaaacaataagactaaactagaaagacatatagaaacaaaactcagaatagcttgaacacaaaccaagctatcaatttctataagatgacatttttccaattagaaaaacgatcaatccaacaaagagttttcttgatgccaataatttttgccacttcaggttgaactcgaccctcaaagcctttattaaaagccacaatcaacttaccatcatgactgcaagcacctatctcgaaacacccacactctttaaaaagtgttccatcgacattgaccttgatataattaataacaggtgtggactaatgtttaaaaactttatcattatcttgaaataacaataaaggatcatctttcttagattgagcaaaacgatattaatcaagagagtgtctagatgagaaaacaatagcagcaaccgcaaaagatttttgattctaaattattctgttccttggttgccaaataccccaggcaaccatagctgcctcctctaacataccctttcctacccagcttgatagatccagccaccaagaaaagaattcagttttagtctagcttctaacatctacactagaatgagactagcaagaacgagcaaaagagcaatgttgggccggcccaagcccaattgtctagcccagtccagttgaaggaagaagtgatagtggatcgattaagaggctggcagcaggaagaacttccaaccgaattgcagccaaggaacgcaccaagctccaacgataccagagaaagcatggaggcaggcgtagataaggcgcgtgaacctagggtgcgcgtaagacccaagtggttacaagagtttgttaagatggaaaaccattgagggaattgctgggagtttttctttacctttgaattgtcttttttctgctggttttctcatgtaagttgggtataaaacccttttttcttggctgtaactttttttatccagattttgaatgacaaattgcaattagtttgcattggagattagtcttgtctcgaaaaagacctcattatctaacactggtgctttcattgtttttcagcatgaagaacgaggaacttgcagcaatgattcaagccttggaggccagcctccacaagcataccgaagaacaattcaccaaagtatctgagaaattggatgaacaggtggctcatttggatattcgtgtggaccagcttcagttttcagcgtctaaaccacagggggaattcggtaattccaatcacgcaacagagtcggcgaccatacaccgttcgaattccaacactgagactcgtgaggtgaattccatattgaaagtgatgagggtcaaggtacccagattcgaaggggcaggggtcgaagaatggatttataagatgaacaagttctttgatctccatcaggtggatccatctgtgcgattggctatggttgcttttcatcttgaaggaactccgtccacttggtatcaatggatggagaaggggggcggattcgcagattgggagtcgttcttgcgagcattacggttgaggttcggcacatccatttatgatgatccactgggaaaaattgctaagttggtgcaaacagggagagtatcgacgtttcgggaggaatttgaacagttgatgactcagatttcgggtgttcccgatcactactttctgaattactttgtttggggcctgaaaacagaaattcgaagagaactattattgtctaaaccattcgatctcgcagacgccatggcgaaggcacaactatatgaggatcgccatgatgacatcctcactcgagctcgtggtgatggatatcgccctcaatggcctccgagagttactccatcgccctcaattcagaacagctttccagcatcaccgaagacagctacaaccacaactatcacaccatcaccgattcctaaggcacatcaaccagcattaccggtcaaacgattatctccagcggaacttaaggagaagcgtgagaagggtctatgtttcacatgtgatgagaaatttagtgcgggacacaaatgtaagaatcgggtgctcatactgtgtgcccaggaggaggaggaggatgcgcacatcgaaacggctatggagattctctctgattgctctgaaacagtggctgaagaggtcagtttgaatgcactttctaatgctgccaatcctcgtatttttcgtatcattgctcaacacggttctgaatcgctagaagtattgattgacactgggagtaacaacaattttattcaagaagagttggcacttcggctgggattacagtgttctgacacaaaaaaatttaaagtatatatgggaaatggaaattctctatggtgttcacaggtttgtttgggagttgagttaagcttacaaggacataagtttgttgtagatttgtttgtgttaccaatttggggactggatgttgtgcttggtatgcaatggttacaaacattgggcccttgtcttcatgaccacaaggcattgacaatggaatttgaatggaaagggaaggtggtgaaattagcgggatcgtctgctccaacaactcagcagctgtccatttcaaaattacacacactaattcgggatggagacgtgcgagatgtgtttttgctggcagctgtctccccggaggatcacaaaacagaagaaccgataatgaagatagattctacactgcccgaacaaggtcgagccttacttactgaatttgaagacattttttcagagccaaaaacactaccaccgcaccgcagttcggaccatcgaatttttctacagccacaatcacaacctgtaaatgtcagaccataccgctacccatactttcagaaggacattattgaacaattggttcgggaaatggaggagtggaggtttattagaccgagtaacagcccttattcttccccagtgctacttgtaaaaaagaaagacggatcctggcgtttctgtgttgattaccgagccctcaacaatattactatcaaagatcgcttccctattccgacaatagacgaattattagatgagttgggaggtgctaccactttttcgaaattggatctgcgtgcagggtatcatcaaatccgtatggacccgaaagatattcacaaaacagcgttccgcactcatgagggacattatgaatttctcgtcatgcctttcggcctcacgaatgcgccatctacattccaagccactatgaaccgggtatttcagcctctcctccgtcactgtgttattgttttctttgatgatattttggtgtacagtaagtcaatggaagagcacgtttcacatttgaggatggtgtttcagctattacgaactcattgtttttttgccaaggctagcaagtgcactttctttcaaccacagattgaatatcttgggcatttagtttcagccaacggtgtgcaagccgactcatccaagattgaagccatggttcaatggcctcaaccgaaaacactcaagcagctacgtgggtttctcggattgacgggttattaccgctgatttgttgcacattacgcttccattgccgcacctttgacagagcttttaaagaaggacaatttttcttggacagcagaggctttgaaggcatttatacaactaaaaacagccatgacagaaacgccggttttggcactgccggacttcaccaaacaatttatcattgaagctgatgcatcgaatgtgggcttaggcgcagtgttgatgcaagagggtcatccgatagcattttttagcaaaaaactggggccaaaatttctgggcacatcggcttacttacgagagctcagagcagtggtagaagcggtcactaagtggagacaatatctgttgggacgccagtttgtcataagaacagaccataagagtttgaaggagttactcacccaagtgatccaaacacctgagcaacaacaatttcttcggaaattactgggattccattttacaatagagtataagaccggtagaacgaattcagcagcagatggtttatctcgccaatttgagggtccagtttctatcttggcagcagctcaatccgcagcttcttttgaacttttagaaacaataaggcaagaaaatactacctgtccagagctccgaaaattacatgaacagtgggagaagggtcagcttcgcgatacaccattcacagtcagggacgagttactttattacaaacatcgcatcaggattagctccaactctcatctcaaacaagaactcatgcgtgagtttcatgaaacaccgatggggggtcatgcaggacctaatcgaaccttcattcgtttgagtgcaaattttttttggcctggaatgcgaacggaagtgcaaaagtttgtccaacgatgtgttatatgtcaaatgatcaagtattcgcccacaacaccatatggtttactgcaacctttagagctgcccgaaagagtttgggaagatttatccatggatttcatagtcgggttaccgaaatcagcgggagtttcgaacatcttggtggtagtggaccgttttactaaatatgcccactttggcgctcttccaagtaactacacagcaacaaaagtggcggagttatttgctaacatggtcattaagttacacggtatgccgagatcgattgtctcagatcgtgatccaatttttacgagtgccttttggaaaaaattgtttgagttgatgggaacaaggttgaagatgagttcctcctatcatccacaaacagatgggcaaacagaagttaccaaccgttacttggaacaatatttgagggcatttacagctgacaacccgaagatgtggagtaaatatctctcatgggcggaataccactataatactagtcaacattcagcaattggtatgactccattccaagctgtttatggtcgcactccccctactatcccagcttacaccagaggcatcacaagtatccaggcagtagaggaggacttacttactcgagatgcaatactacgtcagttaactaccaatctgcagcaagccagaaatagaatgacacaacaagcaaacaagaaacgccgtgacattcagtttaaaattggggatctggttctcgtgaagcttcagccatacaggcaagctacagtggctcaacggttacatcccaaactctctaagaggtactttggcccattttccattgttgctcaagttggacctgtggcatatacactcgcattaccggaaggcagtagaatacaccccacatttcatgtatcggtgctgaaaccattttatgggccaaacccaccgatttgctactctcttccagaactaagtgtcagcaacaaaccagtcatgctaccattagcgattctttcctcacgaatgcacaaagggcagcaacaagtgctggtgcaatggtcattaagtgccatggaagatgcgacttgggaggatctcgctgaatttgagcaaatgtatggagctgtcaaccttgaggacaaggttgttgtcgaaga

SEQ ID NO: 16421 - DNA, 6038 bp, Cannabis sativa
  modified_base (4285)..(4285): a, c, t, g, unknown or other
ttttttttttttttttcatttgaccctagacacggacctaacttgccttagcctagtattagagccaaactaaattttaacgagtatccgatctaaaaagatatctaaaggaatcgcttgtgattaggggtcaaacgagctgtgatcgagccgtgtaagattggtgatgttagagagtcacacattgataatgtgttgaaactaaatgccatacataaaaacatgtgctactcctctcatagtcattgctaattaattttgagacggaatccatacaccttatcaaatactattacaacatttctcagcatggatgaaaaagccttcttccaacaacatatatatggatgcaaattaatgagtactaataaaataggtaggtacatatatgtaggcataccttatgagctagtgataaatcttgttctaggtcattgacccgtttgacagctgcagccagcatttcctctttctcaggaggcatggatactggtttcatattaagaacactaactttttcttcaagttcagccatgcgcttcatcatggccatatactcagtgttcgagatggcctcgacagccgccggtacgtccaacttatggtgtttgatcattgtcatctcattgtagtaaatagggctgccatagacagccatttcaataattttctttggcatgtttcgtgttagtcggatcattgtgacaattcccatcaccatggccaagattccagaaaataacaaattgtttgatccttcagtagttttgcaaccatcattcatgcacaaagtacttgtatctttcaaagagaagcattttttaatgttacaaaagatttcaaattatatagccaaagcaaaaatataagtatctttagacaattcttttgaggtaataattcatattgagaaggttaactaaacctttattttggatgaatctatctcttttagtggctttagtccatgatgcatccacattcttgtcaaccattggggtaaagttgtcatttttgcaggcttgggttgttaaagcaccctgtaatttttggttttaatgaggacatagaataaaaagaaaggcataactacaatattttcaaaatataaattttatgaaagtcaaagatttgatttatataaaatttccacccaaagtttactatcaagattaaataacccacgccatagtttacattatggcgtcggttatgtttgattctataacatcgcctagatcagcgttattagcgaatttcgttaaaactgacgctaaaagacttaaaaaattgtctctaaagtctaaatttgtactagtgtcttataaatctaaaagatttgaagatattattgaaagtgtagagaagttacttcagaaatagaacaaggtatcggaggctcccttgaagtgtctagagctgattctgagttgaaagaatgacatctcttcatattttttgaaaccaaatagagaatataatagtcattagacaatgaaggatatatataaacaaatagttaatatatattataaggatataatatatgaagtgaaaaaacttatgtcaagaccaagtatatttgagcttgccttctctttcttagagacatttttctcctcgtagtcatttaatgctcttcttgtgcatttttttacttcaccattttgcaccatctgtttcatcaaataacaaattcttaattaggagtcttaattaaattatatttttctcatgttccatgtcaatagttgttgtttttcattgatcttgtttgatatatatacaaattagtaatctcacatattagatgactcaattagaagatctttctaatattccttgatttgtctttaaatttaggtttgcatgaacttcatgtctgatttttcttattacattaaaaaaggtgcagtgtcatatttttgtgttgtagtataaaagtaggattcaatgtgattgttttaggattacattgatcaattttttggcatgacaaaaaataataaatctaaaagtatttttataattaatatatattgataaattaatatgatattaactagttaaatttggaccacctctagagagtgtatgacatgacacaaaaataataaatttaaaagttgttaactattatatgtatttttaggggttttttcatttttacactttaaaatatatatatttttttgtattattatgaaattctactcagaaatctatataacaactaacgaaacaatctaaatcgcaaccaaaattcgtataacaacccacatagaaactaccggagtaatccaaatcgtaaattaaaaaaaaaaatttaaaaaatagtatatggagtaatttcccttaaccttaagtatttctaggtcgttccacggacccttatcagagcgcatgcaaccaccattgtctccacaagtgcaagtaccacccaaaaactctggcaattcactggtttaaattgcaaaataataatgtgagaacgatagatttgaataatagacaccaaataatacaatagccaattaaaattagaattagcatgaaaaaaaataacaaaactaaaaggaagatgatgagaaagaaatatgaaaataacatcatttattccctactgaaaagaacttacttagcatcaattatttcaagcaacttgctctggtacttgttaccaagaacctagtgcaaataaaactttatttttagcttcaacaatattaaattaagattatcataactagtttaagaagggttcataatatataggatttcacttacatgaatttttgaagtggtctttggatctatgaatgatttaacagtgctccacaataacctaaatccagaaccagcattaatgatgaacatgcggttcagggtctgtggaaaaacaagaaaattaaagaaaaaaaaaaaacattagcatcttaaaaagaaaaaaagagaggaagcaatataatcaaataaaaaagtaaatgcatggttatacaaatttcccattatcccaaatatagtattaaatttgacacaacacttactatataccaaatttccaacacattttgccataagagcacatttttagctagttgaactatatattagctttacattatttacttgcatctctattagaaaggaattttttattttttatttttatggagaaagattttaaccctttattttctatataaaaactataaagcacctagctatacgcagtcagcaaaaaatgttctcaacttttggcttgattgttgcggattgtaaagttctactctctacattacataatgttcagttactgtttatcaaacgatcaacgaatcgggtagcacattacgttgttaggaactcccgtttcaatacttgttgtagcatttctgattttttcatgtttcagaagacttaaaaaatcttatgtattcagaatactaattatttcgatgaagttgatatttcatttcaaaaaaataaaaaaactataaagcacctaataagaatgttccaaagttacctcaggataattgtcgccatcaatcttctgaaggcgctggattagatcccttgcagctttgttaaaatttttaagccccttaaaaaatgcacatgtcaattagtaattattattaaccaaacaatctatcaaacataaaattaaatcaaatattttaccactccttgaacatccaaaatggtagtactttgatcaatgtgcttctttgctgctatagaacatgcagggaatttaacaacaaaggttctttcaaattctctgacatggtaattcacataacggtccattgttgtgacttgcataagcttgtttgaatcaatttggccaagtctttcaatgtaaacaggtcttccttccttatccactccatgatgtccttgtgggtagtaagttagaacttcatctatttccttaaactcaaattcctttgataaaaatacaacccaaatgaagaaattaaaatcaaaatcaaaatggcatttaagaatcaatcttttatattattttggatcttgtgttttgcaaaagttaccaatttaaccatctgttttgttaaataacaaaatggactctgaattttccaaaatggtaaaaatagaacctgagctcaatttgcaacaattttattttttaatataacaaactttaagacaatttctaacacgaacagatacacaaaatgtaatcagttttgtcataacatctagatcagattattattaagttttattttaacaaaaaatcaattcagggtcntatttgtacaattttaaaaaataaggggtccatattatcattttacaaaatagaaaaggtaatttttacaaaactccgagtccgaaatgatatatacctccataattgtatcagcaccaaattccttcctccattgcagcatatcagcccacatttgctttgccttctcaatatcaaatttccttgccctcaaaaatctacaccatatcatatttatgaatgaaggattagagattattataattagagagaaatgaatatatatatatatatatatatatatatatgatgaccttagcatcatgtagtgatcatcatgctttgaaggtaaaagctcttccaagattagtgcttgtcgaaaagcatcaacagcctgcaactcctcaggattaaagtcattatcctcaaaggttacagacataaccttgctactgttccttcttcctttctttgttaatgaattcctaaatttggtggaagcattaattgccttcttcttgaaagatccaataagttttgtcttcttctcatcctcatgacaatttccttcaactcctcctcctgtagattatttatatatcattcatgaaatcatcagtacattatgtctaatgcctttctcaagtggtgaaaaattcttaggcttttatctaaaactatatgttattacagaaaattggttcaataacttttctatactaaatggtttgaaagaaaaatttcataatgacaatctatcaagttagaacttttatcatcatcatcacatatacctggcttaggtggtccagacatagtatcacacatgattgtaatggtcttccaatgttgattaatagattttgtgaaagctagccgaaagggcaggaaacaatatctcaagtactcatcaaataaaataaataaataaacaaataaagctcaaaccttgaaccctcaaaaggatacactttcacctaaaatcatacaaaaaaaaaaagttagaaataaaaaacaatgcaaacatgtatacaattgcgtagtcaaaatacaataattaaaaagaaagaccaagaaatgtatcaaataataactatgtgtagtcaaccacctagtttgtattttattttttttgttatgtttctgaatatttttttagactttgatcctccatattcaatttaaaagagagaaagagaggtaagatggctatatattctccgaattaatctgtgaaattgaggacaatgatggtgacataataactaattttagagacttaaaaaattaaagctaaaactaattataacatatattattattagacaaaatcaaatgtgatgatcttgttagttgtttcattgttgttgcaaggttcatactattgctggttaactatgaatttgctaatttttgtattgttttagaaagttaatgaagaaaaaaagtgtattgggaatagtcacaaccacattaaaggttaaaaaacaagttttcttattattattttttttttttgcaagtatatgatccaatccaattcgcatgatccaattcaattcaatctacaaaatgcggatattcgcacttgtgcggattgaattggattgaaaaatctaaaatccgcacttgtgcggattggatgttgtttgatctcaaaaagtaaccgattcaattcaatatccacacttaattatatatattttaaaaaattataatatataatatatacaaattttctagtaatattaaaaagacacaaacttctaatttc

SEQ ID NO: 16422 - DNA, 4113 bp, Cannabis sativa
catgccttcattgacttaccttgatttatacttgaattttttcaattcaacattccctgatttcatatcaaagtgtaagaacttaactttcttagacatgtctcaaaacagttggactggttcaattcctgaatctgtgttttccaatcttgtcaaactccaatctttcaatctcaccaatattggattcaagggtcatttgtcagccaacatttcaaatctttctcagctcacacaccttcattttccaaataactttctcagtggtgaaattcctcaaggaattggtttgttgcataatcttgaggttcttgaattgtataacaatacctttagtgggagtattccttcttctattggtcaactcaagaatcttttgactcttgatcttaggatgaatttcttaaactcaacaattccttctcagcttggttcttgcactaagctcagttacttggctttggctgcaaataatctcagaggggaaattcctttgtcattatccaatctgaatagtctcacagaaattggtatatcagataacaaactttctggccctctctcctctgaattaatctctaattggacttctctcacctcattacaacttcaaaacaacacacttagtgggaaaattccaaaagaaattggcttattgaaaaacatcaccttcattttcctataccagaataacttcactggttcaattcctactgagattggtaacttggagcaacttggaagcttggatctttctggtaaccatctcacaggtccaattccaaagtctctatggaacctcaaaaacctcatttctatccaacttttctacaacaatctgaatggaacaatcccaccagagattgaaaatctagaactcctccaaacttttgatgtcaacacaaaccaactttcaggagagttaccagttaccatttccagcctcagaaacttggagggcttctctgttttcaccaataacttcaaaggaaaaatcccaaaagactttggcaagttcagtcctaatttgaatgtcattagcttttcaaacaacagcttcaatggagaattgccaccccatttgtgcagcggtttaaagctcgaaactttaactgtaaacaacaacagtttcaccggatcattgccagaatgcctgagacaatgcaccaacttaaccagagtcagacttgaccagaacaatttcacagcaaacatcaccaatgcctttggttctcaccccaaacttgaatcaatcttttttgatgataaccaattcattggtcaaatttcaagcacatgggaaaaatgcaagaatctcaccagattgcagatgggtcgaaacaaaatctcaggtaaaatcccatctgagcttggaaacatgaaaaagttgcaatatttgagcttggaatcaaatgagctaagtggggttatcccaactcaattgggaaaccttagtctcttgtttgtgcttaatctaagcaacaatcatttcaatgggaacattcctagaagcctctccaagctaacaaggcttgaaagttttgatctttcttcaaacaatttttctgggttaatcccaacttggctccaagattacagaagcttgtcaagtttgaatcttagtcacaacaaattctcaggagaaataccacaagaggttggaaacttggtttcattaaaatacatgttggatctcagcagcaatttgttatctggagaaatcccatcaaacttggtaaagctttcatctttggaaatcttcaatgtctcaaataatcaactcagtggtgaaatcccatcatctttctccagcatggtcagtttagtttcggttgatttctcttataacaacttgactggtgcaattccaactgggaaacctttccaaaataaaaatgctttcttgggaaactctggtttgtgcataggagaatctggtggagtcaacaacaacctgaatctgaatctttgtagctcaacaacaaacaacaacaaatcaagcaacaacaacagaacaacacatattcttattggggttcttgttccaatctgtgctttgataatatttgcaagtgtgacagtcataatttgcttactgagacagaaaaacagactccttgatgatgagaatcaaagctctgaaaacaacaagtttgaagaatcactgatatgggaaaaagaagggaaatttactttcagggaaattgttaaagccacagaagatttctcagagaaattctgcattggtaaaggagggtttggtagtgtgtacaaggctgttctttcttcaaacactgttgctgtcaaacgtttgaatgtatcagattcaaatgatgttcccaagagttacagacagagttttcttaatgagatcaagactttgactgaagttaggcacagaaatatcattaagctatatgggttttgttcaaggagaggttgtatgtttttggtgtatgaatatatacaaagaggaagtttggctaaagtgttgtatggtttggaaagtgaagaacttgtttgggaaataaggatgagaattgttcaaggattggctcatgctcttgcttatttacaccatgattgttctcctcctattgttcatagagatgttactttgaacaatgttcttcttgagtgggattttgagcctaaattgtctgattttggtactgcaagattgttgagccctgattcaactaattggactagtgttcaagggtcttatggctacatggcaccaggtaattttctttgaccaattcttgttaaagttcattttttttcttataccaagcataagcattttacattactcaatttctttgataatgcctcgttaaagttcattttttttgtactaaccataagcatttatctgtgtaacaaatccttgttaaagctcctttttacaactaagcacaagcatttacatcacccaatttgtttgacaaaatcctagttaaagtacatttctttaatactaagcaataagcatttacaatacccaatttgtttgacaaattttttgttgaagctcatttttttatatagtaagcataagcatttaaaatagccatttcttttgacaaatccttttgttaaagttcatttttttaatactaagcaataaacatttacaatacccaatttgtttaacaaatccttgtaaaagttcatctttataatactaaccataacataagcatttacaattcccaaatggtttgacaaatccttgttaaagttcatttctttatactaatcataagcatttacaacaccctttactgattattgatcattgtttatcatgaaaaaacagaattggcacagacaatgagagtaacagacaagagtgatgtgtatagctttggagttgtggcattagaagtaatgatgggaaggcacccaggtgagatgcttgaatcactctcatcatcatcatcaacaaaagcattgtcaaatgatactgaagtgcttctcaaggatgtcatagaccagaggttgccacctcctaatggaaaattggctgaggcagtggtgttcatggtgactgtagccttgtcatgtgctagaaccaacccggataggcggccaaacatgaggttcgtggcacaagagctatcggctcacactcaaccttacctggctgagccttttggctccataacaatgaacaagttaaccgggtttcaaaagtgagaaatgaaattgtaagtattggtgttttgagcaaaaaaaaattagttctgtgatatgatatgagtagaggcagatctagtttagaattgtgtataatcttataaaatcttataatgttttagtataaagtaagtgtggaaatataagcttgtattgccatataatttgttttggtgaaatgttaattagattatcaagaatgaaactttctctatcaagataagacttttattaagatttcaaagattatgtcattgtttggttattgataactcttattatactatgtactcttctttagaaatatagtttgacctgtcaaaaaattggattcttttttcaacattttctgaaaatagcttttaatgctttttggaatttcatagtcaaaatatggactatttttgt

SEQ ID NO: 16423 - DNA, 6559 bp, Cannabis sativa
  modified_base (3717)..(3729): a, c, t, g, unknown or other
aaataacaagaaaataacatctaaataatatcaaaataatatatgacaaaaaattaacaataaaataacaagaatacaacataaaaataatatgaaaactataaaaaaaatatataaaatttcgtatatagttttttataattttttttattatttttgtgtatttataaaataatccctaaattatgcccacaagcttacgtataatttatgtatcaaattaatggcaagcttactagtaagtaatgagaatcaatggtaaggtaatcattccctttcatttacttacttacattattaaaattaggaaagtgagaacttgattaaataatggagaaaaaaaaaggagaacttctcccaccaattttgtaaggaatgctattaagggtaatgaatttttaattatttttatattttttaatattaaatatataatgacaattttatcctttaaaatatatcttacaaaataattaccatataatatagtttaactcaaaagagaaatttagtcaatttaagcattccgtttacgtttcctaataaagtaaacaagataaatcacaactattctatttctaaaaaattttagtaaacaacatattacaaatattaattccgattatttttcatttattctgttacatttctccattaatttattctgattttgaatactgtatattaaacgtgctataaatgcctagtatgatttgtgtgtacaagtacacacaatatgtgggtttataatttatgtatgtatttcatcactttttgtttttcaattctcaattagtaaaaacaaatcaaatgttttggctatcttgacctgatcatatcatattaatttgaaaaattgtggtaaaaattctctaaaagttcactttaatacagataagtcattaatttcaaaaaataacgataatagtcttcaagctcaatattcttgtaagtttattggtccttattttaacagattcgttagttactcaaaaaattctatgtgttgatattaaattacagtgaacgtccctaaaaagtttactttgatacagataagttctctattaccacaattttttgagattgaagatttatctgcatcaaattgaactttttaaagacttatccctaatttagtatcaacatgtgatactttttgagcaactaatatgtctgttaaaatgaggatcaacagacttacaagaatgtcgagtttggagactattattgctattttttgaaattggggacttatttacatcaaagtgatatttttgggactttcaccgcaattttcttatcaatatatataaggtataatggttgtatatgtgtgattatttcaagataaatgatattgggtaagtctaccgtacaactttaaaaaaagtgtttcagtagattttttatctgttttggcatatagaggaacttttagtcaatttttttcatgatcgcatacgttatagttatttaagatcacttgaaaatttttagaaaatttcgagtagtttataatactgaaaaataagatttacatattttattgcacatacgactatttttttcttatacgtgtggcaagtaatttattaaacctaattttcagcattgtaaactattttgaattttgaaaatttacaagtgattctaaatagctacaacgtacgtaatcataaaaaaattaacctattttttttttcataacaaaatagatattattaattaggtaatgaagaaatatactattcggtgatagtaaattagatgaatactatattattaattgccatggttttgagtttgaattgggcaattaataatttttagtttttccttcatatcattaattaatttttaagaaagttaggtatattgcttatatatgcatatataatatatatatatatatatagttttgaatagaaatatttattccattatatatagttttttctcaatataatatacatattgattgatcatcaccatggctcaactgaccagtattgcttccatactatcaacctctctattcattgggcttattgttgtggcaaccattgacaaaacaggtattttggttctattgccataacaatttttatttttaattttaacaaggccatgacaaatttttggaaacaaaataactttagattgatttttatagtttatttttaaaatattagttttttcgatcatttgaaattactgtttcggtacctagggttttctttttcttcattttggccacccaaatcttccctagctccgactcactctcttcattctaccacactatccatcatgcatagtacgaaatcttgttttctccatcaaaaagttgttagtgattgtttcgattcgttatttgtagatacttttagtatatttggtatacaaataataagttataatttaatttttgggtaattacagaaaatataatttttttttgaaaattttatatttttatgttcatagattttgttttacatttttacgatgttctataaaaacaacaagaaaattatataaaagtaacagaaaaataatatttaatcaacaataaaatatagcatacaaataataaaaatataaaaataaattaaaataagagtataacataaaaatatattaaaagaccatattttttataaataaaattataaaatttgtaaaaatatttaaaattccgtacaaccgtatttttataatttttttattgttttttatgtatttgtaaagtaatccattaattttttatttttttttgtttacatgaaggttgtacatagttgactttgagagtttttggttcttagaaaaaaaatttagttgacccttgttatatgttattttttgaaaattaccaaacaattttgtgattttttttttaaaaattaaggaattcttttggatcgggagagattaatcaaatttttttaagcaaattttaataatttatgattttaaaattataattcaaataatttattgcacgcatatttttttcaatagtattatttgtgtgcataaaatactgtttgaattcttatttcgacattatttattatctcgaattttataaaaaaaaaaaaaaagtgaaaggccttctgtaatctatgtagctaagtaatatcactactatagttatttatccttagaaaaatctctttctacattcaaacaggctgcattcatgccattgttgtcctagaaaaatcacatgaatgattttagaatttttctgttattattacacctttgttttaccaataaaagaaaaatttgtatataggtttctcattagggtttgtttaaaaattattgtgtaattactaaattttgtatataggtttacagtatatgttaaaacataatgtgtgtttagatatggattggcaattagggctgcacatgaaggccaacaacctggcccacccagtgcacctgtccatcccgaacttggtgcacctgaaagcccgaaaaaattatttgaaaaaaactgggttcgaatgttacccatatgaagttcggagaggtattactaagcaatttttttattctgagtttcgagtatcacccagacccagttcaatatacttattttttttaaggctaattagtatttttaccccctaaactttaacatgtatcaaatcatgccccctgaacttttttggacgttaaaaattctccctgaactannnnnnnnnnnnnatttaaggacttttgtttaatttcattcaattttactattttagttattatatatgtactaaaccatgctcctcaaactttgatatctactaaatcatgcctctcgaactttgacatatattaaatcatgctccctaaatttttatccttgttagactttttttttactaaaattagataaaaaattttaaatccaacaatctcaatagttcagggacatttttaacgaccttaaaagttcatggggcatgatttggtacatgtcaaagctcgggggataaaaatcctaattaacctttttttaatattatatataatagactaaaatttagcctaaaacctaacctaaactacacaactgcaataacccctttatcttcttcttctttctttgtgcctgcccaagccccatcgcgctcactaccaatctttcgcttccctttttgttctttgcacataatatatatatttttgactcaaaaatttagacaaaatttcttagccacaccttctcgctagattaacgagaatgaattgtaagttaagtataaatagagagacacaataatttatagtagttcactcattatatcacgatagtaatggagctatgtcttctttttattctcatgagatgaattacaaaaaaatagttaagtctggatgctctaatttagagatgttctgactttatggctactattctggatataaaaaatgaactagaggagctctccttttataggtgatggatgtcctattaaatgtaaataaaataatccaaaaattatgaaaaatacatttatgctattttttaccgtagatgatgatctaacaataaaaattaacttcagaaggtacaattattatcacttcttattgttgtaacatttaatatatcaattaagaaaaactactattatttacttgcttaatttaattattatagaatatctaacctcaaataatattaattaattgaattacattatattgtattacaatttcaggagcccaaattggtgtttgctatggaatgttaggcaatgacttaccttctaagcaagaagtgatagatctttataaacaaaacaacatccaaagaatgagaatctatgatccaaaccaagaggccctccaagccctaagaggcacagacattgagctcatacttgaccttccaaagtccgaccttcaaaagatggcctcaggccaatcagaagctgacacgtgggtacaaaacaacgtccaaagctacaacgatgtcaatatcaaatacatcgctgttggaaatgaagtcaaacctgatgaacaagaagcccaatacctcgtcccagccatgcaaaacatccaaaactcaatcaaccaagcaagtctcgcagatagaatcaaagtctccacatctgtcgagactggctttttagacgacgaatcatatccgccatctaaagggtcgatcaggtcaacctacaaatctcttttcgactcaattattgagtttttgaacaacaatagagctccattgctcgtgaatttgtatccttattttagttatagcagccaacccgataatattcgtttggactatgctctattcacagcttcatctgaggtggttcatgatgatggttctggactcgggtatcagaatcttttcgatgcaatattggacacagtctattcagctttggagaaggctagtggaggatctttggaggttgtggtatcagagagcggttggccgacaagtggtgggacagagacgacagtggataatgcaaaaacttataacaataatttggttcaacatgttaagaatgggacaccaaagaagcaaggaaaggctattgagacttatatatttgctatgtttgatgagggtaataaggaaggagcagaagttgaaaggcattggggtattttttctccaaataaggtcccaaagtatgaaatgaatttcaattagagttaaaaaaaattactgaaatatatatacattacaataaaatatgtgtgaggataaataataaatatcccttcaaataaaaacatttcataatttcagttttattatgacagtgaaccaaatagattattatttggtcacattaaattatgtacgtaattaaatttacaagattgttattataattaataagagatttactcattatattatatgaatattttttttttattagttctcattaaatcaacaaacacaaatactaaaaacaagctgaggaataaaaaaaatagaagactattcaccacatcaattatatacttttatcttgtgataaaattccaatacaacaaaatctagccttaatataatattttaaaaatctgaaataaatgtttaatattttataaattctttatttgtttattattttttttaaaattaatcagtacaatttttacatatggaactatattgaatcaattgctcataggtttgatagctggtatcattaatttcactaaataacaagtaataccttgtatttgcagtcctcctctttgtaggtggaggtgtcaaattgatttcatttctttcataacatgttagtctatgctttatgtgaccgttaatatggttagtctttagttagttaagttagttataagtttcataactaactcatgtacttatcttatagaaccgattctatacatctataaatagactcgagttctctcaaaatttgaaactaagccttataaatacaattgataaatattcaatagcaataattaagagtaaattcatagacttgtcataagtgtttttgtttgtgttgaaagcttggaaatgttatgatca

SEQ ID NO: 16424 - DNA, 4537 bp, Cannabis sativa
aaaatttagtgctaaaataatagttttttagtattaatttaacactaaatttaagttttaccattaaagatggcctaaatgcattgcgcaccatttataagctcccaaaaatattatttgtcaaaactgcaatagtagagtttgtggatatacaatgattgcttaaaataatgtttgtgtttagtttattgcaataatgattagtaataataatagttctttatgttctgtttgtttttcaaattatttagacttttgagacctaacctaacttaaaccatttaaaaatttgagaatcaatctcgtacagaatgatctttaacatttaagtgttataaagtgagaaaaaaaaatgtagactttctttctttaaattataatcataaagtattattattattattgagaatcaatagaaccaaaatacaccgtactttggcatatgcaacattttctacttaatcctaattaatttatgtgaacttgtgaatgttatgttacagtgtcagagaaaagactccatttttttcccatttcttgtgaggctgaaacatgaatatgacaaattataggacagttaaaagtcaccattggagagtaaaaccaaatggggttacgtgtattatcacatttagattagatctatggttttggctctggaatgaagaagaaacagcttataaagaggctggactgaagagattgcatatatatagatacatcacacctctctatctaagctctcttctctgaaacaatggagaaaccatgttgggttcgtactttggtggctcagctagctctctgcttcggtctctactgtgcatttcaactgggtaatcctcaaaactcagtttacattcacagaagtgagattaaacctcttgatttgtattttataagcgttagaggaggatttagaccagtaaatcaacagacccatcttctcaaacaggttggttttgtttatttcctctcttttgattgagttgattttttttttttttaaagatgttggtttctatgctattgttgtggttttatgttggtgggtttggattgggtgattgtgtttttatggtttgcctgaacttgtatacttttgtggcttgtgcaaatgttgaaattaaatatctaagccaagctaagtagttgatttgtttgtgtgaataagactcttaagagaggttctatgaatagcttagccatattcaaaactatgtgttcttgtgtctattgactatgtttcggaaagaatttttgctttttaaaccaagaggaatagttctagtgatcaaatatatggtttgctctacaaggtctgaaatttgagtcctaaatattttaaggttagatagaaagaaacccaagatttttttttttttgaggaaagaatcttgcttttacttttgttgggaaaagaaaggcagctttttgcattattagttgtgaaattgttagaagattttctggactgttggatgacagtgatgataatctagtcatacagcaaagtaatggagaacagggtattgggctggatttttcttaatgttgtccaaaaaaaagggacatatttggatgtattttgattataagatttagttattcataataaatatttgacctttgggttctcaatttctacttttacaagcttgtttgagtttctttatcttaaatcttaagcttgatatattttctattttcctcttgtttgattgaagtcaaactaatttttgaattatatgaatcccttattcctccatatagttttaactgtatcattcattcactgattggatttatttttgtttctaaagatggagaaggcagtgaagacatacaaggcaaggtttgtggtgaatgttggagaatttggggaacatgatccactcttgcaaaatgtaagaccattttgatttcagaacttaaatccaactttaagtaaatgtgtaaaagtgagtaattggtcctttcttgaacaggcttctcagctggtatcctcaccgaaaattccctggtatgccataacttgcaatgatttagctgtgtcacaaagtttgtgtagtcatgaaaatattttatgcaggtacaccactagagtttcaaaatcacatgaagaaaggggtaacttcttaaaacaagtcaatttatcacatgggagaaccttaaacattattggattgaatacttggttattgcaggtatatattagtatgatgatatttattcatctaaacttctttatagcctttttgcaaaatacatgggagctttctaaaaccactcacacttgcttctctagcaactcgaaaatcaatgtagaacatggaaatcaaatatttgttttctcataataattaggaaactatggctgtgcaattaagtgaattttctttaagattttttctctgtgaattcaaatagatgaaggtgatcttaaagtttcagctcattgttcaattacaatgtatgaagtctatggtagcatcaaaagtttgttcacatcgactttaaaagtttctcaaagagagtatgtgatgctcgacactctcgttaccattttgtccatctaaagattaatcctcttccttcccacccatactcgcctactcccctcttgaatccgtactaatcgagttagcttaaattggcttccattgcttatggaggaaacttgctaacatatcctatcaagacatagtagcatattataatattgcagcatttttctttcattcatcttattgaacttactttaaacttgtagaatgtgcacccgggacctttggaggagacagaggacaatcaatttctctggctgacaagaacactagaagagaccagtggtaactggtaaattccaatctctattagctatagtttggacaatccttgttttctatgtatgtctaaaacattcatttcaaaatagatcattttcttatttatcaagtgaaaagtagtgttgcaatggctaaaaggctgcatagattttcttctgcgaaacaggcgaattattgttggattccatccattggctgactgcagagaaggggatgagaaaatggagacaaaccatgcttttgagactcttcagcagactctcatcacatttgaagtggtaagacttatttattagatatgattagtttcgacttagatgaaaacattaactgactcccaaaaccatcatttttttttcagaatgcatacataagtgggaaagattgctcccatcaaggtagcattggttacatagagaatccaggctcaattgtcaaagaacctttcctctcattatcaaatggaaggtcagaatctacaagaaatttgtaagacatctccgtcgaaggcggggtgcttagggatacataagcaatttgtaacatactatgtttgcaactctttaatggacttcctctcttttttttggttgttttcccagaacaccggtcgacgggttcctgcttcacagagtcagctcacttgagattgtgagtattcattgtctgttctctgcaatcatttgtgcccatgatgaactcatgcctaaatacaaaacttgtggtttttgttgatgacaggttacttattttgttagttcagctggagaagttgtgcacagaagtgttctccaacagaggggcaaagaggtcatgtagattccctacatctcttctagctctttacacttagaagttcctttcttcttcaaattttgattgaaatgtgtaaattaatatttggacctaaattccatttatttatgagcaatcaccataacccttttttgttagcagttgtaaaagctagtttctttttctgtagttattttaaaaaataagaaaatactcatgggagacaacctttaagactatttgaagaagtttcaaactgatttaagaactgataatttaggttagctgagaagagaagagtagaatggaacattggtaagtggtaagttgtaaaattcaatctttgttgcttgcttacagttactctagctctagtttttgagtgaaatgtgattccattaagtgattctatgaaaaagaaaattacatgtcacaaaacataagtataggttccttgcctcttattgatatgtatcaccatttcttcttctacaaatcaagtgcatttctccttcaattccaagcctttgtttttctcttcctaggctaagactagtttcataataatattagcataacaaaatgttgtgtcactgtcaaatggcatttccccctctttttaattacaaataaaattttaccaatgaataaaaatacaagtatttacttaatattcattaatcaatttttcaattaatcccctttctcatacttcagagttgagacgtgaaaacccaaattatatttgctatttaccattataaccctccatattctccccaaacccagaaatagcaataagggcaaaagcggaacaaaagtgataattcattcatgggtataaaataagctcagacctcatcgtttctcggcatcattagtttaagaatgag

SEQ ID NO: 16425 - DNA, 8059 bp, Cannabis sativa
caatacttattaagtttcctttaaatttcatatcactggagactcaatatcattctgagctaccagattacttttcataaaagatgttgggagcagacaaatttcctactacctctatttcacaaatcctaaccctcaaatctatccaataactagattaaatctggtggcattcactaacccttttcggtcattgttattataacattatcttctttggttgtaaagagaggatttagtgaaccctccacactcaatatcagtccatgtcactggagaccaaataatcattttataccatattccatgattattttttatgttattttcccttcttttagaaacacaaaccaaactattcaagctatgatgtaaaccaacacgttaaaaaataataattaatgttcagatcattacttttaagaaaagatgttccgaccagacacagttcaaggaataatgagaaaaaaatgttcaaacatatcagtatgtctaagtggaaaaataaccacaaaaatacatacataagatcacacaaatcacataataatgtagtacctacacacccatgcactttaagcagaccacaatatttacatctattcaatattattaaagcataagcaaaatagagtatatgacaagccaacaacaccttgccctgtttgtaggatttctttggttccagtcattaaatgggccaaaaacttagaacgagcagcatcatttgaaaacaaagaacgtcttacagaagctagtcgcaccaagcactccagtgcctagaaacaacaatagtgaaaacccaagagaactgatttactgcagcaagcaacacataaatctaaaaagaaattcacatttcaaagaaatataccatgctgctaaaatgacatcttactgtttcctcagaacaagaaaattatgttttacatgttttataaataaaagaactgacataaaatcattaatttaacatttgtttgattcatataagaaagccaaaatgttggcttacagtttttcaattatttgagaattacaagtgttatcagctatctagaaaataccagaaaacacctaactaaatgatcaaatgatcaagtgttaattgtcagatggttatcaattattagtattatatagttagatcatgataatatcctcaaaatgaaaatagtacgttatgaagaaaattgtgaaatctaagaacacggaaaagcaacagacacaatgagaaacaaaaaatataggagcaacagaacaacttcaagacacctaataaaatctatcaggtaaaggacgaatgtggacttcaatgtcatatcacaattttcattctttcaaaaataattttaattctctgtttcaaaaaaataaaataccacaatcctctctccataccccacaactgcaacacaaaagaaaaacaatattctgtctacgtctattgatttttctcattgacagcacagcacacaacaaaatcttagtgttaatttctaaaatcatcacaataactttatcaactctacgaatttagttatgaaatggtgatttaaagaaaaaaaaaagtggtgtcatagcaagggtaggatgcgggtcagcaatcagacttcatttaaaagaccgtggaagcttaattttggttgttaccctaaattcctcaattgtgatgagatctataataagaaatggaactaggccactagaagctggtttcctatatttatatacaatatgttagttgaagaaaagagtgatatctgagctttatttgactcgtaggggagcaatggatgatttttcttcttgaaatgtttcattttgaagaagtccatatggcaagtgaattcccaattagtgatatccatataaagtccatagcaagtgaattcccatcacagtgttttagttgtacacagtctacagagcacatcttcttacattctcaatttgcagggaatttttatggcctaagtttctcgctaaatttaacatacaattaattgttccaaagagctgttagaaaatgatggcccaagagtttgtaaaagactttaattttttattctttattctctattcgtttaagttgtggtgtgctggccatttggatggaaaggaatggtagtaggactttcaagataaggagaatgagatggagtacatacgaagaaggatcaagcttcgggttgccatatggctacagagttatttcatgatctttgatatatcaagtgattgggagtgtttttagaaatttcaagttgcccttgtttgaagttctttttatagctggacttgactggttagttgtttttaactttttaagtgatgggctgtacttaatagtttttgcctcaagtgagtctggctttagacatgctgagaaaacaaaactaattgaattactttaagagcctaaattcatcaatgtattaccctactttattattttaaaaatcaaacaatccagcaagtcaatggcaactaatacaatatcagtgacttttcttttaacatgtgtacagactaaaattgactacaccataagattaaagtagcactaactaaaaactggtcatgaagaattccagcagaattccagcctacaccataagatactgcccacataacctcaggcagaattccagcctctaaatttagtgggttggactcaaagtagttaatctagtcaaggagttgcaaaaatactcactattaatcgactagaataaggacatctggtatccagagtgtgcagtcagccaagtaaccatgaatgaagtttaacactaactccacaattaatatgtaatacaatgctaattctctagttcaccaaggaatcactactcgaaacaaagctttactaagaccattcaagggcatgactcagactcccaaaggcaagaggtaagattcaccttgaatctcaattgaaagaattgaaagttgttaataatatgcttgaaacctaatctgtccatcctaaacaaaagcaagagttacagcaagaagctatactttctaatcacaagcataacaataagtatcattgcagtgaagcgaagataaattgtgaatatattgtccaacaagtcataaccttatattggaaacaacaaaagatgcattattacctccttcgaaagaggggactttgtgatggcatagtaatcaaagaatatttgaagagttgaaggatcctccaaaacaggcctccaagaggaaggtatctacaaaatcagcattatgtttactttgcaatacattacacaaagacttattgacatatcattaaattgaatctaattcaaactgaggcggtaaatacctgaacggtgccaaactcctcggaactttcatcaattgaggtgccaacaaaatcaaaggacaaacacttaagtgaaacagaaagagccagctcttgcaatcgatccaccactacaaatgaaataacaaaaaaaaaattgaccaaagctgcaaaggctgtagagtagcatacaaaggtaatacacacacacaattgaacatatatatatatagatatagagagagagagagagaatagtctaccgtcattcttccgctgggccaatgaagttaatgatatttggaatatttggaaaagtgactgatctctaaagttgcaggcaacccttcgatgatgtgttgatggcaaaccaggattaggctaaaattttagcaatttagacaaacaaacaaattagagtgcaaaattaagatggatacttagtaaattagaaacagataaagaaagcttcaagcacaataaatcaaaaccatacaagagtgcaaagagaaatcaaaaatcaccctctaccagaccaaatcaataaataaatctaggatgtctagcaggagatgatgaataaattaacttacaataaatgaagatgaaagcattatttaacctaaagactattgagtgaaaaaataaaatgtcaaacttgaatgatgtacagtttgtgaaaacaaacaaatctagtttttatcatttctttctcctcgattctaagacctatactgcgaatatgaatcttttaaatttaaacacgaaaaaattgaattaaattttatggaccaattaagaattgagtttacatgattcaactctgattcaaaaaataatatcagcaaaaaaaaaaaatgttgggttgcctgaaatccatcttcatcttgtcatgtatctacgtttgcttccaaaatagctatctattcaggtttagaacatcattccctatagcctcaatcaagaaaaaatcgcactttacttctaactataatcctgcaaacctaaagctttctctttgtggtaagactggccttactaaaaccctttaaacagcaagtttcatagcttcaatgccatatatcttgcaagccatattgattccaagtataatatgccttcatggtaaggcaatctttgtaaatcgttctacctgttttatttttattttctttgataatacaagtagtggtgttttgattaaaatataaatatatctccttcatggaaaataatgctccaaaatagttgttatgataaaattgtattatttacagtaaaaagataagatggggtgatgcataagtatctctgaaataaagtttactacatgatccttccaaaatgttctaaagaaagtaatgaagaactttgagcaccgaattgtgattttaaacaatgattaccgaaaaaattgagtacaaacctgattcatctcagacacaagctgattcaaaatcttcaaaccaatggtgtagtgatctgatgttgcctggtaaagtaagaagttcagtgacccatcagtttgaaagatactactagtttaaaacaactacatggtagcaggcagcattacaagttggaactgtcagaggcagcaccttaaggttgaccaatgtgtattatcaacaaacacattgtaaaactagcaatagcattgttaggaatagcaccgtgtgggaaaatattatttaaacactctttcacttaagttaggaataaaatgagatgtgtctctaaagcgggtattaactcaagtttctctttacaaataatacataatacctttactgtaagcctagcacgtttacgtttagtgctaatcgaacaacaagatagcaaccaaacatcaagaatcaaattactattgcaacaacaacaacaatgatcatgatcatgataatactaataattcaaaataacaaacagacgtagcatccttaacaataagcaagtcagacatgctaaacatcaaatcacaagggcacgcacccactatgtcaaagacatatcacctggctcaagaaattcgtcgcctcttttaccacctctcggaaccggtcatcatcaaaccacccaaactttgtaactcgacataagagttggattagagaagcagtcacaaaaggctgcaacttaggtcccctagtaaacaaatagttgataaggtagttccctgcagttaaattccacagcagttaacttacaacataagcttaaaacaaacattcgcatagatatcacattcacggcaaactcattttgtaggaaaagatcgaagattacgaatgtcaagacgaagctgcaaagcaaggctatgctcagtgacttgctttagtaaactggaactggccaacatcaatgcatacggggtaagtgcattgtcaagaatgtattggcactgagaaatgtaatcagtattgacagagaaacacttgagcgtattctctgcgtgagctcgttcaactgagtcctgagaagtgtacagcctctcacacaacgcttccagttgagccaagctctccattaccgcaagaaacctaacattatcacattttcatcaaattccaattaattaccaattacgccatgaatatatatacatatctcaaattaacagaatttatttcaattcaatattatttccgtttgttaatatttggatcatcatcgattagagaaaccgttgaaccagattttctcggcaaccaaacagattacaaattcatataaaattacaactccccaatctgaaaaactcgtcagagcataagatcgagagaaattaccacagcaacgccgaaaattcactgcgtaacacaaatttccgataaataaaaaaccctattaattattttctacgggataaaaactcaagagcgatgaaaatgaaaataatgagaaataatgatcgatgggtatatcgtatatgtggatggaatgtagcgaagaaggaagaagatagtggtatatatatagagagagagcgaggttaagagagttgagatggatctgagatccaaaatggtttgaaaggagtgagttttggattgaaatagagaacatcgacttcagagtccagactacggattccgtttttgggcttccttgctgggttggcgtcccctacttggctttggtttcttggagagtctgcaaatacacattacgatggccgaaatttaatagagaaagaaaaggactttgttaaaaataagtaagtaatatttatgacactaatattcaacaaaaacaaaaattatgacactattttttttcttctcaatattacactaatttattttttttattttttacatagtttttttttcttttaggaaacatttaggtgatgtttagtttagtagaatgtaatattaatgatataataatgtaatgaaataagaatagtaatgaccctttcaagaaataaatagtaatggaaaaaatttttaaatggaaaatcaaaactttattaatcatcaaattatgttatcaaaattgatgataaatcaattaggacattcttaaattgaagctacgatcaggataaaaatgagaagttctaacaaaactatgaacaattacattcgtggattgtttcactaaacaaactttcacaaaaggtaaatcgacaaggaatgctttacaatctttaatgatatcaccaaataaagaaatcatagagaatgaactcctcaaagcttgcactctaaaaaatcctgctgccacgaactctgcttaatctagctgagagcttcccgaatgctcacagcttctggaacttcagctgcggttgatccccgaaaaaaactagtttgtccttcaataaagaagcctttctcatcttgagcaacaaagccataaccaaaaccatttagctcttcaaaatagcactatctacattaatcttgacactattcaatggtggaacggtccaaatctctgcgccattattctcggtcaaaccagaaaatgacacttccaaaccagaattttgagcttgattctattgttcaagatagcttacagcagaggaaactatttccaaagcactgacacacttttgattccaaaaattttcattttgagcacaccaaatttcctaacatgtagcagccaacaaacattttttctcctgatgcagacgcgtaaaacaagcctcaaaccaacagaaaaaatctgcattgttcgtcctccctgtacctattcctactcggttccagaccaactgggcaactggacaagaaaaaaggcaatggtgaattgttttagcctcactttgacaactaggacaaacaagattaacattcacatgcttagtttgaagttgcaccatcttgggggagagtgcccgaacaagcacgttaaacactctaaaccaaatctttaattttggagggacctttaactaccagaatttcttccagaaatgagatgaactttatgtactccaattaccattcaatttttggattagattgtaggtcaattttactgaatacacacctgacacttctttagtccatattagcttatcttatggagaagacaaaatgagaggaagactaagaatgagacgactgtcgcacttattaaacatgtcattaattaagtccacgtcccatactaatgcacccagtgacggacccactcgtattagtgtgggggctatagcccccaataataaatatattaccttttaaaaaattaaatgtaatttttgttataaatagtattaat

SEQ ID NO: 16426 - DNA, 2822 bp, Cannabis sativa
aaaccgtaaatttgaaaaaaaagttaaaaaaagagcatatggggtaattccccttataaataataatggactccacaaaaccaaggatcaaaattaatttgcttggaaaataaaaaccacaaggacaagcagcatgtgcattaatcaactaaagttttaactttacgatcaataaaagatccctccatctctcaaattacaaattaataattttctgcttacagccactaatcaatggtgctccgctgtatactataagataaatttggcgagaataagttgttttagattacacaattaggaagatataaaacaaactcaacaagtattcaatccgcttacacgtattaatcataatcaagctaaagaactaggaatttaattagcagggtaacttgttttaaaacacccaaagcaagaagaaaatgaccaaattcttaaaacaatcattgcataaaaaccaataaagttaggtttaacaaattattcagtccgactggatgtgaaaaatggaaacacatataacttgaaacaacttataaggcacagaaaacagaacatgcagcttatgtttagagttccataatttgatatttccaaacattcaaatgaaatcatattagaagatatcaaattaaagaacgtacggatgccggcacttccagcggaagatggagtcccagaagccgcagaatttccctcaagggcggtggcaccgccaaataaaatcaacctggggccaatgtaacccggcgtaccctcgtctcccacagctgcaaccgccgtcaacgtatgaccgcacctcggccccggtccatcctctttcttctctataattgcattcacgaccgtgtaggtcggggcatggcgcggaccaaccaccggagtctgctgcacctgagcaccagcagccacgccctgctgctgaggctgagtttgctgcgaaaccggctgttgcgcagacgattgcggaggagatccacctccggcttgcgactgctcatctaactgctgttgctgctgctgttgttgttgttccctatccatggcaggaggcgaagcaggtgttgttgtcgtgctatgattctccaccgccggatcgtgatcgttctccggcaccatcgacgcatccacatccattattccaaccctttgattcaagtcctactttaaagatcggagctagaatttaaccgaattagcattcctaatcaacatttcgatcgattccaagaatccaacccaaaaaaaaaaaaaaaaaaaccaatatatccacacaatcgaaaccctaggcccggatcctccagagttgtattaatatgatccaaaaaagaaaatttaggcggataaaactctcccgataaaatctctaggttttcctctcggaagcgcttcgagcttgaggttgaggaatagaaaaaggagacaatctcaaagcccaccccaaaacaattacaaagcacatcaaaagtgagataaaaataaaataaaataaattaacaccaaatctcttcctttctttttcctctctttctctctctaaaaatctctttattttctctctctacctatggctggctcaaaaaaaaaaattaaatgcaaattgtaatctgttatcacttttccttttttaattaatttttctgttttttttttttttttttggttattttttgatgattagataggataggaattgggaacggtgttgctcatgtcgttttatttttcaattttattttattaccaaaaaaaaataacaaattaattagttaacctaatcgaccggttaaaggtggaagagcgccgcctggtaatggtgtctaaacggagtgggttaccggattaaccgggagggtaaataactaaaaacggtaatcaccggttttaatcctatttataagggagtttttcttttttcactaaacatggaattgcactgaatttagaaaaggttaaaactcacgctcttatacatatttaattttccttttgggtaaattagaataaagttttttttaccttagattctatcacaacatgtcttgtacttctttttttaaaaaaaaaataaaaattgctgcaaatttattatgctttttttcaaacattcaatgcaacaacattttttatgcttccaaatttattatatttttaatttttaatgatatggtcattaatttagtggttacaaagaaactaggatatcaattctctcatgttgacttaaagtaacattacaaagaagaatatgcaaaacatatcatattatattatgatgatactatgtactctaaaaaatctaaaattttaatactagtacgtaatacgccaaggttgtagtggtaactcgtaagttggaagttggaagttggaagtttacatcaacaatattaaaatttaaatttattcaatatgtgaaaaattaaaaatgtagttaaaaaaaggagttatgtttattttatatatttttacgagtaattatactttaaaatctatatatgtttgaattattgataaaaagaaaattatacatatatttaaaaaataaataaaaaaattattttcgtaaagaaatttttctaatcaattaatctcatttttatctatagtgcatattttactaaactatatactgtaatattactattgcatgttacatgttaatgacatagaaaagacatataacaaagatctaatcgtactaaggatacaagttaaataaatatttggctaattagcaattttttcttcgaactttgacatataccaaatcatgtcctctgaacttttttagtcgttaaaaatttcccatgaattat

SEQ ID NO: 16427 - DNA, 3864 bp, Cannabis sativa
gtaaagatgacaagaaacatgaatttttgaaagaggtattacttttcaagtcattataacatttctatctataaatttattccatttcacgttttgtttgctgcttttaaaatttgttgtagattttcatggcatctgtctaatatgtgtattaaactttttaaattgtactctttttatgaaattaatctgcggatgcgatgggactcagccccctcggtctctttgtatctgtttagtgaaaccatttcctctctggggtttgtcaatttatttttgtttccctttcaggtctttcctctctcttttccttctcttcttttttattttttgtgaagctatccttttaaccttcgctgtgttgactaatgaactttatcagtatcttctaaaagacagtaaaaaaagagacattttggttcgtgaggtatcttatcaaagttgttgctttcgggtatcatgacatgaaagctctgttcttttatgccaatgttttgcaggttgaagttctaagtcagctacaccatccgaacattgttttattgcttggagcctgtcccgagaatggttgcctagtttaccaatatatggaaaatggaagcctagatgactatatctaccaacgtaatggaaaatcacaacttccatggttcataaggtttcgaatagcttttgaaatagcttgtggtcttgcattcttacacaatgcaaagccagagcctatagttcatcgagacctaaaaccaggaaatatcttgttagatagaaactatgtaagcaaaattggggatgttggtctagccaaaatcatttcggatgttgtgcctgacagcatcaccgagtacagagactcagttattgctggtacactcttctacttagacccggagtatcaaagaactggcacaatcagaccaaaatcagatttatatgcttttggcatcatagtcctccaattgttgacttttcgtcatccaaagggacttgttacaagtgtcgagaatgctattcgacatggttccttctttgatattctagataagtcagttacagattggccaatagaaacagaggaattagctcatattgctctgaagtgttcaaatgttagatgcagagacagacctgatcttgagactgaagttttgcctcttctcaaaagattggctgatcttgcaaatactaatgtagaagagaagaagaacatgcaggcactaagccactattattgtccaatccttcaggttaaaattacatatgtattaacactggaatttaaatatatattcttggaaaaggtagcataaattacattatttatgtaccattttgtggttgatgcaggaaatcatggaggatccctatattgctgctgatggctttacttatgagtacagagcaattaagtcttggcttgagaaacacgatgtgtcaccaagtacaaagcaaaaattacagcattctatgttgataccagaccatacactccgatcagccataaatgattggaggtcatacgccgcatttacgggtatccaaactaaaggaggtgacagttgaactgagcacaactactttcattgtcccttgaacttgatatttggattaagtttgctttgatagttggtacagagaagagaagcatacatatgaaaaggagctataacaagagtaattataataggcatgcgtggttgttcaatttgaatacaaattaggttgtattctgaatgtacacccaaatataacaagagtcaaaagtaaatatggttacagctttgtcaattttgttatttagtacataatatattttcttcctttgtacaggttctctctcaagttatttgcagtttcttttatcattagaattgggttcatatctaatcaagggaattaattgtgcatcacttgagaatatctttactcagttacaggaaattgaacgcgttcttcttgcttattcattaactcattttaatttataaaaattttactcattggaaaaaaaaaaaggccttcgttgtagatttatatatttttttataaagttaattaaaatttttgccccgtaaattttgacatgtaccaattcatgtttttgaacttttcaagccgttaaaaattctttctaaattactaaaattgttagatttaaagactactatccaattttattcaattttgctaatgtggtgattgtccatgtactaaattatagtctctgaactttaatatatactaaatcatacactctaaattttaatatttaccaaattgcgcccttaaatttttatctacgtcatattttctttattaaaattggacaaaattttttaaatccaacatttctaatagttaaggaaaaaattttaacgacctgataattttaaggagcatgattagtacatgtcaaaattcaggagacagtctttatataaaaataaaagagagtatcatcaagcattttaacaaaatcatgggttgcacaataagagcaaacgtagtacgcacactacaaagacgtctctcaaacaaatgctatagtcattaaaacatttttccattaaagctctttaaaaacacatacgtgatgattcaacacgggtgttagttcccataaatcacaactgttttttgacagttagttcagttaatactgttacagtttcttgataacagttaattaactagactgtttcttgattctacgtagcctagagtctgtacagtgctcgatcatttcaacacaataataagacattttaagacagactaagaagagtttacagagttgagagagctgaggtattgggttttgaattgaatggctcgactgtttgagaaagagcattcttgggtgtgagatgagtgaaacactggtgaggttgagtgtctcattcagcttcattattggttttctttactcagttcttgatcaaataaaggagatagtgattcaaaggggatgtagagacaaagatcacaatttgtcattgaaccagtataaaaaaaaatctgtgttgtttctattgttttctgttttgtttttccttagattactaactgtttgtttgtgttcttgttactactcttcttgatgcttttgttgtggattttgatctgcattggttcattagattttcccacaaacaccttaacaatattcactttcattctgtcaagactcaagaggacaccatctcatcagtttaatattttattttattttcctgtgaagtaaataacatttgtatttatttatatatctaattatctgtacaaccccatttgctgccttaaaagttaaagcaactccgcagccaataacttacaagtttttttttcttttctttctgaaatgaataacttacaagtttggtggtatgaaattgtgttataattaattatccacttgtgtaaattccaaagcattagcatctggatctcgagcaaatattgctggcctccctgacttgctaagtgtgtaaggaatacctgcaccagggaaattgcatgataagattaagaagtccataatctcttaatgcactttatagatctaatcattttaagtccttttacatcatcattaacataaaatgacttaaaaaaaatctatttgtaaaagtaaatggccacttcaaataactaattttagactcactcaatctctctctcaaacaactttttcttttcactcgtaacattgatggtcactctatctgattattttgccaattatacactttaatcaataagaaacagttaattgttaacacaaaactcttcagtcttcactcacagtcacagttaattgttttaatattgtaatattgaccatcccagaccagaatatggagtgag

SEQ ID NO: 16428 - DNA, 4714 bp, Cannabis sativa
  modified_base (3295)..(3298): a, c, t, g, unknown or other
  modified_base (4655)..(4662): a, c, t, g, unknown or other
tatatgtgtttaaattacattgttttagaaattcatatttagagtgttaaacaacatacatggtagtaaatttagatcctggtaaaaactataatccaacaataatgaagtatgacatgagttaatatatattcaaaatctgctaaatcactcatgttatgttcgtcatgtagcattcagatcgagtgactccatgatattacgttgatactggcacatatattacaggtaatgttggagacatctctattttttccctgagtatccttagaattaccacggcttagtcaaaataaattattttagccataataaaaagaaaactgattatcgaacccctttcacgctcatgtcacgtcgaggaactgtagaagaaaaaactgcaaaacccaatcaaatttatcatattagattagttaacatgctagttaactataacgccacgtgtatgattttataaactagtttaatactaataaattaattaattattaaaaatcgtgaatatataaaaacttgacaaaaataaaacacaaaaaatagacatcataacaacagtgagaaggtattccagtgatccttattatagaagatttactcaaaagactatatacaatgaaaattcaaaatatagcagatactactagtccaaaacaactccttggaactcggaagaccggtggggtcaatatgtacattgctggagacggcaatcacctcatggcagctctaactttttctatacccttagctgcaccacataggacccctgagtcacaaggactcagcatgaaaaagtaataataataatcatattgtttattattcaaatagtatcatttatacacaatcagaatcaaaccattactcattgttcataagatgaaatccaaatcactattggcatctaccatgaataagcattagtatacagctatctggtaatacaaaacaattataccaataatggcaaacatattcattaaataatataaattatatatatgctacctcataaagtaaccatattgattacatcacatttcctaatcatgttcactgccaattttgtgtatggtgctaattctatagagagtagattggagttgtggtccgccttatctaggataaaggtgcaaacagcttggctcattctgggagacttcaatgcgggttttcatcacgatgataggaaagggggaaagcacatttcagcttctgaacatgctaattctatagcttggtatgcccaagcagatgttgaaccgatgaaaagaacaggttctaacttcacattgcctaataagaaggctaatagatttttttctcgaatacatcatgtttttcataatgaggcttggttagatgattttacaaattctcaggctcacttttcttgggaaacttgttctgaccattgcctttgcacaatacacatggtttcggctgtgaggttagccttcaaaccgtttcaattttataacttctgggctgagcataaggagtttaaagaggtagtattagacagttggagtaaacagatgaggagttatggtgtccaaggagtttatcttaaaactatgaggctgaaacataaagttaaaaagttcaacaggcacttgtttggtgatattggagaggcttatgaaaaagctacgaacatttacaaggaagctcagctagttctccaagttgatcctctaaatagcattctcatagatagagagaaagtggtagctcagcagtttcaaagtcaggagtagatgtacttgaatttccttagccaaaagagcaaagttagatggattccaagaggagatgcttatacggcttactttcatgctttgctgaaaaaaagaaaggatgataatagaattatttcatttgttttagatgaaggcaacttgattgacaatttctcagatgttatcaatcattttctcaaccattttcgaaacataatgggtagagaaaacccgactactttggctattaagcaggattgcattgctatgggaccgaaattcaacattgacctaccgatttctctcttaaaacctttttctctcaaagaagttagagctgccttatttagtattcctagtattaaatctccaggtcctgatggatttggtttgggtttttttaaatttgtttggcctgagttggggaaagatattcatagtgcgatcactcattttttgatacaaacagattcctagctaatcttcataataatgttatatctttgatttcgaaaaatcataatccttccagggctaatgattatcgaccaattgcttgttgcactactttgtacaaatgcatcactaaactcttatgttctcgattggctagagttcttccaaatttattcaatcagaactagggtggttttttcaaaggaaggtcaattgtttacaacattttaaattttcaagaccttttgaagaattaaaagaggaaaaattgttgtgcactattaaaattgatatcaacaaagcttatgatacagtcaactgggactttcttgagcagctgctgatctcttattgttttcctgctaaattcataagttgggttgtgacttgtgtgagaaagacatcctataccttacttatgaatggaagatttcagggtacttttaaaggagagcagggtttgaggtagagccggcaaaacgggttagacatgatgacacgacttgaaacccgcacaagagttagcgggtttgggtttgccttaaatgggttcgggtcgtgttcaggttgactcgtctaacccgtttaataaacgtgtcgtgttcgggttgacacggctaacacgaaattgactcgttaatgacctatttaaagttattttagtactttaacgtgtcataaatgggttacaaacatgttgaatacttcataaacgtgttattgattgacatgtttaaacaaaaaatatacatataaacgggttgcacgggtcgtgtcatgtcaacccgtttataaacggtcgtgttcgggtttcatttttttgacacgattattaaacgggtcgtgttcgggtcgagcatgtacctgttatccatgggtctcgacacgacacaaacacgacccgcgaacacgaatttccacccctaggtgtagtgatactaaacaataggggtggcaaaacgggtttcgacacagcacacgaacacgaacacgacataaattttacgggttagggtcgagaaaattagatgcgggtcaaaaacgggtcgacacgacttgacaggaattaaaaatgggtcaaacacgacacgacnnnnttaacacgaatgtgacacgtttgataccatttttttaaacataataaaataaaaaattattaataataatataattaaataaaaatatatatttagtgattcaatgtttaacttaaaaaaattttaatttaattttttttaacatgaaattgaaaatatttttattttttattttttattatatataacaaactatatatacataaatgtatataagttttctaatggagcttaaatctattatttttctctacaattctagcttcaacaatagcaaaacaggtcacaatgggtcgacacgaacacgacacgattttttacgggttgggttagggttaagataattagacacgagtcaaaaaaacgggtcgacacgcttgacacgaaatataaaagcgggtcaataaaatatgacacgaacaagacacgatgacacattttgccacccccactaaacaatacatgttcccaaaagtattaggtaagaacgatatcatcaaaaactctcgggcctacaccccttgtatattataaacactaatagcataggcttatagacatttcgttttacttttacatttcgttggtaaattcatcctgccaaatttcccacattactaaccttcaaatgcaattctgaagttatcgaatccaaattttacccataagggagttacaaaaataatctacaacttgccaaaagtgggtcccgttatcgtgattgggactccaaaaattgatgaacaagctcagaagttaatttttacttttaaatcatcatctatggtcacaataagacaactttaattttttattattttattcctattttcaatggcctccttcactaataaaaacagagctcctctagctcatttttcatattcagaaaagtacccataaggggagggcatctctctctagtttctctctctaaaaattagagcttaaacacttatctattttactataatatcatctcgtaaaaaataaaaacttgaagtagacgtagctctattactgtcgcgatgtagagagtgaactctgtctagattttttagtcaatattttggtactttcattaagagccacggcttaagaaagttactttcaagatggctgcaacacgttcttctagtgttgacagaggaatccccacatatagccaaacaattgggggcacaccagttactaaacctgggactagaactactcctacacctcacgtgcaaagaggaggcaccagaaccagctctaccactttttctcgaaggccaccgaatgctcccggtattggaactgtcaataagatcactggaatatcctttataggtagctaagtgttttaaagataaannnnnnnnaagggtgtaacggtaaattaatctctattcaatgtaaatcatcgatagagga

SEQ ID NO: 16429 - DNA, 5785 bp, Cannabis sativa
gaaagtgctaattttttcctccaactgacatgcttcccgatacaattgttctccagtgtatagatatttctgaagtagtgattttgacctagtgaagttgatagatggctccaataagtcgttgataatggaagaaatttcatttgtcgtataacttttaggaacttcgtcttcgagggaagatcccgagcatgaatccacagcttcgcatcccacctccttggtacacaagttagctaacttcttaaaactgaaaaaaaaaaaattcaaaacgaaaaaggtaacaatgcagccatacaaacagggtagatctttaaagttcaaacaataaattcaaataggaaaattattttggaatactgttataagtttcgggaataaaaagtacgagtggtccctaacactctcctcggtgtcacatcactaagtatcaaatcccatataatttaatataataacttttacaaagtaccgctaaccaataacaaagagacacgtctagaaggtgttaagcaccactgtaatccaatagcaatactctttgatcaaacaaaagcaataaaatttattattctatataggaagttccaacaatgagatagaaacatgaaagttcaaatgatgatacctatcgtaataacgatgtaactttttagttggaaatctaagagcttcaacataaatgtgggctaacaaactccattgctgctgagataactcaaagtcaatgtatttgtcccataaagcatggcataaataatccttaccaacatatgacaagcctcttctaaatagtctgcaaatttttccaagagaaacattagttgacttcgcgatatctgagtaaattaacagaactgctcaactcgagccacacacacacacatgtatatgcacaatgaaggaagaacagttgcagaaatgccatggcccataaacacttcattgttagaaatcggtctttgatgtcaccctgattcaagaaaagacctgtggcctgcacaaatctcatcctcgaaactaataaaatagaggacagtaggaactatcaacttaaaaaattgctcaaaattgtttcgaaaggatgcacgatgtgatactggttcgttggaaattagcttcgcggatttgaaaagaataccatctctgatgtaagaagtgattttcgaaggaaaataagacagttttggaaaaagaagcaaccagaattttcttgatactaaattcaaatgaatactaaaagaagaaaaacttgcttcgttttaagcacacaactttgttccatttaacaatgtttcagtaaaggatggaatttatacattcaatcaaatgtccttgtttttctcaacaaaatggaatttataaactcagcaaaagttgttaccaatgcaaacaagccataccaagctatattctattttaaatattgagttacctgcgaatatcagacggatcctcgaaagccaacatactaaagttacagtagtcaacccaaacaccaacagaatatgttgccaattgcagagctctttcgaaaacttcaacaacctcgcctacatcacacaagcgggccttatgaccagcgtaccttctccagtatccgtggcacaaaggaaactcggacaagaaggaatcataaactaagcaaattttctcgatattatcctgcaatgtcacccatagcaaaccatacttccactcagggtaccaatctagaggcagcaaaatgcaataataagtaaagcaacaaccaagcttaagataatttacacatgtaatgagacattttttgactaattgggtgttaagcttaccattactcccctcaatcaacatttaccaatctgttaacatccattactttctaaatgtaagacttttagtttggtttttcattaaaggatttattgctttattaaaatagaggttgaggagaatagttatttgttgtctagtgttaataagcttagtatctgtgtgaagtctagtgttttttataaacaattgtgtgaagtctagttgaagcagagagattttcagaaggccgagtccaactagaattttgttgctaggtcccctccctaactctagaaatacatattctctcatcagaattgtatgttgttattgatatgatctaaaggaggaagacttaataagtcaagtgttttttataaacaaatgtgtgaagtctagttgaaacagtgagatcttaagaaggctgagtccaactagaattttgttgttaggtctcctccctaactctatatatacatattttctcatcataattatatgttgttattgatatgatctaaaggaagaagacttagtaagtcaagtgttttttatgaacaactgtgtgaagtctagttgaagcagtgaaatcttagaaggctgactccaactatatttttgttgctaggtcccctccctaactctagaaatacatattctctcatcattattgtatgttgttattgatatgatctaaaggaagaagacttggtaagtgagtattgtactaccaataactatgtcttcaatattgttcagctaagtgttctaaattatattagcatctaatgttttataaatttctaacagaagcagaggccatcggagttagttagagtacaaacacaactattcaaaccctgttattcttcttttaattcttaccaatgatgccatatgtttcactttcatgtaataaaatttaactaaactcatgccaaatgccaattcaagattgtgaatttctgaacttacaggataaactctctcaatctttgtaataagtgaaatccactcctcaaagtttaatgagccttcgtcaactatttcatgaaaattgagttcatcaaacccatctgaaaacaaattcattataacaccattagctatacaagtttcagtcatgccctaaattaaacaagtttggaaatttaagcaaccccagatgttagttcagctcaaaattgaaccttttttacaaaattgtttatatctcaaaaaacccggttaaataaaacaaaattcagtgagcacctggagaatcggaatccatagtctgaggatgagtttctggttcggaaacattaatttgggcttccattatacataccaatgtgaaaaagttaaagaaaaatcagctaggaaatagagagaagagaggaaaagaagaaagagttgtttgttcttcattggacagtttccgccattgtttttgagctgttttgttgtcgtttagagcaaaatgacatgtcgttttgggtttagcttcatcacatattctcataagcattctccatagagcaaattagattagccattttctatattattaattaaattaaaatgtgtgagatgtaattaaaatgattaagaattggattaattaagaattagattaatgaattggaatcaaaatatgttgtttacttaacttgtaggatcagaatctaaataataatcttgaaatcggaataaattaaattaagttgtaaaaatactttttattaaagttttattaaaattttttagtttaaaaaagagtaaaaatgacattttattattttatattttttaataaattattaaattaatatattaaattttacatcaaaatttataattatacattagaagaattttatgtaaaaatatcacaattttttttttttttatataaaaaatatctcaacttttacatacaataatcctctacttctgctacctaacataacttccctactccaaccaataacaatgcaccaactgtacggtcacaagtctcgtcaagagatcagaatcagctgcacctactacccaccataactttcgtgtgccctaactccatctatatataaaccagtagctttcgttttcgttgtcaagtacaaaaaaaaaactgttaaaaatggcgtcgctttctctctcgtgtaaaccgtcagttaatactactttctctctctacagcaatagccatagctatggtttcctctctcttcgaactcagcagaagaagaaaatcgagcgagtcaattttgttactcgatcagctcagattttgaacttgaattccagctcgagcttgagcgagcttaggtttgtaatattcgagcgatttcatgtctgaattttttgaaactgtatcttcttaatgttttggattttggttcagattttcgattggaaacgagagcataatggcggtgaagaataggaggaggaggggatctggtgcggtgtgttatgctgcgccactctctgttcggaatcttcaatggatctccacaatttcttctgtgtaatcttctctcttatctctttttgtatatgtgtatatgtatatatgcaatgccacgtgtcagctcgatatctttgttttctgagcttatcgtttattcagctaagtatctaaaaatgattactttgttgggtaaaggtggcagttttattagctagtgatttgtattggaaatgtagtgttttaggtagctcaaggtgaattttgaacattgtatggcctaaaactatcaaaactattattttaatgggctgagagcttcatcacattcttgtgaaaaaaaaggccttgtctactggtcattactgtagtgggataaaagttaggaaagtgtttcctttcttatattttcttgtgtttgcttactaaatttgaaacataaaatttgaaaatatgacaattttttattagttcctcttcctttccaaacactttctcttttaagtgtctttaagaccaaattaatcaacagtttagaaaatttactgtcatgttttctgatatttaatgaaaccacactcagtttgtttttggatagctcctttgcaatatatttttttcttactgatactattgaatgaacactgtggcctgcttaagtaaaatatgcattgatggatgttcaatcattatgccagggttttaatgcttgttaagggaactggtattcataaatcttttctcattccattgtttgccttacaagcaccagcaagtatcgtcgcatggattaagtaagtctttcagatattctatctaaaatactataccttaaagcaccaacaagtattgagctgattctgaatggatttatcccttattcaatttttgttgattctattacaggggtgagtatggtatttgggctgcattcctagctctagttgttcgcctctttttctcttttcctggtaagttctcttaatttacttttttcctatgtatatgcattttgtgtggcttgctctgaatcttactttccttctcaaaaatcttgtgttggacttgtcatgtatttaggtgagctcgagttgccatttctggggttattgttggtgattgtggctccttatcaagttatgaaccttaggtaattgataccagctcaccagaatatgagtttgcatattttttattttttttttctcattctcattcccgttctcattggcaggggaacacaagaaggggctataatatcattggtgattgctggatatttagcattccagcattttacacgaacaggaagcttgcagaaatcatttgaccaaggttcaattgttgccaccatagctatcatttgtaccactgttgtatcattgttgctgctgatttaatcttttgtaatcctcagaataatagcaagttgttttaaataagtaagtaagtgatgtcttcgattttttttgtttgttctttacctttttagattaggtgtatgaataacttgttcagcaaatgcaataagaa

SEQ ID NO: 16430 - DNA, 4422 bp, Cannabis sativa
ggagccgtaaataaatatgcatatatagtttcggaaaagcgtagaaaaaaagctacaacaaggtcgattcgagttcgactcccaatcttagctattagctacactacactccattcctatttatacatattatataacgcaactccttctctctctctctctcttctactctctctctctgtcccatccttgtggcgggcaccccttttatattgtccctcttcttcatttcatcatcattattgttattgttttcccaggacttccttttacgcagaaccccccacaaacaggtatcaccttcttcaattcttttgattttattatgcttaatcgattctgattagggtcttttgctttttatgtgaatagttattttgctcttatttatttcgatcccaatggaatttcttttctttttgtgtgaattgggctcttggtttcttaagattatatcttaaacagtgatctcgttgattatatatatagattgggattttttttttcctttttcttcttttttgggtgtttaactttatagcataatctggagtttgttggttttgagtgtaaaggttaagcttgctactttgttgtgggctactgagattagcgttgaaaaacttcagtccatgttgtgataaatccatatgattaggctttgatttggtaattatttggggttaaatattagcaagtcgttttagctcctttgatttgaaattttccatgggtttggctaatgaaaaattggagcattaagaattattggttttgacttactgaagaatgaaaggtagggttcaaatgaattgatcttagttgtttaaattatggattagtagtatgctaatgcttcttcttgtaattggtttattttatttgttacccatgtattataggggttgagagttgacttaggtgagtggtagcatgatatattgatcctctgaagccctagattaagtgaacagtgttcaacagttgttcatcagtgttgtcagatttataaattgatttactttttctaattttcttactgtcattgtgattatgtgttttgagcaattctaagtcttttaagtttatttttattcatgtataatgccccattgatgtgcttttctttttggcaactagttctcttgaattatgctagactgcaactttatgggccaatcattgttgttttttttactatcattgcagaaaacatgattagactatttaaagtgaaggagaaacaaagagaacttgctgaaaatgccaatggaggggcacctgttaagaagcagtctgctggggagctgcgtcttcataaaggttaccctcttctgtctaactatgacactgtttcttttgtgcttctttttcaaaaagaacatgtttaagtgttacacttttctttcttcgcacatagttcttcttgggagccaaattttgtaagaaaatggtttctaggattttatctgtgcgtacaacaaagctttaatccaatcctttttatgagtcttctccttgaattcacggagatgtgctccatcggttgttggattacatttaaaagaacaggacattctgttttggtggtttgaattacgaagacaattttcacataatatgactcaatttccgttgggcctatccttctcttgagaacaaggagaagggttaagtagattatggttgtgaagtctgagattttacctatttggtattaaatcattagtggattgctcttagacttgaagagtaatttttagtttatctactgctttatttaaaatttgaagcatatatatgagctaatttcacatgttctctgtgatttccttgcatttatgaattccacatacttagtctgcagacacaataagaaagagtagttcttcttttgttatcatatgccttctaaaattcaatggttcaagtttggatttttttttctctacatgaattacatttctcatatttgggacgtcatgtactgcagatataactgaactgaacctaccgaaatcatgtgccattgctttcccaagtggcaaggatgacctgatgaattttgaggttacaattcgtcctgatgaaggatattatctgtaaggaagttctccagtgctcatataaaatctgacccttttatccatctttctatgcataccttctataattgttgacactaataaacgtgctctggcttcgttgattgattattacagaggtggcacatttttgttctctttccaggtttcgcccatttatccacacgaggcaccaaaagttaagtgtaagaccaaggtacgtgctacaacagatcgatactcgttttgttttcatcatctgatgttcttacgtgagtaacttcttttagtagtgtagtgttttatggtaatgtttacaagttaaatttgctccttcataatgctttccactagcaggtctaccatcctaatattgacttggaaggaaatgtatgtctgaacatcttgagagaagattggaaacctgttctcaatataaacactataatctacggattgtatcatcttttcacggtactattcctttcgatttacagttacatcgcttatgattattgccatttttagttctgaatattgtttttgccaggagccaaactacgaggatcccctgaatcacgatgcagccgcagtgttgagagacaacccaaagatgtttgaatccaatgtgagaagggctatggctggtgggtatgtggggcaaacctccttcccacgctgtatgtagccttttgtatggtaatcaagggccaatggttataatatattggacgcttcaatggatgtgggttgtaaaattttacatgcaaagtacattttcttcccatttctttttcttttctttttcccctttatttttcccccctattcgtcaatggagctggccatttatttccattaagacatatcaactgaaaacctagatggaattgtgtatgtgactaaactatgttgttatttgacattttattatattattatgtatgccttacttttcttcttaattatattattattattattatttcatatgtataatgaagaaataaaaacatcaaaatcaattgcatcactccaccaaaagatttacaaaaagagaagaaagtgtaaatttcattgtcgtgagttctcatttcatcaaaagtttcaaatgctatcaattctataatgcaaaagaatggccacttgaactgggcacaaagtatacataatatgtattatatactttgactgtgtcatatgttaaagaaaaaagctctgtaactgtaaccccagatttcaaaaaatgatcatatcatctcctcttctttaacactagccaatctagcattttcacgatctttccaaaaaaacttatacaaaggggtgtagaacaagcaacaaacaccaaatggaactgccatcattgagaggagtccctgagacagagctagagcctcccgtttagaccccaacaatggatccacccctttcgaatcatacccgaacattttctccgacagaattccaaccaagggagctgcaaaggaagagaccgagccctcaaaagctcggtcaaaggcataaatcatggtccggtgcttggctgggacaacctcagcaaacatgggaccatttgcagcagaaccattccaactaatggtcaatcccattaggaagagagtgatgcaaaaggtgtagtagctgctgagtgactgagggatcactttgagtaggaaccaagagaaggggatgcccattatggcgctgaattgagcacacattatgcgccccgagcgggggtagacttgtgataatctgtctgctattattcctccaaggagagaccccatggcgcaaccaatagcaaataggctaagaagtgttgcagtactgttatgatcaaaacctgaaaaattcaaaaacagtcataacacaagtaaaaaagagtaattgtaattgaatcttaaaaagagttttctctaccaattagttcaaaccacatggtgaagaacaccatggcagtccatggtaacgagccaacaacaccctgcaacacgattatctgaaatgtctgtactttaacaacagctttcattgctgtccaggactcaacccaaactgatgtaacactagcattgcctttctctaccaactcaaccctgcaacaaacaaaaaagaaagtaactcgaatcgcttaaaacataataagagagtctaaaaggagaaatctttgtaactagtttgacaatttacttctcagaggcaacaatagtactagtttttcttggatcaacaacaaacaagagcacaagaagtccaatcaaagaactcaaagttgccatcataatgaaagcgaagcgccatccaggcatgcccccatattgctgaccagcca

SEQ ID NO: 16431 - DNA, 6313 bp, Cannabis sativa
atttataaatatatatctatttgtctcgttattacatctaattaaaatatagcaattgaatgtaaaaaaaatatattaatgatcgatttggacggattaacctgactaactcgactaattttattggattggtttctgtttttttttttaattagacgaactgtacttaacataaaccgatcaacgtacattatccctatgtattatattatagtaagatatttctgttttattttgagttgtaaaaagtccattttttgctgctgaatcatatgatttgtcatttgttttctctctatacgggactgaataatctttactattataaactaaaaatacatggttgaaaattgagctatggatgaacttttaagctcccttttcagttgatccaaaacacagtagatattcctcgactgagaatgagacttatcatcagctataaatttatgtactacaccactaatctcaatgaaactccaaccagagatggtgacaacatctctctccttcatcattttcctcaccctaatcacttcttcccaactaccaattgtggcatacatattagctagaactacataccttccactatgtttaggctctaattcaatcaaaacctttcccaccatctctcctaactctacatagccatgcactaaacacccttttagcattgacccccaaatggctccatctggtttcattggcatatgctttatcaacatttctgcctcttttactctacctgaacgtgccaagagatcaaccatacagccatagtgttcgatctcaggcgatattcggtaaactttaaacatacgtcctaaaaacagccatgctttgtccactaaagtttcatggttacaagcagtgagaacaccaatgaatgtcactgcatttggtttcggtcccttctcttccatttccctgaaaagctcaagccccaaatagttttcgccattaacagctaaccccacaatcatggctgtccatgctgttacatctttataacccattttgtcaaatacttcttgagcatctctaataaacccacattttgcatagaaatcaatcaaagcagtagatagctcaagctcatattcaataccaattttgtctataaacaagtgaacccatttcccttcttgaaatgctccaactgaaccacaagcattaagaacactaaccaaaagagacccttttagattcacattcgaacaagtcttcaactcacgaaacaactcaattgcttcatagaaacaattattccttacgtacccagaaaccattgcactataagaaacatcatttctcataggcatttcatcgaacacttgacgtgcttcactaatcaaaccattattacagtacccactcaataagctagtccaacaaaccacattcttatcaacactttgatcaaaaacacgacgagctaactccatcgatccaaacttggaataagtactgatcacagagctagtaacataagcatcagaacaatgcccaaacctcacaatctgaccatgaagttgaccaagcaaactcacaacaaaacaagccttcaccaaaactgtaaaggtacgagaattagggtcaacgccgattcttctcattttggtataaagagagagacccttttcgaaatttgagattttggagaagcccattagcatggaattgaaatcgaagacattgggtgtggtgatttgatcgaaaagtttctgggcgtaacctaagtggccggagtttgatgatgataatgatgcagagaaagctaagagcttgctggcgatgtaggtgaaacgagagaggccttgagtaatggtatgagcatggatttggttgaggtgttccattgttgaacatgtttggagaagacgaagaagaagacatgatgggctgtgtgtgattgaaattgaagttaacaaagttttgttcatactaaacttaactaccacaattcatttatttttcacactaggaaacgttgttatgtaaatatgaagtaatttgccacgtatattcaaattattttttaataaaaaataaaaatttaatgatttatgttcactagctgtagcttcccacaaagctggtggaggaaagcatttggatcccttagagacaccattgaaggcacagggctttatggcaaagtcgaaatgatctcatttggaacaacattcaaccttttgtaaacaaagttatgactcctgctaaactcactcttgatcaatggaaatttgttcaatctttgtcacttattcattccctgtcttctccatctagacttgagcaatggtctaaaccaatttactctcagatcaaggttaatgtagacggagcaacttttgttgatcagaatcattttggcgatggttttgtagcaagagataatgatggcttcctcattgaagccttctaagcttgcaaagttctagttgaaatagactgattaatattgtctattctctgcaaagcaaaattcatataatctctccatatggtaccattattaatgagtctaggcttttgttgtccgttcttaaaaatgtgtctattatttttgttaaacgatctgcgaataaagttgtcaatttccttgaaagagactcttattctaaagctggttgtactattagtaggaatagagtagtaggaattccattcctgctaatttattgtctttaatttcaaaagacatttgattaataaagatatatttctttcaaaaaaaaaaaaaaaagaatgtcacattactattgacttacacttaacagttaggtacttacagaagtttcaaaaatataattattaccgttaaaagttaaactcaagtatttatctataaccaagagttaaatttaaatatttacgccacaaattactcaatatgaataattagtatttttgctttaaattttctaaggtgatgtagtaaataatagttgataaatggatacaaattaaatacaatagtgaatacaatatatgtttggatatcaagtagtaattgcatataaattcatacgagcggacccaagtaaaggacgacacgagtccaagcatgacacgaaaatgtgagtttacaaactgtatgggcttaccctttaaaataatggcacgataaaacgcgacccatatctttttatgagttagcacaacacgagctatattattatgaattttttaaaatatgaacaaagccagcaagacacgtagtagacgatatactttgatgttagtaattatttttgtatttaaagaattatctcatctcaattgaaaaaacaaatatctttttagtaagaaatcaaatcctgtttctatattcttcttgtattttttttttttaatagtgcataattttcttcaatatctttttctttgtttaaactttaacctagaagccaatggagagtacaatgcagcaagcttccaaggagccagggcagtaagaacatggttgccttgcccttctatttgcagtgtaaaccaaagatagtgtttcttttttctaagtaaaaatttggtaaattgtcttgtaattcagaagaagaaacactaaggtcataatatcaagtatgtataatgctagagacattttcaagcttaagggggtaaaagaaaacaaatttgtcaaaacaaccctacgatttcgggaaattctcattcgcaacccaaattttaaaccttatttttcttttaaacatgaatcacttgatcaaaatcgaatttttcttcaagatgaaatcactcagcacgaaaagtcaatgcgaaacctaacgagttttttcaaattcaagttcaaagaaaaatacaacagaaatagggaagacctgaaaaattggtgaagttagattcatactatttacaatgaaattttctttgatcatacatacatgtaagaatatatgaagaaaagaaaaggaaaaaactactgtggcttgattcgacttcaccgatttcacatgctgaaaccacaaaccaaaccaatagtttcaaagaaaacaaaacaaatcttaaaatacccgaaagacaaattttccatgagttagacaattttgaggaatacccttttgttaaaataccatcagttctttaacttgtcaaaatgagctcagacaacccaattcctaatttctatctaatctcagaatcgaaaaagtttctgcagctaaccttaacttcatcgccgcctgtattggttgatttttctcgtgctgccatgtgcacaaagatttagacattcatgaagaactagtagtagtaagcaaagtcaatttgccataatggatatgagttgagacaaactgaatgaaacaaattatcataataaatgatatctaaacattcttagataataagaatggggaaaatggtgatgatgacaaatatatataaatgatgagatagttcaaatgaagcatgttaggtaaagatgaactaaagaattactgctgaacaaacgaggagtgcgtttgcactcaaaactcgatccaactaaaggataaagatgatgatgattaatgccaaagcttcatgcagaatccagagggaacaacagaggatctcttgctcgaaatgcattctgtaaaggtgtcaacaagttgctcagcaagtgatgctggttcttctatgaatgtgtcgataaacaccttaacaatccttagctcctgtgagcttgctctcaagctataccaagttaggaatttctgcctgaagttcttctctatatgaccctcacattctaaccatctaatcaccttcacataatactcaaaatccctatctgaaaggccgtttcctgcacattcctcgtcaggcctttctgcatttctcttctttgatgtgctaccatcttggggttctcctttccctgctgcattttctaaatccttgctgcttgatttggatctcacatttcttcctagcccctcctttagtatttctatcttacaaggtgtaatgggcaagccagcatctgagctaccagcaaatggcacgcactccattccagttcgaactggagagttcgacccattatcagtgctaatgtcctcaacaatttgaccatcagatgagggtttgttatcaggttctacagcatcagaattcgatatggagccaaccaaccgaattgaacagttcccatctaacaaagatacttgatttcccttgttttctccttcacctgtgctgttgaatgtaatagtaccattagacaaactaccagaagcaaccttttcattatccttgcaataactaagataattctcttgacgggtatcagcctgctcgctagatagtgcaacgttattagtttcatcttctactgatgaaggattagagaggctgctacagttagttgctgggctttgacttctttccgggacatggcaatttgtaagttcatctgcattgcttgttgagaatcgaactatgctggtgcccaactccttggtaccatcatgtgaaacaactttgaaacaatactctgtggcaggagtaagatctctaacaacaaatcttgtatttggcgctaacagtttgcatgtcggttctttaggatagttgatatcatcaaccttacaatgccacaaggagtagagtacgttatcatctgatgaaatattttgagattgcaaaaaaatggtgagcgaggttgcccgagtgtcttcaaatttgatcatgtttggcccaatcggtttcttatctgaaatgaagtaaaaaataacatgcacattataaattgattacatttcactaaagatctcaaaggtacatgtaatttaatcacaacggagcattcattaccttgtttaatgggattgggcaatggatctgaggttacattagaattcattgaatccagcaactccacagcagaagaacaaagtttctgaacctcgggtccagaggaaagcctgttgacaatacccctacccattttgacgggcaaaccatcgagtggaccaacttcagcttgaagtttctttgaagcttcatcaacaagctcataaagcttttgatatttttcagttcctttgagaagtttttcgcttaaggagatacgataccacaaaatgtccactcgtctggtttcccttgccaccaccatttgttttctccaacacctgaattaatttaaccaaccaattcatgaggattagatgtaaattaacaatggcataatgaagcctttgtataaaaatgactactacattgaacgaaatagacattacgtagtagagttcattatggcatagttacagacactgcatatgttcggctacattattactag

SEQ ID NO: 16432 - DNA, 11347 bp, Cannabis sativa
  modified_base (53)..(71): a, c, t, g, unknown or other
tgttttcgtgttattttttggaaaaccgtaaaaatgtaaaaaaacattctttnnnnnnnnnnnnnnnnnnnttttacaaaaaatggtgtcttatgtaattatttcataattaaatgacaaaaggaaagctctaatttcattcagtccagcccgttgctgtacaagcccagcccaccagcctggagccatctgagccgagcctcagtcaaagccgagctgctagccattgttcttttataggcgacacttgtcgccatctgcatgtacatagttgaacttgaattgaaacccaagtcaagccagtctctcttcttccgccgattgtaccccgttgagataattcggaaatggccggtgagtctttctatatttgttccactgtattcaattttggccaattagatcggtgaaattaggtatttttgggtgattcaggagagaacggcaagagaggaagagcttgcgtcgtcgttttgggagatatcggccgcagtcctcgtatgcagtatcacgccctttcccttgctcgtcaggttcattacatccctccttgttttttcttccttcttttttcttatactaaatatgcgttctttcaattggttttaccaggcatcttttgaggttgacattgttgcctatggaggtattattttattttggaaagatttcatttttatgataacgtgaattggtgaaattatcaaattaaaaaccacaacttttgaccctattagtcattctagggccattcagtgtaaatgcagttggctccaagcgaacatgaagttcattacctgaatttacttaaatttgatagttacaattgttttggtagatttacttccttttatgatatgtgaaactccaaaatgttggttacaaatatatattttttttaaatttatttatttttgaataatttagtaaataaattatattgctatgtttgttcttgagtaacagttgagaaattctaaactttaacctattgactcatttgcgaactttaatggcggacaggttccgaaccccattctgctctattggagaataaatctattaatatatacaaaatggtaacttctattattatttactttctcttagtagactagtgatatcttaggatctgaaagatatgcttgtctttaatttgatttgcagaagcaatggcctactattccacgcggtctacccaagatctttaaaccttttgtgcttttgattaaaccgctgattcagttctttatgcttctttggtttctctgttttaagatagctgcacctgatgtgttcttagtacaggtgagcctgcttgctttcatttctcttttacttgggaaaaaaaattaaggttctgtacttaaaagatttttcatcatgtttgtagctgtctacattgcaatagcaatctaaatgagtttaggaaagactttgatctgcctttccaccccctttttgttgttttctttctctgcttgcttatcccgaagattttcctgagatttttctcattttggtgtttcaacccacctgtgttgtatatttacctaaatgtgcattttcgggttctgctttgattgctggtggattaaagttgccctgctaattgtaaaaaaaggaaaagaaaaagactaactcttttttgatgtcatttagtagatcttctattgaatatctttatgttaagctttttaaatccgtttctctgaataaataaatattatatgcacacatttatgtatatgtgcccaactgtacgattaaacggatttctacctttgccaatagtcttcgttctcatttttcttgtctttgtattagtatttactaattattctttctgtgtgaataaaatatcaaattttcattgatcttaaccctgcagaatccaccttctgttccaacattgatagctgtaaaatgggcgagttggctaaggggttctgtatttattattgattggcataattttggatacacattattggcactatcccttggaagaagtagtcgatttgtggcattatatcgttggtatatcagcatccttttagacattgttattatgaatttatgattgcatttttttctcattgtatttgattttctttaactgttaaggtttgagaggtattatgggaagatggcaaatggttctttgtgcgtcaccagggcaatgcaacatgagttggcccagaattggtctattaagtaagatggtcagctcaatattcacaattgcagtgtagctttagaaactttaatgacaaaaaaacaactcattgacacattttctgtcatttatatagagcctcagttttatatgatcaacctcctgagtttttccatcctgctacccttgaggaaaagcacaaggtattttgatgcatcctttctacttttgaagttctgtcttgctgatttatttatttatttaattttatttttttatgtaaagagaaactaatctttgcattgaaatagttctttcttgctgtaatcataatgtggactatttatagctgttttgtagattggataaagatcttagccagcctcatggcttttgtgattgtgccaccattggtaaatttcatagactatttttctaggcaacattttcctcaaaacaaaggtttcatgaatcaacacattttatagggactggaggacttttgcagagggaattagatgataatttatttagcaatctaatcggcactgatattgtttcaaaaccaaacaggccggcactcattgttagcagtaccagttggtaagctgctttcctttttctctctctgtctttgttgttttttccttcactctctttctttctcctttttatttttcattttttttagtgggggtatttttcaagtagtttctgctattctctactatgtactcataagatagactatatatgtcatgttcaattacttattacaggtaattaacaaaagttgcctatttcaatgtataagcgaagttgttgatttaatattgaagctgaaatataatatactaatttcagggcttgacatttcataggactcaagatgaagattttggaattctcttggaagcagctgtgatgtacgacagacgtgtttctgccatcttaggtgaagaggataaatctgttgaagaagaggatgtttggaatgaaatgtggagtggaaaacaatatttgtatcctaggctgctatttgtcattacaggtgatattttatgttctatatataaaatttcatttccattttttatttttatttttattttttctttttcaaaaccatgtttttatgtgtattgtattcactgagggcttcacaaactacatgcaggtaaaggaccagaaaaacaaaaatatgaagaaaagataaaaaggttacgtctcaaacgcgttgcatttcgtaccatgtggctatcagctgaggattatccactgctccttggtagttcattaagatccttatccttatgcttttttttccctctctcgtagtgtgaactttatttggctctgggttggcggtacttatggtaatagtttggtacattcacaggatcagcagaccttggcgtgtgcttgcatacttcttcatcaggactggaccttcccatgaaggtatagagtagaaagtattatataaaaatgcaagaggcagataatcacttcaaacagactaatttttattttttatttttttcgatgcaaggttgtggacatgtttggttgtgggctgcctgtttgtgctgtgtcgtactcatggtaaatgtgatactgaacttactctgcaactaaatattctgctctagtttcgtgtactctatagatgaccgttcttggtttttggtttcttggttataagcatcaaggagctagtgacagtggagaaaaatggtcttcttttctcatcgccatcagagctagctgatgaacttttggtaagttaatcatccccttggtcgctatgctgagcttttcaccaagccagaaaaagcctcttcttctttattttccagtttggttttatctgtcaatttctgcaactctgctactgttccattgctattactctatatttttgctactgttctattgaatttattcatctgataggattggttcttatcagtaaaaaactgactcttaccaaatttctattggatttttcacttggccgttgaataagaataaaattaggaatcaaatgcttcattactttaaaatattatttgttctaaaaacagttcatatgtacacatttatacgaaaatctgtcagagtataagctctctttctctcagtctttgatatacatgtgcttcaatccttggttgcattaccttttatgggtgtgagaataagtaaaatacattactcgtcatcacatagagcacacgtggaatctatatcgattggaaaatcttgttgttatttctggcaggccttctttgtgtttgcatcttttgaaaacaccattttgcataatgcttaatgccaattacgagtttagttttgtcagagcacattttttgctagaatgttgtatatgatcaaattactaaggtcttacatgcaactgtggaacaaatttgcatcacaacatttgcttctcatagtcaaatgacatcttcgtggtatgaatctgcacagcatctgttcaagggttttccagatgcatgtgatgcacttaaatgtctgaggaatggtgctttagaaacgggatctttggcgaggtgggatgttgagtgggaagagaaagccaagccattgatatcagaggtaactttacttacaataatatggtgtatttattaaataggtaaaatcttttgcagttagcaatagcattactcatgctggctagtttagaaactagaaatagaccttgcagctgaccccctcttaaatggagttgattgaaatggttatggaattcaggtaatctcccgaaatgctgattgagatttgggttgtggtggtctcattaaattgtgatgaatagcaaattgtttgatagaggcttctctggacttgctgaaccaaagagataaggaagcatagctctcattttgctctactggtatatcatctgatgacaactatgcatatgtaactctatgccaaaagcaggaaaagtttgttatatttatcattttttattttattttttgaccaatttaaaggttattcacaaaaaagaaaaaataaaataatatttgattgtaagttgtcattaataatttaatatggttgtaatcacacttattatatagtgataattttattgtgagtgattaattattactttttgttacaatctaataaaaaaaaaaaattgattaaaaaattgtcactaaaagatactttttcttgttttgtttttagtacatttatgagatttgtgggtaattttttatttatttagtgtgcttgtttgtgtttgcatttaagaagttgtttttcattgggaaagagatttgatttttcattttacatcttactctatctattagattatgtctatactataactaggcactataagcattattagttcgtagcacctacaatcttaaatagtataaaacaagaaaagcatgggtaaggcatattttgaatttttttgtaacatgtgtatacctttttctcttgattttattgataccttcaattccttatgtatgtataaattaatgacgattttattttgatcaaggctgataatttatgttatcgtattgtatttgtgttaacacaattaaagtaaatataaatacgacataattattatacatgttgaaaatttaaacgcaaacacaatattattaattagcaagtcacatgatacgatatcttgattatgatacgaagattaagacaaacatgatttttttcttaaagtatgaaatttatatggtagttgatttgtgttatcgttttgacacgattatcaaacatattgacatgattttgacacgatacaattaaggtaaacaagacataataattattaaatgaatcaccaaaatctatttattttgcgtcatttcgagtagtatcatcttattatgacttgcatatatatatataattgaagcatgtagctgcagggaaaattttgaatgatcactgttcaaaactttattttcttttgtgaaaatgtatctcttggtttatgctactacttttggacaccatggaatgggtagtgtgactcctcctaaaccatccacaagtacttagagaagaaatagaccacaatatgacatggtcgaatgctttgtcaaggagtcttgtgtcatcattgagactcgtaaatttgttgcctcgtatatgtattgtatatatatccaagaggaactgtggtgaaagattgggcccttgagagagatcctaaggtgtaggatgttcaagccagttgagaggtttgaatttgaaagaatggttaagaagggtgaaagagaaaaggtttgtgggaaaattacaactaacagtgcaaaatcaaatcaatgaaactgtaagcaatcaaacgattagaaatgataagattatcaaaacgagaacaacaatcgtatgaaaaacaaggacaaacagagtattaaaactagagaatagtaaatgcagagaatagagaaatcaataccaagatatatactggttcaagtcctatagatcgatgtgatctatggctctactccaattttggaataccactgtaattcttctttattgattaagcaagaacaggtacaatacaatcgagacgagattctctgttaagtcctcactaagtgttccaactctcacacttacactcaagaatcttctttatctacaaaattttttcttacaaaattcaaacccaatctctctcttttctctgcacctttctctctacgtctcaatctttttctctcttaaactctcaattccatcttaacaaagttttcaaactcgtgtatccggtcgctcgtaaaatgataagtgaagatggtatatataagcttaggatcaagatcccttttcatttgagggaatgttaaccaataaattaattagttaactatttagtttttttttttttttttgaagggattagttaactatttagttagttagctgttatttaaaagattggctagttagttacaattattgttgggctgaaaaatttgattcttgattttgtaattgaataatcaaactagtatataaataaaaggttagcatctaagagaacattaagctttgttttacaagctctttctgttagtttgagttctattattttctcttgttttcttgcctcggcaactattgagtttctacactaatatactacacttttttttagagtaaggaggcaattagactaaaagatttgaagagtagcagcaagtctcattacaaatccagtaagtagcttcttcagtcccaaacaccctcttggccaagttatgggcaatcgtgtttgttatcctttgaatgtggctgagttgaatgtttgggaagagggaaagacgtgacctcagttaggaaataagatctccaaatgctgacttgatattcgaggtatttgtcattgcatcaactaaagtcttacaatctatctcaataaagtgtattgggaatgcttctttgtggaaccattggagagaaatgattagagcttttacttcttgaatgtgggcttcccccacacttgagtaaggggtagcaatggcagtaatggtagcaccctcgctattactgagaattcttacaaaaccatatttgttggaacgcctatcaattgcagcatctgttgtgagcttggcgagaccatgggggggaggggtccaaatatctgaagggcttgattgatccttggttaaagaagtattgatgtagtcatttagccttgcttaacggtagttttccataaaacaactagcctcctcaagaagattatgatggtgcgccatagaacctttatgagtgaacttattcctgtaatgccaattcaaccaacacatacaaacaaacaactccagctttggtttagttaaaatattagaaagatgcattattataaggttaaaatatttaatgtttggaaagtttgaagatgtgagtagaataccatacctttccaaagctgtctgacattagtgaaaacaatagggcatgacaaatgttttctagcccattgttgcatatggatcaaattggagaatccactactttccttttaaagagatttgagagagtaggaaatgtgtttttggtggccctataggcgaagtgttttagtttggagggtaaggagaaggaccacaaaatggaccaccaatctgagggttgggaagatatgggtgagtgttggtcattattaatggtgaagctaaggtagaatcctgatttgacaatgtagtttcccgaagtggtgtgctgccagatgagagaatcctgagattaggctaagggaagagggatgtctagaatagcattaactatttcaataggaaaaaattagttgagacgaagaatgttccaagtcatgtttctgctgataaaataagcaatatgggaaggagaattttggattgtaggtacaagtctaacattggggatccaataatcatgtaaagggtgtgtattctgcccattaccaatttttttaatgagccttttttccaacaaagatttctcccaactaatgcttctccaaccgaaagatggggcacgaccagtagaactgtccaagaatggagaatggggatggtatcttgccttgagaattagagcaaccaaagaattaggatgagttaagagacgccatgcttgcttggcaagcatggcttggttgaaatgaaccagagatctaaagcccagccccccatttttcttagatttgcaaaacattgtccaactatgccaatgagtctttagtctcttgttggcattagtgtcccgccaaaaattggtgctaatggactcaagagacttgcagatactgacaggaaacttgaaacaggacatagcgtaggagggaatggattggaagacaactttgataaggattttccccccatttgagaaaaacttgtgagtccaattggagatgtggtgccaagctctctctctctgatatagttgaaggcttgtttctttgtactttcaaagcattgtgggaggcccagatatatttttcaaactcgtttttaacaagcatacccatgtaatctgagataagagttcgatccctcagagctgtgttaggagagaaataaagagaagatttttcaagattaacacattgccctgtggcatgctcatagtgaagaagaatttctttgacaacgctgcaagaatggatacttgcttgacaaaacagaatgttgtcatcagtaaagaaaatgtgagatatggtaggggctgtataagaaattttgaggccagtgaaattgcccgattgttcattattacgaatgagggaggagaagctttcggagcacgagagtaaaaggtaaggagaaagtggatctccttgccttattcctcttgtaggggtcacatttccaaccaccctaccattaagattaaattgataggagacagtggagaggcaacggtgaatcagatttgagaaactttgggggaagccaaactaatccatgattctagaaatgaattgtcactcgaccctatcaaaaactttgccatgtcaagtttaatggccatccaacctttctttctgtgtttcctttgtttaatggcatgggctacctcttgggcaaatataatattatcagaaaggagacgatccgagaggaagcgctttggttgagacaaatgaactgattgataacaggttttagtctattagcaatagtgttttagccaaaaacagtcataattttttgtgtgagttctttctttttcagttcctaatcttggccctattttacgtagtctatttcctatatatatggtacgtcctttgattgcatggatgatctatcatcagcctattcttttcttgacgcgtgttctttctccctattcaccctagtttgcctcacgtcttgttgttaggtgatggctgcttttttttgtcccttttgggtccgacggcattgtgtcttattcctggattgtttatctcacttctttggactgcggtctttcttccatcagaacttctttttactattcatggtgaacaggggaatcacaatgtcaaccttcattttgatgccttttctcgacggaggtacttgtttgttgtattccaagatgctcctgttctatactgctcaattctctcaggaagtgagttttcgtcggtgagctagatggaaggtcctctttgggtccctcttgaatttgtccatcatctgggtcttcctccgtcggtatgaggtgataggctttaaaccctcacttacttctttctaaattttccgtcggcatttgtacgtcttcctagtttctcttactgttacttcctcggggaatggtccctatttcgtctttctcacttttgtcgtttgtactttttatttatttttatcctttgggtttccaactgggccgtccagtgttgggcctttcttattttcattaattatttgggttttaggcttttgagaatctgctttatttgggcctttgcactttttatgctttattgggccttcattttttctttttgtaattttcctccaaacaaatagctttagaaatgattttataaatgatgttacagaggctaataattctaaaatccttcattgttcatgtttgactttggggatcaaagtgagttttattcagggaagctatatcaccgccaaagttgaggaagttaagggttgccttcagaatatcagacttaaccaaactccagtttttatgataaaaatttgtgttaaaaccactagtccctgaggccttattaagtggaagctggaaaaaagctctttaggcttcatcctcaatgaactggttttacaacatgagggtggcttgaggactgacaggtcaataccaacaaaagcctggttgatggcttcaagataggggttagaggttgtaaaaagatcacgaaaatattgttcaatctctccaatgatatcagtttcttccacaagagtttgaccttacacttaatgtaataggatgtagggctgagcataaaatccaaaaaactaaaaaaaccattcaaaccgacctaccgaacaccgttggagccgaaactgatgaaatcgaaaaaactgctaacggttaaaaccgccattgaatgatcgattttttttgggtaataaaccgaccaaaaaaatc

SEQ ID NO: 16433 - DNA, 5732 bp, Cannabis sativa
ttgtttgagtcccatcttaaatatatattttatctctcattgctcttacttggggaactccatttagagtttttatgaaggctcactattggaggagtagattctagtaacctaaattttgattcttgctctcaaactcttggaaactcaattaaaaaaaactaagtttaaagtggggccaaatcgaacccaattcaaataacccaagtcggattcgatccaaatatctagtctagcaggacagggtggatcattacatgaacatgatcgggttggatcatagtcaaattaaatctgacccgatccatttacactcctaagtgtattgttatattttaacacttgattctacattagagtcttagtcttagagaagcatgtattaaaaaaatgttaaaatgtaagattgtatcacttattaggcattcccttagaaatgctcctatcataacttttattatgtaccaaattttgttcacattacactactattggaattccgttttagtattaaaaaaatgcatatgcaccattttgtagtatttttttgattgagacacctaaataaaataactattgtttgttcaatgtgtattgctgtcatgatatgtccttgaattttttttaggaaattggcatagtaattgcaggtagtaattgcacattttctccatacaaaccgtgtgaaaatttctcgtctaaatggaaaacagagcatgaacgggaatacccttttatcaaaaagttgcaggtaactcttgtgtctacaaataacacaaccataaataaaaaagaaaaaaataaataacttttggtgtctcaattaagatagtacagcattttggtgtcttacttgagactatgggctatgctcgcccattctctcccacctccctcttactgattggaaataggggtgattttagtgcagtggcagagccatctactcttagatgggccaaagaataaataacatttttaaaaaggatattgctgatgacatataatttgttaaaaatctttttcacttactttcctttgtccttagtttataaccatttcatatattactcaacgctattaattaaactagtaaaatgacatacttcagcttaaaatctatgtaatcaaagaaatcatttcaaaaagtttcaggagatcattttcacaagttggacaaatataccatgggtgatggagagagcatcacgactaaattagacatggagctcagtaacttagtaatatatgatacagctgagaatgtaggaaaagctaaggaacaaagatcacaaccaagttagatgatgtgaatctcactcaccaacaaatccatgaattaatctttcagaaaattatgacacatgaaaacggaagaatagagaagacaacccatcttagttctttgattttgaatgctttacaagccagtcaatgactgaatctatgttggttgagttcttgcaagagatcatgaagcaacaaacttctctatctgtgatcgatttcaggcccctgcacaacccacataccattattgtaagtcaaagcattgaataatattagtttaaaactagattctattaggatggaactccatattgtgaaatactagcagtccaaaaacagctttctattttaattcatttttttttaattttctccaaattggcattacttgggcaccacaacacatgtattgcaacatgtggaatgtcaacacgcacaagaataagtttcacttcttttcaggattttatccatataccctattgggaaggagggatttctgtcaaaccactctgatcttccagtcaaaccatcctacctacctagctccctaaacaaattcaacttactgaaatagacatattaatgaaggttcttaaatttttaatcataaaagccaagtctatcttacatttcatcagtcaaagcctgcttcgatagagctcctggtttgtcaatcttattccctaaaaccagcaacgggataccgctcaatgaaggcttgctcaataaatcatgaagttcactttttgaggtgctcaagttatcgggatcagcagcatcaacaacataactgcacaaacctagaagaacattttatcttatcacataatataatattactttcactaaaaatatcattgtaacactggtggcaagactcctgtccggtccatacattactgtcagctaaaagtttattacacacaacgaacaaaatgacaactagtaaccactcaactcaacagagcttcccaaaatctcaaccattcaatgtaatcaattaggcaacacatataataaaataaatttgcagaccaaggcagtattaagctatgaaactataatagcaactcgtactataatcaaatattagcattatgaaaatcttgtttgcatcttccccgtgctcatgcaatcatgctcagcaacgttaatggtacattcttgtcctagaaacatgatttataggaatgtggctatctcattcaaataactaaataacacgtgaaggtattcaagcaagcaacaacaattttcttctatcaaaatatctactcatcaattttaaagttaccagtaaaaaaaagctcaacctagtgcattctgatggcaactagatttcgagagtagtactataattataatgaaagcaagtttaaaaaagaaggtaacataaaatagattatgtaacacaagtagcaatctgttcctgacaaaaattgtagtatactcttttgtaaagttaaaaagacataagaagtttagtccatacacaatagcagaaactgcacgacaatatcgctcccacatgctgcggaatctaggttgacctccgagatcccacaactttatagtaacatttccttttgttaccttcctcatattaaatccaacctgaaaagttaaaagtgtgagtcaaccttgccttggatagctttgaagcattcataaaaaagaaaagaaaaaagaattaatataatataatcaatagctagcagttgatgaaacaatgcataacagaaacaagcaaaacaaatgctaaaactttacaaatgaaaactcactgtggggatcatgtcttcgctgtatccaccagtctgaagaaaaaaaaaagccatcaaaattatgagtccaaacatctaaaccagtaaaatagggaaaaagggtaatcccaaatacattgatagaagttgatttacttaccgccacgacatttacaagagaagtctttccagcgttctgaagtccaatcaaggatagctccatttcctgtttgaaaaagaggctgcatatgcatatacaatataattaaaaacaagcactggctgcaatcttagaagttaaaataccaaaaaacagattatgaagaacactaaagacacagcattctaacctaaccacaatcaaccaataagtactcaaaccaaataaaattctttagttcgctttttagatatcctgtacaaaacaactcacaaagatttatataattgaaaaaaaaaaaacggaagagaaaaaaaataaactataacttccaggccaaacataaatcattgagcttaagcaacattcctttatactccaaaatttcacattatgaaatgagagcttttgtttttctagcaatttttcactatttatccagggaaactctaaaagaagaacaaaagtaaagcacaacaatagataatcttccccaacaacaaaccacgctctattacagaatcaaaatatattattgatcaagattagcgtcgaatttttacacagtattaatccaaacaacataggaataaaagaagagtgattaaacatagaaaaagaaagaaaaaagtaaccttcgaagccaattgagaaaagcttcccacaaacccatcgatggatcagagaagaagaagaagaagatagagatctctgattatcaaaattttctcagaaagagagagatctatccaaacagtctgacctcagaaggacctctctctattcaatctttgggagaaaataaaaagaccccttgtttcgcactttcctccctctcttctctttccctcgttactccatttaccgtattttccttctacgtatttatatcccccatactctacggttccatacgctacggtaatactccacaataattaaaattaagattaaaattaaaataaaaaataaattcaaaaaaataaaaaataaatctattttttaaaaaattaacagaaatattttagcacaacgctaaacgttgaattattagacacttttaaaattagatttaagtgaaaaatctgaattatatgtggtgctaaaaattaggtgtctataacattattagcagattagaaaaatattagcaaatcatgtttgttttccagtcgaaaacgacatcgtttggctgatttatcagtgagatctacaccgttgaattaattgtcctaatctgacggtgtgtagagtttacgggaagccgcgagtttcgtctccgtccggtaccgtgagtagtaagtgaaactcggaggggattagttgagcattattttaatttctcggatggcgcgagtgaaatacacgtactaatgggcgtggatatagttggtgggtggggttgtaggacattgattggcgcgtgagctctgacaacaaaatttcaaatatccctattgttagaagtagaactaaaggagttttttacttaaaaaaaagggccaacggtgtactccttacaagaaccaatgcgagattgccacttgtatgtacaactttggatttgagctggcaataattgatggtggtggcggcaatattttattaaggataatattattaagactttttgattgagttcaatggaatttcaagcaagaataaattaaaaacaatatttgaattgctaaaaataataattaataaattgagtaaatcttttgggtttaatataagtagccaagaagacatttttattttctgttaattatttgttggaagttttgagttcttagttcatcactacttttaaatggggatgtatttaattagttttgagttgaaagtagaatcatattgttgtgaagtgtcaccaaaagggttgtatacttgaataaagctttgttgcatataaccataaggtcagaatttgttgaaatcttttgcatttaaaaaagtagaacacaatcatgaccgactttaaattaattagaataattattgggtttggttcccttaataaatgaaattgaaaaaaaaaattaaataaagaattccacaatctttagaagagaattatattctaaaataaaacaataaaatacacaaatgtatcattcatcatcaaatactgtgatgcaagttaacacgtggtgtggtttctagccttgtaatgtcaatttcactcgaccaagtgatgcaagtttttttttcacagaaaaaaaaaaaaaacaaatgcaagttttgatgaaattaaaaatgatttaacatattgcattgtgaataatataatatttcaacgtgtacaccacaataatagattataaagtctccctcgccacccccaaactaaacatgaagaaggtaaatacattgtgtgattagctagagagcaaaagtggaagaagaaaagaacagagaaagcaagaattgaatgaaagcattaactcaatagagttagcttagccctttatttatatgaacaaagattacacaccaagattcaaaacaaaaaa

SEQ ID NO: 16434 - DNA, 16254 bp, Cannabis sativa
  modified_base (16204)..(16227): a, c, t, g, unknown or other
aaaaaaaaaaaaaaagttatagcagaactctgaaggtcatagctaaaaagacaaatcctatttattatatatatatattaatggaagaattaccagctcttacattatctgagttaaacttttaaaatatttatatataatgtaaatatacattattattgataatgaagaggtaacgagtgcggccttcctcccttatgaagagaaaattgatgagaagaaggaaccaacgaacattgcccccaatccccacgatgaccatacggcgcccactcctaagaagactgataacgtaagcttttttttttttttcctatagatgtgtagtttattattatgaatgcatttttttgttatttttattttgcgcgaataataatgaaattcaaattaattaataagaatatacattgatatttgaatttgtataaatgtatatttaggaacgtaagaaagaactgaggctggaagctagcaagtggattggagttgttatctttaagactattggccatgatacctacaagggaaaggtggtggactatgtggttagaaatggctggtttaaggtacatgtatatgtagtgcgatctttaatttatatatacataacactcatcatttatataaaattatttatgtgatgtatacatgtgtatatataatgttacacacatgattaaatggtgcaggttatgtatgatgatgatgagaaggaagaaatgagcaagattgagctacttcaattgatgtctaatcctgaagaatttatcgaatctgccaaccgcttacctcctaggtatgccctaaattattaatttcaaatcgtttgctatagaatatatattatttactgaacttatatatatatatatagtttggagacgcataggccgagaaggaggaaagagaaaagtgatgatgatgatgagagaaggagtaagaaaagggagagaggtagaggtggtcgaagagtgaacatggcgactgcctcaaatgtcccagtgcgttactcagaaccagcagagccagctactcaacagagaaggcctcgcaagcccaaacagcccagcacctatgtacctcttgctctcaaggagtctaagaaggatgactactattggtattggccatgaacaatgatcacctctcaccttcaatccaatccaatccaggtacttatttattttaattaattactcttcttttttttttaaaaggctctttattataaccctttgtttgattaaggatatttcgatatgaaaagggaagatgaatatattccaaaacataattatataaaatttaaataattctattttttgtttccatacaggtgaatcggttgcttgttcatgagctcgtgaaaggctatatattgttcatcttcttttctatattattattgtgtatctttcgatatgcatcagtattttaatttttcctttgctcatcaagaacgtgtgagacttttgaacattttattgtctcatttctctatttatgattatactgctatgactttatgattgaatgttatatattttaagcaagttaagtcttaaatatctggttttatacattagtctgaaatgtttccaaaatatatcagaccttacatagtccctgatgtgggtttctgccctaatcaaaattttagtttatatgtataatttgtgtgcatatataaatgttttatctgtgatctcttaaaatatttatttctttgcttctctttttgaattttattttcaacaaaaaataaaaaatttgatttttctatccttttctcaaatattcacacacacacgtaacataatttttggtttaacattattaaattttaacagaatattccattagaaaaccaattaattaaaattattaattgtagcttataatccttaataaaatttaatcaaactaatttttcaaaaataatggtaaaataaattctcattattcatccccttaatcttctacgattgaaattacacaaaggagaaaaatcatctttatgttgatgttacaatttattaaaaataatggtgaaatgcgattctgccagactgtcgaagttgcctacggctagaaccctctttatgcaatttgattgaaggggtcctggagatatggcttttataagatgacttcaacaacggcacaaccgccctctcaagcaaagagattagttttcagttagggaaaaagataaacttcttgtaacccctttaccagcaagtaatgaaatcagctcacgtatgtatataccatacacaggagagactgtattggtatgcatattttgattcttttaatattattgattttattctcatattttgttagttgtcttcttgtgaatgtagttggattgcgtatggctgctttgccatatttttatgagattgatccttaaacaattaacgttcttctcatctatgtagctcttataacatatcttcattaagaattacatatggattggatttttatgtcaagtgtcgctttaactgccagctgaaaataagttctttttttccttcatgtatataaatattgataataggggataataagtgatcaacaatgtatattttctgctactctattaaaggattttatttgatctttcagaatagaattttgtcaattatttagagcttatactttattttttggaaaagttctttattttccatgtaaattttatgggggtctttgtatacccatatataatgctattttttctttcgtagttgtcgaattaatactggtgttattagtttaatgctccaatttacatttctcttattactattctgtcagctttatacttagtttcaatttagtgttcttatcggatagaatataattcatgattactcttttctttttttcttcctaaattacgctatgtagtggttcgtttataattagcaattgcagattttatatgggttgttgttattgtaatttgattggaatttcaagtattgatctacagtaaatttgcaagatggttgagatttttattgattgttttactattcttatcatttttactatggtatagggagtatttttggaccttgtgttttatgagctattgattgggaaaggaatatgcaaaatatttgtagcaatatttgtgcatggatttattagttgagattattgtaaattttatacaactaaaaatatgtctaatttaaaagaaaactaaaaatataaacattaacctaatatatatctatacctcttagtagtctgtgattttatacccaccccctttcttgatatttcaatccattgctttctttatatctctttccacctctctctttatagttattgttccttctttatcgatgcttatttcccaaagatacctaattcctctttcttttgtcacatataatcttcttattatcacataaattaactaatttgggtaatatgttagtaaacgatccagtttcgaacactaaaataagtactacaaggaaggggatcttttattccactttttaaattaacaaaaataaaaaataggataaaatatgttattgagatattttattccacttttaaatttgtcgcttcaaatatgtagctaatttttttttcaggcaagggcttgtgtttggtagaacgttaaaaaatatatcaaaggtaaaaattgagttcaagactcaatttttatgggatagcctaatgggcttcaaggttttattaaaacccttttattccgatttttagttaaaaatcaagataaaagagtttgcgtgtggaactcttttatcccattttttcatttcacaatgtccagaccacctacccctttcgacccttcttcttcctctgattaaatcctccctcaaacccttttccattgcagttctaacctcaccatcaacgttcgcccctccattaaggtatatatttttcatttgttttaaactcttttacatttgacttactattcttcttttttttggagtttttttttcaggatttttttctgcttgttctttgttttttttttctcttaataatatttatttttgtaataatttttgggtttatattttttcattaggtatcctttttttttttactttttagttcttaaagatttgatttttataatacttgagtgataacttgtgcagcaataatggatgtgcaagtatgtgtatttcaatatttcttctctaatatactttgattttactattactgccttcttggttatatattgttgattacaaactaaattatatttgtattggagaacattatcccacatggattaaatgtaaaagtatcgaaccatatataagaacatgggctactccactcattgccaattagttttaagatggaaccccatgattctcaacatggtatcagagccatatccctagccgcctagtgggctttcgatccacacctatccagatggttaagacgcctgagatccgaacaaaaataagcgagcatgtgataaggtgattcaagattgataaacaaaaatagccactaatatgaaatttaaaactatgtgcgaaaaaattaagcttgttaaaatttctattgtaaaaaaattattaaaattaatctaaaaacaatttcaatagttcatgtgatttctttaacgaccttaaaaatttagagaatataatttaacacataaaacaaaaaattctaattagcctcaattttatatatattgttttattattctccacatgacataattttatttttatccctatacaatttatattttttattattgtcttaacatatgtttatttttatctcattaatacttaacaaataaataaaaaaaaaaaaaaattggccccacttagaattatgattaccctgccgagcactggataaggaatccacatctaaccgttgaaactcaaatgacggtcaagaattacaggggggatcaagtgttggaaaacgaagtacagaccgaagcaaagtgtaaatttcaacaactttaagatttaagagggtcccaatggaatggagcaattgagaatcaagataatgactaaacaaaaagatgtttcttcaaggatctagtggaagaggagcttagccagaagcaattgttgatgatgatgcagctcagctcatctctgtagatagagagtgttttgagctactacattattctgaagctttgattacttgtaaaaatggtgcaatctcttctacaagctattccacttttttattccccctctatctccacctccaggttccatacagctactatataattatatataaatatatatgaatattatttttgtaattacttaaatagctagctttcttttgtggtattcgtgcttgaatctggtgcccagagttgacactcgttgtcctgctaataatgcaggagagggcttgggaagatgatgctgaagtgctcaattgagcatccttccggatctagtaagctagtgaccaaacatgtcttatctagttttgcagcttcgataatcttcctctcccaaattgatcaggttgcttgagtttctttatcttctaatattatggattcagctattttgaagaaaaaagtggttgacatgggaatgattgcatttgatttgtgagaacaaaattattgagatgggtgttgtagcatgacaaggtctactaaaattgaacatttagttatagattttactttccaaatcaagctgtttattgatttgttgaaagatattgttttctcttctgtatgttggaagccacaatcgtatttgagtttctaatttgactggaaaaattatgcctaattagtttgttttatatgtaatggcaggctgtggctgctaatgtaccccatcaacgaagtatatgccagcttgcaaatgcagcaagtaatttgccaactcttccacttgatgaggattctgataaaggaggcgcgaagctaatgatgatgagaggcatgacagctgagaatttcgatcccatcagatattctggaagatggtttgaagtagcttctcttaaacgcggatttgcaggacaaggtcaggaagattgccactgcacgcaggtaaatgcaaaagggtatgtatagtagttgagatttgtgaatcttaatgcttataatattccttaaagattagacattaaaggatgaaaccttagctcttactctcagtagaatctattttggctgtgaatttaaaatattctttggcttactgttaatatagttaggaagctgagataaataaatttcagctccttgatgtaatttaagtcaaaatgaagattgttcaatttcaatattatgaaagatatctatggcttctaaaatgtatgaaatgcagggtgtctatacgtttaatatggaggcaccatcaattcaggttgataccttttgtgttcatggaggccctgatggatatataacaggtattagaggaaaggtccaatgcctatcagaaaacgatttggagcaaaatgagactgatctggaaaaacaggagatgatcaaagggaaatgctatctgcgtttcccaacattgcctttcattcctaaagagccgtatgatgtgattgcaacagactacgacaatttcgctcttgtttctggagcgaaagacaaaagttttatacaggtaagaactcattaaaacatataaactagtgtgaaagctttaattctctttttatttcggagtctttgaatagcatttactctatagatttaacttaacaagcaattttttaatgcaaatatcagatatactcaaggacacctaaccctgggcctcaattcattgaaaagtacaagtcttacttggccaactttggatatgatccgagcaaaatcaaagacactccacaagattgccaagcaatgtcaaatagtcagctaactgcgatgatgtcaatgccaggaatgcaacaggctctaactaaccagttccctgatcttggattgaaagcctctgttgagtttgacccttttactagtgtctttgacactttgaaaaagcttgttcagctctattttaagtagtttctcagtaaacttgctatgtaaatttttatttactttttcttttttcttttacctataatccaactcaagacagtaaataaatgtatttattttaagctttgacttgatatattctaatagtaccttggataataacatccagctctcgaacagattattaataacacaaaataagtaccaactttcaaccaagtacagtataattctcttccatataaaagggctatgtcggctcatcttcctaatttggaaactttttctttcttccaataaattacaaatcattgtttttgtttatttcttatacatgtcatgtcatattttttcttgaaaaaattatacttcatactatttttattttattactatttaatttatatacagttttatagatcatatcacaattaagtggttagggactttaattttaacaagttatgtgagattatatttggtactttaattataaaaaaaagtacttatcaattaaaattattttgcagttatatttggttaatgtgtaataaaaaatgtgtattttttaacttatccctctttctttcaaaacaaaagttagggttgggcctaggctaagacgggctatagggcccaccgagctcaggggcccaaaaagaaatatttttcagttaaaattatacatattttttagtagttttcaaaaatactacatataattttttaaaaaaaataaatggcccaataatttttttttcttctaagacccacccaatctcataaccctgccttaatagaagttcaacgttttaattctaaaaacaagaaagtagagaacaatataaaattaattgtcgtaggaagaaaagaaaaagatttagattagatgacaaaaacgagtacaatagattaagttattatcatttacttgaaaacgtgtcaatatcatgctttttgaatcgaaaaattaagaattgttgatagtgtacatgaaattggttagttagaacttggttgttataggttagttatgttcttgttttcaactaactatcagaatgttagttaaggattctgttataattagctaagctctctttagagtatatataatcattgtacgcattttacttcaattaatgaaacacattgttttcttcttcattgttcatactctgctcctttgaaaatcaacttggtatcagagctcatggttgcatcactagtgttcacttcctccgatgctgcagctcatcattctgcagttccaaccacaatgttcgttccacccctgcgattgaatcgaaacaactattttttttggagatctcaagttctccctacaatcagagcccatgatttggaaagaattcttctcaaccaaaatcgacctcaaccaaggattcgcaaacctcctgaatcaacaacaatggtaagcaatcctgaatttaatagatggatgcacttagatcaattccttttgccgtggctaatgtcaactatttctgaatctatgaatggacatgtggtgaattatgcgtttgcctctaaaagttggaccacactcgagcaactatttgcaacttcatctcgagctcgccaaattcatctgatgaattaactccaatccaccaagaaaggctctttagccattgatgaataccttctcaagatgaaaaatcttgcagatggccttcgtgcagctggaaatcaaatctcagaggagtaacttattctttatgttcttgctagtcttggaacagagtatgaagtttttgtcgtaaacttaacctcaagagaaagactcactcttgcagaggttcaattcatgcttcagaatcatgaaattcgtattgaagcaaatcaggcccaggctaccattgatctccatggagctacagccaactatacttagttcaagaaaaatcaatctggtggatccaaccccaatggaagagttggatccatcaatttttgaggttgtggcaggacctcttatggtggaagatcaaacaatggtggtggcagaggctacttcaacaacaattgacctgtgtgtcaactttgtggctgcattggtcacacagttcagaaatgttacagaaggtttgatatctcttacaatggtcctgatgagaacaatgacaacttaagtccaaatctaccccaagcacttgttgcttcaagtggaactcatgatgatgatgcctggtatcttgatagtggtgcctctcaccatgtcacccaagatagtgccaatcttcaacaacaaaactcctacaaaggcaaggaaaagattacagtatgtaatggttcttccctttctatatataacattggtaatagtactttaactgcaagaaaatctcttttatctcaaaaatattcttcatgttctagccataacaaagaatttaataagtatttctaagtttactcatgacaataatgtcactgttgaattcactcctgatttgtcttttgtcaaggacaatgactcgaggatccctcttctccaaattctatagtcactagatccatcaaacctgccaatatcgacttttatgttactcatgttaacaaattcagaattaattaaaaattcattttgagaagacttagtttgattgtccaatgggacatcctcaaactcctttagatcaagaactccttcttaagggtatacttccttctgtattgatcaccttctcttctttcttgcgagttattcttgttgatctgctcaactctaataccactataagaattttacagatttaaccctacacaactcatacacacgaatcaacacattatttttgaaatgtggatgaagaggagaaacatgttttctttctataagtttccttttattttttttagtttctgagtttaacaataccaattttcttttgcagtgatggacaaacttcgaaatcaaagcaaacacaatggagttaaaattgaaacataatcaagtaaaatcaagaacttaagttgtgcagagtaaagaacaaggaacaaagaaaattttaaaagaggtgagagaagagaatacaaattaacatagtaattttacatggttcaccacttgattttggggctgcgtccttggtgagctacctcagaaaagctcacatagaatttactataatcaagatcaagattacacggtgtcgagaagattcaaagtcacacagattgactaataatcttctacttcacactcaagtacgaaattctcctttctgtacaatttttttctttctagatctcttcaatccttttctttctctctctaactctcttctactactactctttgcacacgagagtttctctcactaggttctcactctagctttcttctagatctagagagaagaatattttcaagtggtaagtctcttcttctgatcttctttctatttatagatgtagagttagttgagttgaaatggtagttagtaaataacttagttaatgttgattgcagaagttgttatggctgttgagtctagtagattagaatctaactgattttttgttgtatgttgaaacatattggcttatatgaggaattatttcaacactttatattttgccataaccttatacataataacaatctacaaatttttataattttggggcaaagtacaactttactaaaatattcttttagaatgctaaaaatttctagatttgcacctcattaccaaaatgctcatatcttgagctatgaacacattttcaagagttccaaagcctaatattagatattgttctacacctttttttttttacaaaatcagaaatgttttggaggtctgacctattgaaagtcagaccacgaacattgacaacttgtatttttacaaaaattacaacttcaacaatttttaatcaaaactttaagcccattgatgcatgaacgaatttacacataaaaagcataagggatatataaagttttgatcatgtatatatgaaatgagccatatatatttttgtatatgtatattgcattttaatgtagcgatgaggtagataaatccatggtcaaaacaaaatggtgaaattaatatataatggaattatgaacgatggtttacaggctgaatttctcctagaagatgtctttcggactgattaagttggtccccaacatttgccaactcaactactactccaactgtattaccagaactaccatctttattaggacccacttggctagacccatttgaagcctttctcattcctttattcttcttggcctgccgagcccaatcaactaatccatcttgtatgtgttcttcgaaaatagctttcttgaaggaacttcccatctaataattcaaattcaacaacatacaatcatataatagtaatgaacaaaaaacaggtacttaattgtttattacaactcttcccattcaactcacctgtgtgacaatggcatacaaaggcaaggtgctgtaactacaaaggaactgaacaaataccctgaaaaagaaaaaaaaaatgtttttattagctggaaatatagtacttttaatctctaccaaattttttttatatatatataaatatatagagatatgattttgtcccgagatgtattttcacggaatgtattccgtgatacattagaggggtctcagggtacattaaatgagtgttagggtacgtttctattttttaatcctaattagccctagaacaatctcagccgttagatcaaataactctctcatctgacggctgtcgtacatcatggattacagaacaaaataatatccctatatatatatatatcttttcacgtacccaatcactagtcggggaatgataaagccgatctgccccattatgcaagagtcaaatccgtattgaacctgtgacacattatattgaaccaatgatagattcaatatatgagtagggaaataatattatatatcccaaaatagcaacactaccaagaaaaatgtgtagaaaaatgtacattgcgtacccaaatccagaagaaaaatgctagttcgaaggaattttggaaaagtatgatatgaatgagtatgagaacaaggcggggtcgatgaaaccagaagtgatcgtctgatggtttaactaccaaatcgccttcaattgctacatgtttctcagcaacttcatgggccaattgggtaattacatgctccaacttagtgccaacagcaagcagaagctaatacattatttttacaatgttaattactaatgcattataaatatacttatattggcataataaataattatatgtatatatatatatatatatgtactacttacaagcaaaggtacgaatgccaaccaaaaatatgcgtgcaaacctgtatatgtagaaattcctcaaaggttaatttccggaagaaaaaaaaaacaaagttgattatttgtaagaggatgaaataaaatgaaaaaaagctagcttaccggatacattcaggcacaaaaagaacaccacaaacaaccacaaataccaactgcaattgattattcaaaagtttgtgttagtttagcttaatttgtttcaaaaaaaaaacatttagtttaattcaagcgaaaatgttatggatatgaatataatctatatatatagcaagatagcactggtgaatgcttaatgtttcataataataattaactgtaatgatcacaacacaccttatcccaacaacttttttaaaatcagcttcaagggcacgaatcatgtacttgtggaaattaaattttcggtttcccctgcaatgtgtctacaataaagattaatttacttcaaatttatcatatacaaagtaaaaaatattagttacacaaaaaatttaccatgataaagcctagcctaagtgtcaaataatctgcttcggtcacagatccaaaaatttgcttgaagaatgaatgctgaaatttaagaatcaaaagtttataatcataattacacagacagaaatgtatgcaactaataataatgaataacggcttaaattgattgtaaagcataattattaatcatcatcattactactcaccacccagcctaaaagtgataaattcttcccaatgcccaaaaagcgacccctgataaaatcgtgaccttgaacgtccgtgaactttgtttttagagctacatatacatatcaacataaaaatgtagcaagtagtagtaagtacttaaacttgaaaaaaaaaaaccaaaaaaaaaaagcaaaataggtacgtaccctcttctgcattgtttgttccattttttgagatagaatcctcccattttttccattgacgtatctagagaaaggaaaaagattttaataatatgtacatgttcaatgaaattgagtataaatttagagagataggtaggtaagatacctttatcccaccaaaaagaatagttaaagcacagaaggtgacatggacaacggctaacacaaagatgaagatatgaagatggtggagtgctgtagtggacaacagtggaaccttttcctgaggacaaaagcaaagaatttatttatagactatcattaatttgtctcttaatctattctatctgttcttgattcttaaatatgtcttaattcacttgtcacataataaaagtataattctcttggtatgtatatgtgaagacagagtaaattgagtcatattataataaataaggatcgaataaagaaatgaaagaaaacatagtggagtaagacttaatagatagataattaattaagggtaattaggatttaaatgtaccaaatcatgccttacaagttaaaaattcacgtgaattattgggatggttagatttaaaacttttatcaaaattcattcaattttactgtttcaaagattgtttgtgtactaaaatatatctaccaaatcataaactcaaatttgatatgtactaaatcataccactagaatttgtttactaaaattagaaaaaatccttaaatctaacattaaaaattttaacggcaaaaaaaaatttaggagaatgatttgtcacctgtcaaacaaaaaatcctaattaatgaaaaatttgtgtgatgattaagatacctttttggaacagtagtcatcggaacctgaagaggaagcctcggcaaggaggcgtggaacagttgtgaaaagggtctgaaagtgatgagtagttttagatgatgagtcatcttcgtcatcgctacaaggcagccactgcttggcatgctctttgcttatacatattttggcgatgcgggcttggaaaaccgtcagcagcagcgatatgaatcccaaaagcattaactctgcaaattaatacaaatatatcaataatattcattccaaggatgattgatccattcccacagagatacaagtaattaccttctttgaccttttgcaatgcttcgaacagaggcttttggttctttttcttcaaatactgcaatattatgagagatattaatattaataagactgaatgggtgaatattgaataacaagtataatatatacatgcctttccggtgtagtgaatgattctctcaacggttagagaaatgaagacgatgacagtacaaaccagagccacaacccaggtgggcgtgtactccaacgttgttccctcctctgtcatccttactttattctcttctctcttcttcactcctaatcttatttctatttcatttacatttacactaaaaagccaaaatcacttgcttgcctgtaaagctacaaacaaagccctgtctttctttctctgtttctttttttttttttcttctttcttttttaataataaaccagtcatatacataatacatatacatattttatattgaatcgactcggactgcgaaagaaaaaagaagaagaagaacgcgtactggtattattaccacaaatacaataataatttggcctggtggtgggtaatgggttgactttgtaattaaaccaaaatcaatatttttacaaggtaattaatctctttggatttttcttttcgtttttagttactttctttctttatacattttattttacaaagatagtatctcctcatatttcatttcaagtaaccatatattaattattagttagcaaaaaaaaaacatatcttaattattagtgtgtagagaatattagacactctgtctttctggattgattgacaatgcaatgaacataagaatcatcagtcacgcctcaattaaggccgactaaggagccactactactaccccattcttcattattaagggcccaccctcctaggtataatgttattggtgtgtagtatataaattaattgacggtgtgtagcatataaattaattgatgatgaattactttatatattgtttttaaaatttttttttataaattcacggttgggtatataaagtagttgcaacagtaattacaataaataaaaaattttaaaaatataaaaaaaaaaaatcttttaaaaagtaaaaaaagaaaagccccttaattaaattaattagataatagtgtgaattgtgctgctagatagtacaactgatgccaaaaaaaaaaaaaaaaattaccatacattagtcattacatacgtatctttatgagtttgtttctattttcaccttatttattttgtttttctatttatatatagatacatttttacaattaaatataaactttattaatattttttaaattacttttctctttcttttttattttcttgtacaatgaattcttcttctttccaatatttaagtcttccaaactttaaaggtgtagcctaaaattattctcacatttcagtagtaccatcatcactattcagtttttttttttttttttgaataaaaatagaaacttcattaattcaaatcatccgaaatcaaagaagagattacaaaagataaagataaactattaaaaatacgatcagcctcaagaagagaggactacgccaaacaatgcgcaaccctattagcagatcgcttaacaaaactcaaagagatgttgtcaatctcggcacaaagagccttacattctaagatgatatgtgtaacaccctaactaacttaggcgtattacatgatttttaaacgtactgtgcannnnnnnnnnnnnnnnnnnnnnnnatggaaaaacgtgattaattaaagttt

SEQ ID NO: 16435 - DNA, 6236 bp, Cannabis sativa
ctatctaatgaattactttatttctaaaaaaaaaaaaaaaaattaaaacataaaatgcaacataagaatacatagattttaataattattagggtatcctcaaaacttgttctatattatagaaactctttctaaatcaatatgccaaactcaaagaatattgaattctcacgagctatgtaaattcttacgaatataattaataaataaaaaggtattgaccaaaatttatttatgcatttattattgtgtgacaaagtacttgattgagaggtgcaggagcagccagctatggtggaggtgaggaccagcggattcctagtctatatcaggctaccgcatctcgtttaatgggttttggaatttctctcatctgggtcttgaccagggatagggtttaaccatggttagatccaaaccctagttaagaaacccaactagatgaacctgaaccctttataaggagtccctcgccttgtttcgtagctccatcatccccactcatttacttttacctctctcaagagaaaatccattacttgcattttgatggtttctcaatactctcttcattcctatctcatttctcattagcctttcctcttttacttattatttctttctctatccattttcccagctaccaaactaaggcacgtctctcctttttctaatattgatattactgatcgtgttttgcatggtgtccttattttgatcatatgatatttttattgtgttaatgtttgatatttttttttattctcgtgatcatgaacagatatggcttctaacggtaacgctaacggcgagttcagcttcgggaccgggaaagggacagcacggaacggactgtcgaaaattcagacgcagaagaaacatagcgaaatatgccatgatgacagtgcgccaacggtgaaggcccaaaccatcgacgaactccattcgctgcagcagaagaggtctgctccaaccactcccattaagggtgctcagggcgcgttcgcaccaccgcttctctccgacgaggaccgccagaagcagcagctccaatcaatcaggtatatatatatataagaataatataattggttattaattaataataaaaaatttaaatgatgaaatgaaaggttacttaaaatggacaaaaaaaagaaagactccactcctgtgatgagttggatttaaactccagtattttgtgacgtaagcatgaaaaaacgtgggacccaccagatatagtttatgttttggagtgtgtgccatacgctaaacgacagtgctttggctatgttccgagaatccgatggaaaatagggattttctgatttaaagtatattttatctctgccctctcaaagtgggacccaccgtttgatcacttgtttgacacgtcatcatataaagtttttcttcgataatatttttcttggaaattgtgaggataattgatgttttttttttttctgggaaattattttggagtaaagttttgttgatatggtcgtcgtgatccaactttgttatttatgaataatattgtaacagtgcatctttggcgtcgtcggcaagagaaactggaccaaatgtggtgagaggagatccggccaagaagtctgagactccgaaggtgtcacacgtgtcacagcatcactttttcacacccaccataagcgttagtgacagttccttgaaattcacacatgtcctctacaacctttctcccgctggtaatttccttgaaaccttattttttttattttatattaaaaaaagcatatgtttaatttatacttagttttgcttaattttttttatccttcctatatttttaatataaaaaatatatattttaaataagtgcaatttttttaatattggagataaatataactccaaaaaaaaaaaaccaattttttattttatatttatatttttgggtaagcctgttgtttcaatggtatttactccgtgctaaaaaaaaataatagtatttactcttacctgatagtgataccgtacataagataagtttttattctatttttttttttttttaaaaagaacatgtatgttaatagttttttagggctacttccaaattttgagaatttttgtttatttttttaatgtgtagtgataagtatttattattaaaaagatatttctgaagtttctttattattaatcattaaaaatattatcataattaacttgtataaggttattatattttcaatgaatttttattgattgctttaaaaaaaattattaaaaatattgaaaaatctttagtcattcaacctgatggctttttcaaccaaaaaaaacggatggttttgactaatttttaaatactttttttatatataaaaagtagtttaaagaaaaaatccaactagcattgatttatgattaccggcaagatatatatcttggattttacatgacatagagaaagtggtcaatcacatgttttatgagaaagtacgtaaatgtgatctttatagaattaattaacctatatttgcatacgtacgtaatatagagttactatatggtgagggttttatttggtagaaagtaataataataaaatgaggttgtatgtggtgcagagctatatgagcaggcaataaagtatgaaaaaggatcctttattacgtcgaatggtgccttggctactctctcgggagccaagaccggtcggtccccaagagataaacgcgttgttaaggatgacaccactgaggatgagctttggtggggaaagtaagttgtttctttcatttttctttattattctctttatttaataatattattatattttagtaatttaataattatggtttgatttactcgtttcaggggctcacctaacattgaaatggacgagcacacatttatggtgaatagggaaagagctgtggactacttgaattccttggacaaggtcatacatttttcttatattttcttacaattaattaattcatggtatggtttttttttgtccaagtatctttatgaggccacacataactttataagtacatggctctattgggactactattttaggtcacacaactatttgttgtggggttcacagaaaaaaagaaaaaaaactatttgtgggggtacatgtacatggagttaattggtgaaacccctttacatctttccattttatgatggtgatggggggcaattggtatctttttcgtcctcttctgtatatttattatgggccaagagttacactctgattctttgggagtagcaatcttgtcgtttatgaatgattccacttatctacgtttaagcggttctccttagttattcttgtccttgtgtcgttttccacattatacaagatgtcttgtctaccgtagggttatggggagggacatagcatatattgtactctagagaacaaaaacagatgtatgtaaataagattgtaggtttacttactttttactaaattgaaccaacaagtaacaccttccctggtttctttctttcttcaattctaattttatggagtaaaatagaggattaagatgctattcatagctaagcaacccttcacgtttaacttaattaaagtcttaattctaatcatttcttttgttaattacttaataatttgatttgggggttttttgtcaacactggaaaaaaggcctttggtatcttatcccatttagaacagccttcacacttgtgatattttctctgtgtttgaccatgctctgtacattcatttgctaaatttcattattaaaaatttcaggtgtttgtgaatgaccaattcttgaactgggatccagagaacaaaatcaaagtcagaatcgtatcagccagagcttaccattcacttttcatgcacaatatgtaagtaaagaaaaagaaaaaaaacttttataaaagaaaaatcacacactcatatacaacagctccccagataagtttcctaaacgttatatatacatataacagtaataataatatttgtatggttagatgttaataaagtcccaactggccaaaaaagaaaagaaagtgtttagcttagtagtgtacgtacaatggataactgggtaggttgcaggtgcatccgacccagtcctgaagagctggagagttttggtactccggacttcactatttacaatgctgggcagttcccgtgtaatcgttacactcactacatgacatcctcgactagcatagaccttaatcttgctagaagagaaatggtcatcctcggcactcagtacgccggggaaatgaagaaaggtcttttcagtgtcatgcattatctcatgcctaagcgtcaaatcctctccctacattctggctgcaatatgggaaaaagtggagatgtggctctcttctttggactctcaggtattgtgtcatcatcggcatcattatcataataaagccgatgatgatcgcaacaattcatcatatcccgtcccatcccttttggcgtttaagccccgccaatgccatgacatatctgatatttgcctatgctatgctatgatgatgatgatgactacttggtgtttttgttttgatgttgttgttgtgaattgtgatgatgagttttctcttttggtgttttttgttctgtttttctaggtactgggaagactactctgtctactgatcacaatagatacttgattggagatgatgaacactgttggagtgatactggtgtgtcgaatatcgaaggcggttgttatgctaagtgtattgatctttcgagggagaaggaacctgatatttggaatgccatcaagtttggaactggtaaaattattgaactctttactttttgtttatatgagttgatggtgatttaggtgaatgatatgaatttgatgttatgtttctactttgtttctttagtggttgagaatgtggtttttgacgagcatacccgggaggtggattatactgataaatctgttacaggtaattttcaaactcttctaattttctttaaaaaaatattttgaggtaacttttctatcaatggtatttgataaagttcaagataagtaatgtgacttggatttgcattataaatttggaatcataataccattttcaaatgaaatgagctgcacattttaaatatgactctgacaatgaatggtggcaattatgcctgttgaccttatctgtttactttttttttttgctaaacacagctgactttactttatttaatagtttactcaacagtttaagcaacctaatattagattacctcaagtcaatagctctcctctccgtacagatgagatcaagtatattttttagtttattataataataatgatgcaaacaatttagataatgtacacttaccatagtcaatagtcaaccaactcttttatttttattaataattataacacttttttttgttcttgttgcagagaacactcgtgcagcctatccaatcgaatacattcccaatgcaaagataccttgtgttggtccacacccaaagaatgtcattcttttagcctgtgatgcatttggcgtgctcccaccagtgagcaagctcaacctggctcagaccatgtaccacttcataagtggctacacagctctggtgagtggtcactaaaaaattaaaacctcacccaactatccattggctttggctaaactctctggctcattcatgaaaattcaggtggctgggacagaagagggagtgaaggagcctcaagcaacattctcggcttgctttggtgccgctttcataatgatgcaccctaccaagtatgcagccatgctagctgagaagatgcagaaacatggcgcgacgggatggctcgtcaacactggctggtctggtggaaggtatagatgacatgacgatcatgtacttggttgtgacacataccacatttcagtaattgcatatagtttactctattgtgactctttgaaccctgcagatatggttctggaaagagaattaagcttccttacacaaggaaaatcattgatgccattcactctggtagcctcttgaatgcaaattacaagaaaaccaaagtgtttggacttgaaattcccactgaagtggaaggagtcccttctgaaatcctggaccctgtgaacactgttagttgacttttttatcttccttcttttctttgacctttcttatgttagaagttttattgggt

SEQ ID NO: 16436 - DNA, 7696 bp, Cannabis sativa
attcccgacggtttaacaccgtcgcctatacccgttataggcgacggttttaaacagtcgggaagtccacattagcgacctattttgcccattttgcatagtcgtattaacgacggctatagaaactgatgggaatactttaaactatttaaaaagatcagaaaaaatcctttttatagtagtgagttgttttgttttattcaaacatttatttatatatagatgttatagatatatctttatatatatccaatggcggagccaaccaaatttgtatatatctttagattgtaattgtgtttaaattaatattagtattttttttatttttcttcattttggccaatcttagactatgtttggtaggaattaggagcatatggagagttaatgaagaatctggaataataagaaaggagagaagagagtaacaatctttttaagttatttggtggaagaaataaagtggtagaataatggaatattaaaatatttatttataaaattattttattgtctttataagtaattttcttataacatattaagagaatatatttataatttccaacaattgaagatggagattatgtattgttctaaatgaattaattgtaaaaatattaagtcatttgtaagagaatataagttactgtactcattactagggctagtcctaaaattttgagagccttcggtcaaaatttaaaattaggtcttttaaaaagaaaatatatttcattaagaaaaagaaatattattttagacaatacattagacaatataccgaccttgtaattaggggtcttgtgtaatggtctaagctgtacaatgcttgggagacggttagggcagacgtacatgtttgcttatagtagtcatgacccttcaacatatatgtatatgtaatataaagtcttaaactctaatacattgtaattgaacttttttaataattattacatggtggcctattttaaaaaagtcaaagtaaaattttaaaaaaaattatattttgtctgcagtagcactaacaaaattatatataattactttattttctaaaaagaattataaatttccttttcatttgtttatattttttaataatattcatttaatctatttgctagctagaccatcaccatttcaaagtattttttaaaaaaattagtttagaaaaaagtagaaaactttttaattttggttcaaccatttcatttatgttagtggttggtaaaaattagaaaagtaaaaatatttttacttgtgtataaagtggtaactcttattttacacttctagtttctacagctactacagatcaatctttttcagcaatgaaaatagtgaagactacacttcgcaacaagatggaagatatatttttaagtgattgtttgctagtgtatattgaaaatataattgctaaaaaaattaacataaattcacttatatatgactttcatgatatacaagagagacgtgttgtactttaattttaattaaaattttaataatataatttgaactgtttgtcatttaatttataatatagtttggcccccctgaattttgactatggctccgcccggccctattcataatcaccaattagtttttaagaaggaattttatgattcttgtcatagtatcaagaattatctcctaacagacattcgatccatacttatctaaatagtaagctagaaaaaaagtatgtcgtacaagattcgaacaaaacaagcgagtaaatagtcatttgtgatacgataattcaagattggtaagtaaaaaatagccactatcttgaggggagatattaaataatattgttctacatgtggattaagtaataaaaatattgagcagttttataaagaacatgagttactccactcatcaataattaattttaaaatgaaatcacataatttttctattgatgcaaatattttaaattgagaagtttaaaagatttattttccatccaactatctcttccctcccaaatttctctcttgccaaacaagaagacttgttgtcttctactatctctccctttcctctcccctcctctccatccacctacctttctttcctactaaaaatagtgttagttcttccataaaaaagaaaaaaacatagttagttcttggctccctcccagcatgccactcacttgcatcatcatatcatagcttgattagacgacgtattaccgaccttaaaatttagtgggcgaaaaaaaatattttgagctcttatttaaaataaaatgaggtatttttcaaattcaacaaaaaataatatgtaattttaaaacaggaatttttttgagtccctaaactaagtgagttttaaatacatgcctaacctaactataccttggaccgagcttgctaaaggactatatctaaatgtagattctctagctaatgcacctttagtaattaaaaggacttaaaaaaaacatttggggagttaaaagaagagtattactattgaatatgtagtgtataatactttttataaatattattttatgattggttagcaatattttttaaaatttattccaaaaaaaaaaaaaaaagcctgcaatgaagcgtacttaaatagagattctcttgctaatgcacatttattcaagtggaaagtgatgaacaaatttaattcatttttcataatgaagcaatgagaaaatgattgtattataattgcatgtgttttattttatattcaaaacaattgtgtcggttgtcttccatgttgtatcatctcactaaatattatttatttatatctgtcatgatttcaatctcatgaaaaaaaaaaaaaaaaatctaaattcattacatactatttttataatattattataattctacaaatcagttacattaaagtttgaactggcctaatggctcatgagtttgacttttaaggtaatcttttgtagctttattaatttcagtttcatgtaataacatggcaataaaacaaaacaataaatttattttaattaatcaataattaataataatagagacatatgaaatgtctgaattgccccttaagaagagacaatggactcaactgtaatgacaatggaaaaagggtatttgcagtcattttaaccgaaatttcttcaaacttcacagcgtgagctttggcggcttctctaattgactctctctctccccttttctctctctctctactctgtttgtatgtacatgaacgacctagaagaagaatattgatctctgcattcccatttggtttctgggttttgtcgcaaaagcctataagttgtgaaattggtatatataatcgcttaccatttttcattgatttttttttcttcctgggtttgtttgattttttttctttctgggtgtatttttcaggtctctctttgacagaattttgttgaatttgatccagtagaagaggtgagtctcataaaaatatatatttttttttctgggtgtaaaaatcccgtttttaatggctcactgttgtatgattttttggtgaattggcttgtaaaggttttggctttgtgaaaatacagctgattccagatatattaaacacttgtttaaggatttccgcttgtgggtttttatatttgtatatatagaggttttaagatgataacatggtccaatgtggcatcttcattgttgtttatcttcattctttctcactcatttaatgttttatgtttttgcaaattctgggttggtagaagattgtttcaaaatgcatataactcctaaacttgattagtatgagactgatttggttttgtttttgtaggtgtttatattggctttggtggtgaagatgataaactaatttatataaaattcattgaaggggctttttggaaaccatgttatctattcataagtgtagattctcatggtctctgattgcaacaattgcctcaattgtcacattggtttcaattgtccatctcttcttgtttccattggttcctacattggattactttaggcaagctcagatttcttgtatcccagttaatgaatcggttgaccatgtcaaggaaagttttattgatttagatcatcaatttcctactgacttgcataatgctgttgtttatcgcggtgtcccatggaaggcggagattggacggtggctttctggttgtgattcaattgctaaagaagtcaacatttctgaggtgggtgactaaaagttctttaatggtacttattgcatgaaagagcattagttccattagttcttctgtgaaatataacccctttaaggttggattgaacttggcttcccttaacagtttgtctatttggtagattataggtggcaatgcctgcaaaaatgattgctcaggtcaaggagtatgcaaccatgaattgggaaagtgccggtgcttccatggatttggtggtcagtaattcatttttttcgttctaaagtgtatatatacataatagaaaacttttcattaaacagactagcattgattgctcaactgtaatttctatgttcagaaatgtaaattcaattgaaggaattaattcaggatatagtctttattcactttttgaaagactactaataatgcaggagaaggatgctctaagaaatttaagctggcctgcaactatccggcggtaccagattttccatatgggagatgggttgtctcaatctgccctgctcattgtgacacaacaagagctatgtgcttctgtggagaaggcacgaaatatcccaatcgtcctttagcagaggcatgtggctttcagcttaagtaagcatgtcagatccttatcactattagctttcattattattggttacagtacataatatgagtaagaagaaacgattgatatctccctcagatcaccttctgaaccggatggtcccaaactgactgattggtcaagacctgatgaggatgtgttcacaacaaatggtagcaaaatagggtggtgcaatgtggatccagctgaagcatatgctaacaaggtgaaattcaaagaggaatgtgactgcaaatatgatggtcttttgggcaggttctgtgaagttcctgttctaagtacttgtatcaatcaatgttccggtaatggacattgccgaggtggcttttgtcaggtaacttttttcttgtttttgcagtgcacatattttcattgtgctcttgttttagtggataagaaactttgacataaagaatagtgatttatataaatgtgtggtcatgaacaatgagaccaagataccaagataaagaatttagaatgagtattgttagcttcaatcttcttgtataattggattttttttttccttttttgtatgttccagtgccacactggttggtatggagtagattgcagtgttccatctgtgacatcatctattcgagagtggcctcaatggcttcgtcctgctcaagttgatgttccagatagtttgcatttcaaagggaaactgggcagcctcaatgctactgtcaaaaagaagaggccccttgtttacgtctatgacttgccgccagatttcaacagcctactccttgaggtttgaatgagcttaattacttattctctctttttttacctgacaaagagcaagccctttattttctcaatcttttcttgtagggacgacattataagtttgagtgtgtaaacagaatatatgatgaaaacaatgcaactgtgtggacagaacaactgtatggtgctcaggtataatgataactgaaattcttgataaacttgtagtaagaacataaaatgctcaggatcctattctttgttttgttgctacttggtttgcaggtggcaatttatgaaagtatcttagctagtccacatcgtactttaaatggcgaagaagcagattttttctttgtacctgttcttgactcctgcattataacccgtgctgatgatgctcctcacttgagcatggaggtatcatttaccaaagttaaagttcatatggatttactttcacacaaagcttcattatttcttctttcatcttttttttcttcatttgagcatggtcaatgttccttttagcttgttgtttcggatatccattatctcttctaaatagctagttatgatctcagtgaaagtaggactgtttgacatggtttttattttattgtatgtgaaattttgcccattgtatgcacataacaccttgaatgttttcaggatcacagaggattgaggagctctctcactttggaatattataagaaggcataccatcatatttctgaacaatatcctttctggaaccgttcatctggaagagaccatatttgggtatgatggaaatagggaattatttagtttttgttagttttcaattgagttgcaattcagggtatgtttcatatattcatgctaatgaggatccaactgtatctgaagccagtttttttcgtgggacgaaggggcttgctatgctcctaaggagatttggaacagcatgatgttggttcactggggcaatacaaattcaaagcataatcattcaactacagcttattgggctgacaactgggacaccatagaaccttctagaagaggaaaccattcttgtttcgaccctagtaaagatctcgtggttcctgcctggaaaagacctgatgctaactcccttagcttgaaactttgggctaggtacacttaacacttctgatcaaaatcattcccattcttttttattctaactgcattaaactttcctgcttaagtaatgaaatttttatttttagaccacttgagcagcggaagacactgttttacttcaatggaaatcttggaccagcttatccacatggaagaccagaatcgacgtgagttcatttgtatcactttgatgagtcatatatcaataccgggtctagtttttctgaaaagttttcgatttatagtaagatgaatgtgtaccgacatgtatgttggggggtgtaattgtgcaggtatagcatgggaatcagacagaaactggcagaagaatttggttcaactcctaacaaggaaggcaagcttggaaaacaacacgcagaagatgtgattgttacagcattacgttctgaagattatcatgacgccttagctagttcaatattctgtggggtatttcccggagatggttggagtggacgaatggaagacagtgttttacaaggctgcattcctgttgtcattcaggtaatgatgaggttatctcaagaatttttactattaaatttgtatactcatgcttcatctgttataattcgacatgtttaggatgggattttcttgccatatgaaaatgtgctcaactatgatagctttgctgttcgaatacgcgaagatgaaattcctaatttgataaatattctaagggtaaacctcttcctctttatctacatgtgatttggaagctctattttataagtctcgacagcctaagatgatgactaattggcggtcgtttcaatactccaggcgtttaatcagacagaagtagaattcaaactagcgaatgtgcagaaaatttggcagagattcttgtaccgcgattctatgatgcttgaagccgagaggcaaaaggctgctcatagtcatatggaagattgggcggtgcaattttcgcagatgcttgaaga

SEQ ID NO: 16437 - DNA, 7877 bp, Cannabis sativa
  modified_base (4856)..(4865): a, c, t, g, unknown or other
attagcatgaaagtgaacattttgggaatttttaccgcaattttttctattaaaaatattgttgtgaataatcactcttcaagaacataaaagttctaaaagtaaactaactaatggcaattgatgataaaaccagaaaaaagataatagtaataacagaatgatgctatgagaatagaaatgctatagcacaggaaaataggagacaaataatttaacgagattcaatcacaagccattgcagcttggacccaatttctatttcaatgagaatgttggtcagagttacagggatgatcactaatgatcaaagtcaaaaaatagtgttttgcacctacaaagaactcaattaaggggttctgtaaatttcttctccaattctctctctagatcgttatttgggctccaagagtacggaaaaacgagttacctaactaattaactaactgttttaacagttaagtgtttaaaatctctaacaaatatatacatgtatataaagtgcagagcaatctgagctgaagctaatagtcacatgaactagttttagcattcatgaatttaccaaatctcatttttttcaagctaatatactgatattgtttttgttaagatcccttgaacttgtatcattttaaaacctactttcttttatgtaaaactagattccttgtctaacaatagtcactgagacattaaatcttattactgtatggcaaatcagatactttatcatctgagttaaccgctcttcggttcgcagtggcaccgccatgtcccgctctagaaatatgattgtggctgctggtttagtggcatttgcaagtgcaggcttggcatttcccttttatatggcgtaagtaatacatatataaatgtaaactgttcatctttttcaagaactggattggatattggatactactattctacattctttaattgttactagttttccacaattcaggtcagccaagaccccggttattgacccaacaaagccattgtcaccacaggcaacattccgagggccttatataaacaccggttctcgcgacgttggacctgatcatcagacatacacaaaaaaatcataagaaggtatcgcaggcgctgttgcttagcatttcttattcgaaatcgtttaacttttcgatgagggaacacaaaggaatgtttttctgttaagcacaatgtgaagagatagatgtaataattgccttataactgaagtcttatgcactcagttaaacatataacctaagggaatgaataggttgaatacaagctattttgactatttgttgagcctttatttgaaatttccgtacatttgttttattgtaaagttgaattgaaattacattttctgttatgaaactaacaatttgttcgaaaacctcgaaaagattcaatctttagaacttgtaacaagaattaattacttacatagtaaatagttacttcacaattatctaatgttagagcagaaaggagtttgtttgcctgactttaattgtcccctaaattaaaatccatagatcagaaacaaagttttctaaagaatttcccatggggttgttaaacaaccaaaaatcttattcaattaattgggtttcaatttcaaacacatgtgtcaatttaatccaataaggaaacaaaagaacaaatttcaaacctaatttaagaaacagccaagtacaaacctttcaaacaaagaacaatttttttcattgcaaatggaaccaaatccacaaattacaaaaaagggataattataaaaaagcaaaaactacataaaccactaaccatactacctaataagaacaaaaaaaataaaaataaaaactttacataacgtaaaccctaaatcgaaataaagatttcaaccagatctaagagctggtaaacttagtaacagccttggtaccctcagagacggcgtgcttagcaagctcaccgggaagaacaagccgaacggcggtctgaatctcccgagaagtgatggtcggcttcttgttgtagcgagcgagcttagaggcttcttgagcgagtttctcaaagatatcgttgatgaaactgttcatgattcccatagctttgctggagattccaatatctggatgaacttgtttgagaaccttgaagatgtagatcttgtaagtctccacactcttcttcgttctctttttcttcttgtcagttccagaagcgtccttgggcaatttcttctcggcccgtggcttcttctctgccggagccttctcggccttcttgtcctccactggtttcttctctgctggcttcttctcggccttgggtgccattggtacgatctcttactgaagatttgaaatggaaaatgtgaaatgtgaattgagagagtgattgttggaattttgagattggggtttgttgatatatatgggaagggggaagattttgattggttgaaaaggttgaggtgtggattgatgacgtggaggtgttgatttgttggaaggagtgaatggacgattgagattggattttgaaagtttggggaatgtttggattttggcgggtgggcttttatgttttttgagaaatgttttggtttaggcgggtgtttaaattacattagtttttattttgataaattaatttttgggcattatatatattttatagtaaattactggataaatatttaaatttaacttttaattacaaataaataattaaatttaattttgaaaaataataatacttaaattatatttttaaattttctataagtacttaatcgtttagtgtcaagtcaatagcaggtcattaacggtagagtacctatagaagttccaaaaatataactgacgtatttatctgcaattaagaattaaacttgtatatttacgtcacaaattattctatattttataaaatatttacatgtactcttaatttaattataagagcatgatggattgtatatattttggtttaaattgggttcaaaatatattataaaactatttttggctcagattttatatttgtgttataatgcataatgtacaaatttgttataaaaatcaatactacaatcaatgttcattgaaatatacaaaataattaattttatttatattatatttttttttttgaagaaaagtaatcaaaaattttattaaccttcaaattctgttaccaaacaagatagtaaatcagttgggacatctcccatactgaaaacatgaccagaataaaaattagaagcttttgcgaaagcgtaaactattgagtttgctgaacgctttacaaaatagatcaaaacattattcaagtccataagtaaatccttacaatctcgaataatagagccaaagctagagatcatggtgaaaggacgtcagatagcttgaatggccaccaaacaatcggcttcaagaatcatttgttgccaacctctgattttaatcaaacttaaagcctctctaattccaatcgccttcgctaactcgggccgaaccactcccggataagaacgtgtgactccctcaataaggtaactgaattcattcctagcaacaacaccataaccatagccttgagagtcttcaaaaattgaagcatcgacattaaccttgattccatttgatacagggggctccactgttcggcctcatcactagcagccagcagagatgactccacaggagtttgagcggtcttccattgacccagtaagtaacgccagaagcaacagtagcagaaacattaggcatctaattattattcactctatcatttcgagctttccaaatggcccagtagagaatagcaaccatgcattgggtttcgtttgaggatgaatcgaacatagtagagcaccattccaagaaatccatagcagttgtgattgtcgtattctcaccaacttttgtccaacaagccaatgccataggacacgtgacaagcacatggaggatggtttcatcatggtagttgcaaatcggacagaagctactaacaacaaccttataaatatgaagaaaaaaatcattaatgaatagtattaatgaatgtcaaataagtaattaaaaaatgtggtaattattgacggctaaaaattagcccatgctatcttttgggtcaaatgtagtacacattttatatcacgatagaagttaagttttaaagaaatattctaaaatatagaaatgcgttatatttatagctctccattggagatgctctaatgtatttacaacaaatggacaattgatggtttttagggttaactccctatagaaatgtgaaagaggattcctttaaaaaaaatatttgttgaatctgatattaaaatatatttgttaaattttatttttataaaaaaaattaatttaaatataccaataaaaaaatgacaggtgaataataacttgacatttattaaaaaattttgaaaatataacttaatattattaccgttaaaaattaaacttaattatttattcaaaattaacaaattagtcttaaataaataacaaatttgtggtcctaaagcaaacccaacagatttttaagccaatcattttctcccacgctaacccattttccctaacactctcaaattcaacaaaagagtttctaaatacaaaaacaaaaaacagagtgatttttgatttgtctttctctgttcccatttcaatctgagcaccatttgaaccttacacgcaaagtcttcttcttcaacccattataaaccaactcattctaatcacattcaacacataaagactccacctttaatggcgttactcctttcttcttcttcattcctttccttaccatcatcatcatcatcatcttcnnnnnnnnnntcttcttcttcttcttcttttgataaacccttcaaaaccctttcttgcttgatacccaacaatgctccaaaccccaaaatctccgccagatcagccaattttttgcctctacgagtggctgccccaactacccaacaatcaagttcggacctttatgaggaaccggtagaagaggaaggttatgagaagttggattcgaaattcaactggagagatcattggtacccaatttctctattggaagatttggaccctcgattgcctactccgtttcagcttctgggtcgagaccttgttctgtggaaagacaagggtagtggccaatgggttgcttttgatgacaaatgcccacataggcttgctcccttatctgtaagtttattggattatatgttctgtagcgtgcttatgcttttttggaatctaaattagacaaaaatcaatctttggattcatagctctgataagtactgaatttcttactcaagtttagttatctatgtatttgaatagatcaaacaactagagattcacttacttcatgattgatgatgagagaaagtgttgccatctagtgtgtttatgctcttttgggatctaaattagaaaatttcaatatttggattcatgataagaactgaaattcttacacaagttagttatccatgcatttgaactcattaagtcaaataactagagatttacttacttgccgaagctccctaatctataagcttattggattatgttctttagcgtgtttatgctcttttgggatctaaatttgaaaaattcaatctttggattcatagctattgataagaactgaaattcctacacaagttagttatccttatattagaatccattaactcaaacaactagagattcatttacttcaagattggtgatcagaaagattatagctttaacgattattgaatccaaaataatgagtttttttgtttggttttttttacaggaagggagaattgatgaagatggtaatttgcagtgttcataccatggatggtcttttgatggatgtggatcatgtgttaaaattccacaggctgcaccagaagggccggaagctcgtgccatccgatcaccgagagcatgtgttactaggttccccacattagtctcccaaggtctgctctttgtttggcctgatgagaatggttgggaaagagctaatgccaccaagcctcccatgtatgtaaactattattatgttattatattttaatgtcatgttgtgactattttaatgatgttttaataatataattggttttttaaatgtttaggttgcctgatgactttgataagcctgagttttcatctgtgactattcaacgcgatctcttctatggctatgatactctaatggaaaacgtctctgatccttcccatattgattttgctcatcacaaggtacactataaagtcttgatttagaacaatctgccacttgatctgattcattgagtattcaactttaaatgtcatgtcccccgccaactgacaaatatttggcagacttaactatgttcaatgctcactttggttgttcttctcttataaggaaaaattgatttcagggtccaactgtgtatcaattatcacattttgtccctgattttttactactgctaaatcgtgatccttttacaaagacaaataaaatttgaaagtggtaaaagttcggagagaaaatataatagtgaacatactttaagggtaaaattactaaatattttatacaaatttaacgatattagattgaagtttcatattttactaccattcaaagttgaaggggaatatttaacatcgataacaatttgaagggcacaatcatatttaccgatacatctagaggcacttgtaataacacttatcattgcttcttcatcattcagtgctttgctactttggtgtattatcttctagagcctatttgtgattagtagtgagttgaatatattccttgctaacttgttggttgattctgcacaggttacaggaagaagagacagagctaagccattgccatttaagatggaggctaccggtccttggggatttgccggtgcgaatgatgggaacccacgaatcagtgccaagtttgttgctccttgctactatataaacaagtaatttctcgtttctctggctactaacttcacactttgatcttctatttattgccatattcgcttgtcaattaagtactgttattgtcttcatatttcagagttgagatagatacaaagctcccaatagttggagatcaaaaatggatcatatggatttgttcattcaatgtaccaatggcaccggggaagactcgttcaatcgtttgtagtgctcggaacttcttccagttcacaatgccaggccctgcttggtggcaggtgagaaaatatgatagaattcattcattttgtttgaaaagtttttttttttgaaaaagattttatgtgctgaggacacatttgtggggtttgttgtccttcagttagttccaagatggcatgagcactggacttcaaacaaagtgtatgatggagatatgattgtccttcaaggacaagaaaagatctttctttcaaaatcaatggagggttctacagatgttaacaaggaatacactaaactcacattcactcccactcaagccgatcgtttcgtcttggcttttcgaaattggctaaggcgacacggcaacagccagcccgagtggttcggtacaagcagccaacaacctttgccatcaaccgtcttatcaaaacgcgaggtgagttaagaaaaacacatcaatgtttgtttttgaacagaacagaactaaatggtttttatgttaattgtttttcggtttttacagatgctagacagatttgagcaacacacactcaagtgttcatcatgtaaaggagcttacacagcatttcaaacatggcaaaaggttctaattggcgccacagttggtttctgtgctgcagc

SEQ ID NO: 16438 - DNA, 8663 bp, Cannabis sativa
agtcttattcattctatcttcgattccagaatctttcgacctttgcattcgttaccctgacctcattaaattcacctttcacatttctatttccagcacttgtcggatcgattgagcaactcaacggatcaatgaagaaaatcgttggatcaaatcatcggatcacagaccaacacgttttaaattaattttttaattttatttacttacaataatactttctaaatagacttatcctgatgtattatggaaaacaggcttgtgtagtgaccactttaatcccaattgtatttttaatcttgaatttggattattatgggtttagtgatataaactaattatgatgatgttttactttaatttgaacatgagctaaactttttgtggttataataattttggggaaagatgcaatttaatttgtatagcatgtgggattttgtgtatcaaagttttttttaacgtttaagtttatttgtgcttaattaccatttatgaactattgatttaatattaattctgaaaaggttaatattattggacacttaagttagataatgcatacttaatatccttgagattttgaattgtgatagtacaggaatatataaaggaattgagtattggataggaatatatgtcatgaaattaaataaagaatgataacataaagactcagatcagatggtatagctctcaatgtgtgtgtcaagtcatcgtatgccttggaaaaagataattcaataaaaccttgtttgtcatgaagtcgtctgtattttcacctatatatatatatatatatatagacagagttggattcatacattttgaatctataaaacctttgtttgtcatgaacaattgttccaactttgaccacaccctcactgcttaattatagtccaatccaatatcacatgtacaactctatctctacatatatctggtctatggatatttatagggaatacaagaggctaactagtaaacactaatagaacagtctaatttatgctgatcagttagttatatatatctggtctgaactaactgatgagtctccaatctcaagggttcttaacacaccattgtcaatataccatccactaactatcactgttgaagttcttgaaggcctccattattagagccttgaataaaggaagaattgttattattttcatttttcaatctgtgataacacttttaagcaagatgaccaatcttgccatagaattgttcatggtagtggtattaagtgagcaaactagcttgtgcaagagatcaagagaagggagttttcttgttcaatcctaattttttcttattctaaagcatgtattttacttcttctagtgtaaaagcatcagaaaggtgttgtcctgcaacagaaaaagcatcacccactgtttcatctttaacatatattcttcatttcaatgtttgaataccaaaaaaaagctgtagaagaggagccttggattgagaatccagaacgtgaatatagcatagacttaaataaagaattcataagccaacttcatttcaatttaagaataagaacaaaaaacaaaaagtaattactagattaaaacgtatctgttactttaaatttcaatttgatttccttattagcaaagcatcacaatgaactcaaagttgtataagatgaatcatatatgaatattgtgtacggtcgactaacccaaacttgtatatgtcaaccgtactaaattatatattgaattggtttgttagggaatgaaattgttggctcatctattcataaattaagtcaaatttataataatcttcaagttgattaaacaatattgatcgaatttccctatccaaaaaaatatatacgagcaagaatgcaattgtacattattcaaatagatagattaagaagcaaatatgggtagatatctgtgtatgtatataaacttgatttaataggataatgatgttgaacttgtacagctttggcatataatacaacaatactacaacctatatatacaaaagaaagagaaacatgaaagaatatgaacaagaagaatactcttcttggttggtatgaagaacatgacatggccatacacgtatatgtatatatatacacacacataagattatgaagttgctcttcctgattaggttgtggaccattaattcttaatcaacaacccaaaccaagccaataatgcatctgaagatttggtcaagacccacttgaccttcttcttacttgtttgttagccatgtctgccagccactgccaataccgacaacacctgttatattgctttggtgcgagtcgggaaggccggcagaaactacctcttgcaatgactagtcaagcagagctctgaatgaaacgtgactaatcttgtacatcatggattcccaatatccatgatgtgcattcttggagaagttgaaatttctggcgaatggcaatgtttaagaatatttgcatttttctgttgaactcggttacatcttccttgcatctgtatgacccggcacacccacattgctctgctaaatgtgctgccttcacctgtctacacctttggcacacgagatcctgcacgtggtagaggcgttctctctgtcgtacgatctgaagcagggaattttccattacctcacggttgtagggctgcccgcattgtggcacagcacatcgccactcctgagccaggagggccgtgtctcgacacaaatccaggtctctacagtcattgcagtagctgttcaagaatgaaatagtaaatcagtttaggcttttgaaaatttagatcctaactagtaataactagtctcatttagacagctcaagaatacaaaaattgtttatgtttgtacctgcaaatgacatttggcaagatgaaggacgaaaagacatcacaaaattcagcttcgggagcgaactccctaactcgcacatattttagcagattctttctcattatctgtaaaattgaggagaacaagtagcagtcagttcaaagataaatcagataatataaacagtaactatacagaaccaaactgtgaaaaaagaaataaaaaaacagcacgacaatgttttcgtcacaagactatacgagcctagaagggggaactatcagggaaactggggagcatttcattcaatgttgttcgtaacatgattgaaaggtacggagcatttcatattgagactttaataaccataccacacacagaaaatgagttacttgagtagaaagaaagaaagaacggaataaaataccagaacattgtgctgaacactctgatcaagagccagtactgcacaaacatgcttaataaattccagtgctgcatcccctctgtgggcattactagagagttgtggcatccctgcagatacagatgcttctttttctgatttacttagttctttcatatgaagaacggtatctcgcacgattcccaaaagtttttcagtgaagtaagtgctgatctgtaacacatgaacaaagtttagaaaatacaatcacgaactaaatgcaacacacaaggaacaagagaaaaagagagaacaagaattgagccttaaaaataacctggcctttaagatattccgttagatgagactcgaaattctcagctgctgcaatagtaattgatggtgtgcttgagctgccatcttgtgcagatgctctaattgcagcttgtttttttgcataagtccaagggatataaaggtattgagaaacaatgaaaataaaataatcctgcaaaagattatttttgtcagattttgggccataataaattgaatcttcactaatcaccaaaccgtgtacatgcacactcagcagagattaaaatgttactcgttacagcaattgcaagtttatacaaaaatttgacaaattacctgaattttctttggtaaattttcagcaatattccagcttgacacaatatcaacttcagactcttcatgcatgttttcatcagcttttgcagggattccaccataattatgctatcacaacaaaagcaaacaaaactgttgattttaccagaagagtggtataccctaggacctcataatcataggaagaacacagtatcgaaaaaaaacgaaaaaatcaaatggttatactagaacattaataattgttgacaaggagaagtgcagacctgatccataaaaagcaaggaatgccagaactgcaatggttcaagttcaatccactcaaataggtctctgtgaagaaggaagaaaaaaaattacaaccaagattgacggaaatttataatctacattaataatttatgagtaagacaaacctagtttgcagggtcttaagtaagctatcacagtaagctttggcagcagagatatcaggtttgccggtgtctatgataatcttggaaaaatttgcaaatacgatactagcacccaatttccgaaactcggccaataatagagcaaatacctttttcatgacctataaattcaataaatgaaaccaaataaacaaaatttattagtcccatcctatcataaatcaaagatgatgtatgttcccgaacaaagaagagcagatgacccccatcaggtcctactttatacagatttaaaattctagggggctcttaattaacaacagtgttgaagctgcaatttcttcctaaaacatgtattcaacaagactcggcaagattaaactcattctacttccttaaatcctggatctcattcagtgtcatatggacacttatggagagacctatatgaggagaagcaaaaaaacaagcatttatttaccttatgaagtagacggtgaagagccggatcatgaagtttggaatgaggactgcaatattaaaggaatgagtaagaatccagaaacatatagggttataaccataggaggcaaaaaagaaaaataactatttgtagctacctgcatagccaccggtatagatgctgtaatattgcatctgcaaacacgtttcccgatgtaactgcatccgtaaggcacctttgaatcaactgttttaaaacacgaaatgcaggagcacatgaggtaccctcatcaaagccactgtgatcatttgaattatgtgctccggaattcatatctgattcgaaccccaataaagaacctccttccatttcatttatttggttgcttttgagaagagcatctacagctagatgatgaatcttcgcaaagaaattgacaaaataatcagcaaaatcatccaagatctaaccaagaaatgggaaagaaatggttagtgtattttcacctttaactccacggttacttttctatatgctccagggtatgtaagaacaggttgatggacctgattagatttacagaaggaaggtgcaatttagcacatacaatgtgaagttcaacagaagatcaattacgcctagtgaaaggaaaaacacaaacgcacaaacccacgcacacaagaatataaaaatccaatataaagatagatctatgtccttaggtgtcagagaggaaggagtgagcttgaacagtaaaaaaaagagacaaaggtcacatgtcgtccacccagtgaccacaaagatacttttttgactaatgatcacaaagcactttaaaatgacaatcgcattcctaaatatttctaaccaagttaggaaataacctcatcagcaaaacaagtatcttcttcactaacgcctcctagatccggaatcccatcatcagatatccaaagtacctgtgacaaataaagaaatgaaaatatgttaaaaaaaagagttcaaaaaacctgccaaatcatttcttttccctattttattctctgcaggtaacataaaattttctcaaaactgttacacattctcagtaaccttcacatccctctagcataagcaagtgatccaaattcctaaaatctttataaataacatgacaagatatcagctgatgataagaaaaacctgttgctgatcacggagtgctcttgaaaagatgacatctgcagtatgtatgagccaatcaagttcaaaattccctagcggcacctgtcccaaatatttgaccaattagtatctaaaatatcatgcaaacttaacaacattctcactgtagagataaagacattacatgggcatatctagagagagaaattctttcattcaaccattgagatgacgcagcacaccgttgcattccaatttttgcagcaacttgttgccacccaagaacctgcccaaagcatagtttaaaagtaatgcatttgactatgtgcatgtggcatgatcaacggatgcaaatcagctacatattcaaaatttattacctgatagttactatcacgagcattggagggaatgctcacacatgggaaatcatctaaagctcgtacacttgacttcattgattgagcatttgggcattcaataacagcaattattggtccatgatgttcatgtctgttgatcaaccacagaaaaatgtatgttatgttattgctagagagaatgaaaatgagatgtgaacttttgtttgcaccaataaagtaccgaaaaaaggtctaattgggaagcctaaaatctgctagtctatgtaggtttaatttattctttattttttttttccaaacagttcatacattgtaacaaaatgttattcaataaagcactagggcatatatgtacactaaaataaatcagtgaacaagttactttgggctcatccaagttacataagacaatattcaacgtgtaatatacatgattatagaaacatttctctaattagtagaatcaacacgagtaaggaaatatacagaaaaacaaaattcacaaaaagcaggataaacaaaaataatattacgatagaattagacctgtgctgatttattgttctttgcagaatcttatcagcatcctttacagatccaacatactccacctgcaataaacacacgttattataaggaaaagcaagcaaacaaacaaacaaatcgcgccaataggaaagtatttgttttcactaatctaccagctaaccttgaatatgaattcattactaggaggaggtggttgaacagataacgcctggcaagcatcacggaattgcttctcaagaaaggatggtgacagatccttgttttgataaggattcacgacgacaatggacattgtttttgaagaaggaaaataaacaacaaatatagcacgcccttcagaaatactgaaattaaccagattaggaaatggttaattgacacatttaaaaaaagcaaattaaagaccatacatgaattagttagttcatgatagaacccatatttcagtgttggtagaaatcatagcaaaaaaattgaaataacccaatttgtaatggcaaattagttacctatgatacaagtagaagaaagatatagattgctccaaataagaacattctgttgtagtcttcgtatgtagttcgctaatattccaggagtcttggatatttcgcttcttagcagctttatccaccttacagacacatccaatctgaacaatcgcattcaagtccaatggtacctttgtttcatatattccctgacaaaaagaaaaatatgataattaaataattaataatcaggcacttgttactaatatgaattgttctgaaagactgaaagatagaactttacgccagaagagaacatataaatttacattgtaatgaagaacaatgttatttatttcctcattctttaatacttagtaaagttctattgacaaaaattgtaaccaaaaacatgagccaagtcctacaaagaaaacaaagataactgaacaattccaatttgaaataaataaataaataaataaggcatatccttgcaaataagaaaatacataattcatatttggggcaaaacaaagcacttctgtgaaatttttgtcaataagatttattaatttatctaataatttcttttcttggctataggatgctcacctcaacttctggatctgcaagaagtgcagtaaggttttttctttctgctttgaactgagcttcatcaattacaacctgcacaaactcatgcccaaagataacgtcttgaaatctttatataaagaagcacagatacataataaatagcattagcaccagaaatacctcatataggttataattatgctttccatgtggaagaattttgttggcacgccttcctggaaatttgtcttctaaaggggccttggaattgatgtaaaacactctaggaacagttataggaatcttaagcatcactccttctaccacaacccaagcaaaatactggccaagctgagaagctggaactacttgtactatctgaatcacaagagcgaaataaaagtgatttaagccattaaactagaataactccatccaactgtttggggttaatgaaggttttattacctgccagtgacatcgctttatagctacttcatgtctcttaaagtatgaactaactcctgttccctcctgagcttctttatttgacggttgactgagcagctcagaaagaccactagcattgtgccgtgttgcattgcctagtctgttaaagtaatatatcacttcacattattaaattgttcctgagaacctaactactgttctagaatt

SEQ ID NO: 16439 - DNA, 10007 bp, Cannabis sativa
aaacaaactacggtttctaaaagttctgccgaggctgaatatagagcccttgctagcaccagcagtgagatcacttggattcaatacctcttgaacgatttccacatcactcaaacaacccctgctttcatctattgtgataaccagtctgccatccatatagcaaacaatcctacctttcacgaacgcactaaacacatcgaccttgactgtcatttcatccgagaaaagatcaaggcttctactattcgcctaatacctgtaaacacaacacttcaattggcagatgcttttacaaagcctctaccttctactacacttacaactcatattcgcaagatggctgtgcatgatatctacagtccatcttgagggggggatatcagattatcccttatttctctcctacttttatttgtactgtagtccttaatgttgtgttagttaattcagttatattcggttggttatgtctgttaacacccgaatatttagctagttagtttagatagttttggtctttctcctctgtatatatactgctgtaactctctcttattcaattaatgaattctgtttcttcaattcatctttgcatcaattacatttctctctgttatttctatcgtaataatcttcatacccttttcgatttttaatctatttgtgataattggggatagacagggtatttgggtttgagtgcaccacaaagcaggtatacgatgaaaaatctaaagaaaataagataatcttaataccctttttgtttggttggcgagaaaattggagacaaaaactcaaacttcatttacaatttgtctgaattttccattttttttaataggttatgacttggaaagtagatggctttgacttggagaagtaatattcaggaaaaattgcaacatatctatctaaatcattcactattttattggattcaggtctgtagtgcttgcaatctgcgaggttcctgtgatagagcttatacaatcttaaaggaatttgaagctgatgcccggacagtggatatagtgcgcatattgcttttttatgctctcgatccaattgttatctcagggggtgaaaaacctgtaggtagagagcttgttgaatcgtctgcaagaaaattacttttggagttgcttgagctcagtgaaacgcctgttgatccatcacttccacagcctgctgccaaagttccaaagaagaaagaacaagtgtcgagtttgacagatgatgacttgtcgaataatgttgaaatgaagagaggagattggatttgttccaagtaagtttattaagttacattcttttcattttgtgtttctttaataaattttaccttgctctgtattaaaataaatagcattgaatgatttattactgaactcttagtatcttaaatttatcgataatactatggcaacgggccgggggatgggctttgaaatgacagctgtagcaattcggtaaagcttaagtccataggctaataccttcattttctgtttcgtagttgcaatttcatgaacttctccaaaaatttacgatgcctaaaatgccaaaatgatggccctaaaagtgttggcaaaagcgagtttgaaatgaagaaaggagattggagctgtcctgagtaagtgcccgctgcccataatttagtgaaattagatactcttggattatatttcagaatattagacttaagtatagttacatttaagaatacaccctcattaaattttttaagtaagttatatttttgatactcctgagttaaattccctgtcttctacattagtgtgcgtttgtgtgtgtatattttcatccaagcttggaacggattccatgtatatgtgctcttatgatcctctttttcacttttgttattcactaaactaatggttgatgcccttttgaatgtgctgcagatgtaatttcaccaatttcgccagaaatatccgctgcctgaagtgcaaagctgagggaccaaagaagtctggaggaactgatattgaaatgaagaaaggagattggaattgcccaaagtgagtttccttttctattatgtacggctaatcaatttcaggtggttttataactatcattgctcaaattctcaagttaaaaataggcttgatattaattaatcctcataaggtatgagtggaaaagtatacatttcgcaatgggattgtttcagatagctttccattccattggagtaaagttggtcttaaggaagactgactgttaccgaataattattgcttgtcatttactgttgcttcattcccataaaccactaaattctttttgccaatgctctaattttaaggggtaatctttaaaattgtgacatggagatggagataagaagttcaagctgccttttctcctcctcacctctccccctcaacatacttattatggattgtttcactctcttttaacaaaatatgataatagaacagttcagttttgctacttgttttctcattaatcataaagcaactgaaaaattgcttctgtagtttaatcataaagaagttttaacccacggtctctccattacgtccatgatttgccaatagcagagtttcatggtagacggggcaaaaaaaacaccataacatgtgaagtttagttctcgagggttatctgctttgatgtgattctattacctcaatttacctttatttgaaatatgatttttccttataacttggattttgttgacaggtgtgagttcatgaatttcgcaagcaatgcaaaatgtctacgttgtctcgagtcacgtcccaagagactcttaaatcccggagagtgggaatgtccctcgtgagtaccacctctctttctctttttcttatctctttattttcgagatatatatagctttactgaaatgatacattatattcttaattcggtattgtagatgtgatttcctgaattatagaagaaacacagcgtgcctgaagtgcaggtgcgaccgccctaaagaagcagcagcaaatagcgactaccaggagaatgtttggaggcgccctcgctagctgtgtacttctattaatgcccgaacacacagttggatgatgttaatgagaagcagtgttacaagctatcattacttacaatgatcattattaggttttattcacgattcatcgaactgactcgagccccccaacacaagatagtgtgctggcttggtgcttgcgagctttattccgtcggtggttttataaggatacaatacaaaaccgagagaacatcaacgacacagaatggctttcatcatacttaagaaggtgaatttagaacttgatattgcataaaagtttcggtaactatatgttcatggttagtgtgagcacaattttgggctattatattgtatttttgtttccaatttttgcacttaatctgttaatacagttaattcaatatcagttatggagagttttgacaagaggattagctcaaatagtcatgtggtttgttttcgtagtggcttgaggttcgagtctctcctgtcggtatttatgtaaaaacaagagaattagctcaaatagtcagacatgtagtttgttttcgtagtggcttggggttcgagtctcggtatttaagtagtaattattatagttttctagtttcgaaatattgtagggctagaactcattgaaattccctactaaatcgggcaatttggaacttttgcccgaaatgctaatttttggatttgaagttcgaacctacatcgactcatgcataccaagaacacttttctataattatcattaaattaaattttgtataatgtgagattcgatattgaattaaattaaaagaaaagaatttattttttattcaaaagctcctaaaaaataacacaagaagataaaatctaaataaaaatagacttgtaagttcatatgtcatatttatgtacatatattgtaaaaattcaacatattacaatttatatacacacaataatccataaagatccttgttattatcatagttgacacaaatgacatgtcactcaataatgaccattaatccaatgaccaatgaaaaattcaacaaaatattaatattggttttttgtttactaagaaaataataggctgtttttttttttttggtataaataacaaatccaaatctaaatcaaaagaagagaagagagagaaagagagacattgtaacgactttctctcccttcttcctattatttctcgccatgttttctcttctttcttttctggaatgaatcttctattacattttcatttcaatgaaagtgtatattttttcgataattttgcgttaatccatatttcaaaacagaatcatgatgatgaaaatttgatgtgtgaaagttgaacgtaaattgttctctttaatatatatacaaaggaaaaagaaagagaagagttaaagacaatgatgaagggagaagcattggtagagaagggtgcaaattcagatgaggaagagagcattgtagtttcagtaagggttagaccattgaacgaaaaggaattatccagaaatgaagaatgtgattgggaatgtattagtaataatactgttgcaatcaagaacaatctttctgaacgtattacctttccgactgcttatacttttggtatcttttctttgtctctctctttaaaatgaattattttgtatagatgaattttaaaatcttatgaaaatctataatacatttcttaaaatgatcgatttggtaacatatttttttgttttctatgtccaatttttctttttcataaatattgtaaatttctgtaaatgtttaagaaattcttaatgatttatagtattttcggttcaaatgcttaacacatatataagaagaaaaaaaacaagttacacatatgttacaaacatgtaacaaaatatttcaacattaaattttaacattgttaactatttaaaattttctgaaacgtgaaggatcctttgtatactataaaattatacccaaaatcttaatacccttttcgatttttaatgtatttgtgataattggagatagacagggtatttggattcgactgcaccacaaaagaggtatacgatgaaggagctaaagaagtcattctttcagttctcaagggtattaattgtgagtaatctacttcttttcttaaaattatttatacacaacacacaaatatgtatatataatatatatactcaatgggtcagccctaggcataggcgggctaagcccatgcctagcgcccatactttctgggggcccaaaataaaaaataaaaagttttattaggtttttatttaactaaaattaagtgtattgtaaacaataaatatttaaatcttagttggttgaaatgtataacacattatacaatagtgtgagttcgagtctcataaccaaaatttaaatggtcttagcccatatattctcagaccgaccctgatacacatattatacatattatgtatgcatttgtcttaattttgaacataatagtaattatattgttgatatgcagcaaccctttttgcctatggccaaacaagtagtggaaagacatatactatgaatggagttaccaaatatgcaatagcagatgtatatgattacattgaaatggtaaatgatcaagaaaataaacttcacaataattttagtgttttgtaaatttgactaatttagatgtttttttgttggtatgtagcataaagaaagggaatttgtattgaagttctctgcaatggagatttataatgaaattgtaagagatcttcttagtgcagatggtactccactccgacttttagacgatcccgaggtgaatatatttgtttggtaccttgtattttcaataatgctcgtataatatttttaattttaaaaatgtacatatttagtacatatttattgatcaaatttaaatttaggatatcaaatgggtgtttttttaacacatttaataacactgtttttttattgcagaaaggtactgtagttgaaaaacttactgaggagattttaagggatcaaagtcatttaaaggagcttctttctatatgtgaaggtaatgtataaaagtcctaatattaacatgttgaattttattatggattaaaaataaaaatatcgagtcatttataagaacacgtgttatttcactcatactcaaatcatacttgagttccgaacaaaaataaacgagcatattagtctccactatctttacaggaaacagatgttaaaatattgagtcatttataagaacatagattactcgattcataacaaatatttagttttgcgttcttgcagctcaaaggaagatcggagagacatcacaaaacgaaactagctcgagatctcatcaaattctgagattgacagttgaaagttcagctagtgaatttcaacaagcaagacattccaatgccctaacagctagtgcaaatttcgttgatttagcgggaagcgagcgtgtttctcaaacattatcggttggaacaaggttaaaagaaggcagccatataaaccgcagtttactaacattgggtactgttattcgaaagctaagtaaaggaagaaacggccatgtaccttaccgagattctaagctaacgcgcatattacaaaactcgttgggaggcaatgcaagaacagccatcatttgcacactaagcccagcgcgtagccacgttgagcaatcgagaaacaccctctttttcgcgagttgtgctaaagaagttacaactaatgccaagatcaatgtagttgtatcagataaggcattggtgaagcaattgcaaagagaattggctaaaatggagagtgaattaaagaccttacaatcaactcctgattcacatgattcaactgttttactaaaacaaaatgagcttttgattgagaagatggataaagagattaaagaattgagaaaacagcgcgattttgctgagtctcgaattgagagtatgctgcaatcaaaagggtcaaattcagagtctcaaacccgaaatgaagaagttctttccaagcaaaacaaactacatcctctcctcactatacccgaagataagagcgcagaaaactcggttgtgaatgaagagaatgagttgaatgaagaggagaaagtgagctacattgtcactgataattgtagttatgatgcattgcaacaaaaagttcaagaattgcaaaaaacaattaactctcttgtcaattattacccttctgaggattctccttgttcatctgaagcttgtatgtctagctcaagaagtgttatgttgactagaagtagaagttgcaaagctgttctcacaacaacaaatccatcttttgttggattgaatgaggaagaagaacataatgagaaagaatcgccatcaccagcacaaaacttttggtggaattcccatagatcagttcgcagtgcaaatttcgcgaagttgtcaagaaaagattccaacaattctaatttgagcttttcacttgataatgtggatgacattgttgagagaaaatcacaacatggtagaggaaaaggaattaagcgatcgagcaatagtagtcgccatactagaaggttaattagaaacgattctaatgcttctattttgagcgcttcttttgaaccagacgagtttgatgaagaagagagtgatgagaatgaatctcgcgaaagagaaaatgagattaagcaacacaatgcttctagattgaaccttgctcatcatcacaacaataagaagctaattagaaatgattctaatgcttcttcttgtttgagttcgtccttggagacgaatcaaacaaaggaaattcatctaagaagagaaaagggtttgcgagaaaagcttcttagatcaaaatttggtactaaaacatcaaaaatttcgaaaagacactctcgagcttcagtgctaagtgctcccgcgacaaggaatcattctaaggagtcagattcagaagaaagtgtcctcaactttatgcaagaagaactcgagaatcaacaagaacaagaagaagaagaaaccataaagcacatcaacgcggaacctttgattacttggccattggaatttgaaaagagaagacaagaaatcattgagttatgggacttatgttatgtcccattaacgcatagatcttacttcttcctcatttacaaaggcgagcgatcagattctgtttatctcgaggtggagttaagaaggctacattttctcaaggatacatttactattaagagtagtaatgtgaagaaagacactcaaattctaactcgagcttcgagtttgaagatgcttaatcgcgaaagggaaatgttaagcaagcaagttcataagaagtttccaagaaaagatagagaaagtctttaccaaaaatggggtattaagctaaaatcaaaacaaaggagtttacaattagcaaagtgtttatggactaatacaaatgataatgagcatttgaaacaaagtgctcttcttgttgctaagttggttgggatagcagagccaaaccaagtccctaaagagatatttggactaagtttcttatctcaacctatcaattttagtccttactaaaatttaactaattggggttgtaatgatttttcttcttcttcttatgatcaattgtaatttaacaaattctaatagtgagacaaaccatgagattgtgattgtaaatcaaagtcactataatgtgtatttatgtgtgtagatgattcaaagagaacataacatgtgtttttcatactacttcttcaactacaattattactagtaatccttaggttcatttctatagtactattttttttttgtgtcgtgttcgtgatgacccaaatcttaatttgtctaactcgataagctcgtagtgtgacattttatggtgaattaaaatgtcgagaaaattaagctttttatgttgtcataaggttttcttttaatgtttaatttagttttttacagtttgaattttctctaaactctcggttgttcattaatttttattacattatttgaatatgtcgactaatttatcttaaagatatataagaaataattgaacttcatcataattgtttcatgatcaatagtaccctttttactaaaaatccatttttttttcctttttggcacttataatccttgttaggatagtttcttcttcttatttttattataaaacattgcatagtttcttacttagaaatgataatttcattaaaaaataaaggttatgattttgttttttcgagttttgatatggaccaaattgtagccctaaacttcttatgttttttaaatttttcctaaactttgacatgtagcaaatcatacatctgaactttaaacttttaaagtctttaattttttttttcaaactttgacatgtacgaaaatatcacccctatacctacctattagtaaaattaaatagaattggacaaaaatccttaaattaaaaaatttcaatagttttgaagaaattttcaacaaactaataagttcgaaaagacataatacatgtcaaatttcggtggaaaagaatctcaattagcgaaaaataaataataatgaacatactacatagaaagaagaaggaatcctcaaaaaataaccaatacaagattcacatacacaaaaaagccatagaataatgatcattgttagcatagttgacaatcaataaagacaattaatccaatgaccaataaatccaacaaaatattggctttttgttttcttgggcagttttcttgtagaaataaaagaactaaattaaaaaaaaaaaaaaaaacaataaataattattttattgtaatgctcgtccttttattccatgcacattatattgtcctactatatatatatgctgcccaataattattgttttttttaatgattaatcaaatataaatacaataaataatcaaatccattatcttaaatat

SEQ ID NO: 16440 - DNA, 2813 bp, Cannabis sativa
agtttactaacccaatctttgagggaatgttgactcatcatcaagttgaacttcaatccaatccattaacagctcaacatattttggagcagagacctttattggctcttttatggtcaccccatcagcccacttatatgagtatctatataccaagaatgaaaagtacaaaaataaggatcaaatccagttgtattaatatatatgtaaatagctctgagtacttacactggtccagcattcatgactggacaattggtttcagtgcagaactcagtgagagtaccatacaggatgttcacttggttaaaaaagtccacagctacagtaataaacacaaacaaaacaaagttgttaaaacaaaacaaaatacatatatgaataatacttgttttaaattctatcttaaatcttactgttcacagctagccattcattactatcttcaccaggaggaagtctaatgacttcccttaaattcccatttcccaaagttgaatcaatgtgtttctgaagttgagctccctgttaaatttcattaatggttattacatataacacataaaaacaaaaataaataacagttgtaaaggtgaccttagtccttggggtagcattcttcttaggacgaaacgttttctggtttctgtgaggaccaaaacaattgttcaatcaagaataatactaaagggtttaactcagaatcactaatccatgaagattgaaactaaaaaacaaatatagctaaggtttgattgagaataaatccaaagaagacaacaaaaagtacctgcttccaagaccaaatagactcattgtgtctctatctgaatgagaatctggtgaagctagaatacagggcacaaatttggagaaagaaagaaaatttataccgacatacttacaattttattaatattatttatatagaatagagtagagagagggagaaggataaagagagagtctttttctgttgttgttcttgacttggctattgccagtctgtcacctatctatctctttcagagccagccaagaaccttactccttttctttctatattgactgtatgctgacctgtttttttcctcattttccatttctaattaatatgaaatatttaccgttatcttttcgcagagcgagagttacaaaaataagtcacgagatactcgttttattcatatgaaacctattgtgagagagtaaatttgtagttatcttttatgaatatatatgatgtatcattgaccgacggactcaaatttgattttacgacatgatttaaagaagttataaaatgagtcacgagttattcgttttttttcaaatgaaacatactgtgagagtaaatttgtagctatcttttatgaatatatatgatgtatcagtgattgacggactcaaatttgattttacgatatgatttaaatatattggagaacactgtcccacttggattaaatgtaaaagtattgagctatatataagaacatgagctactccactcattaccaattggttttgaaatggaaccccatgattctgatggtatcagagctatatccctagtattcaagattgcgagcaaaaataaccaccatcttgaagggggatattggagaacattgtcccacatgcattacatgtaaaagtattgaaccatatataagagcatgagctacttcactcattaccaattaattttgagatgagaccccacaaatctcatcaaaataaattataaaaaatgagtcacgagttaattgttttatatataaaacgtattataagaaaataaattatatgttactttttatgaataatatatataatgtaatagcgattgattgatacaatttaattttatgatatgatttaagtaagtaaatgaatcgtgagttactcgttatatatacacaaggtattatcttcttaaatatatataatgtattagtaattgaataatttaatttgattttacaatatgatttaagtaagttataaaaataagtcacgagttactcgttaaaatatattataagaatgtaaatttattcactatcttttataattatatatgacgtattagtaatatcctaacttaatttaactttacaatatgacttgagtaaattataaaaaaaaatgtattactcattttacataattataatatatatttatatcataattttaaaataataaatgagtcaaaaaagacttacatgtcaaatattattcttataataattaaataaatgagtcacttatgcttcaataatttaagattaatgagcataaatagctattatcttaaaaccataaaaagatattaagtatccataacatatttataacaagagttattttattcatcactaattagttatgaaatataatttatattacttagtatatctttcatgactattttttttcttacatttacaatattatttacattttaaattattatatatgtaaaataattatagtaccgaataaaattacaatgactagttagaattgaacattcttggttactaaaactaattgtatcaactacaataatatgtcacacatgttagataatattacttaggattatgtataatagctacaaacataatatagtttatgtatctaatacctattatatgattttgtatacttaattaatgatagaatttctttctcgtgctaattatgttgaaatgtctctaaatgaaagaaaaatgggaaaaaaaaactttgatccaattgctaagaagagactagcataccaaaagaaactgatttctttcttt

SEQ ID NO: 16441 - DNA, 5153 bp, Cannabis sativa
ataataaatatacatcatatacatacgacacgtataattttataaaatctctataattgagtaataatatcatatctacctattttctaatattctttattatcaaaatataattaaaaaaatacaaactcagaaaaaacaaagatttaagtccatagctaaataaatatatatataactcaaattgatcacatacataaattaaggaagagaaaaatatagctctgataccaattatgagatcaatatcaatctaaaagtatatgtgagaatcctatatgtacgcgaaattaaaataatgattgaacatatataaaaagaattgagattgtgtttttctatcatttaatgaatgtaagtgtccagcaatgtgtaaatttttagattaaaaaataagagagaaataattagtgggttataaatttgtcaagttctcgctagctctttattatggtgattgatagaatctaaatgagtaatgagtttaggatcaaaaatctctacttgtatatgtgagacattctatcaaaaattttgatacaattaattatttaaatattttttaaattaatgaagaaatataatttagagaatttagttaatcaaattattaactaaataaggtagaccatatttagaatatttatattgatgatatttatacaccaaaatcatcaatgattcataggtggtgcaatgtacatactaatggaccatgctgatgctgttgttgaaggcattcccatgccttactactcactattctatacttaatctgtgtaatgttggtatgctatcagattctcatggtctgttggtaagcccttcttagcttaccttaccttattattattattattttattttgcttttgtctttgtggatttaatacttgcttgcacgcttacgagcaattctcccttttccatcatcaaaaccagttttgttcttcttgcttaccaactctagagtctaataggaaaaaatcccaataaggtcaaaataaaaattgcaacttagttcaatgggtagataaagaaacttaaatcataatgacaaattcaatgaaatgaaaataaaaaccactgtcggtttcctctgccaacgtaaatggattcttctcaaaatgacaaaaataggacttaataattgactcgatccaaacaccacggataaagtcccactattgaaaaatgaaatgaggaaaagaaaaatgctctacttttgccctccttgtagtcgtcaccctcaatctttctaacatattttgactcttttattacatcaaattcagaaacgcaaaacgtgtctggtgtgtagtaaatattaatcaaccagtaaaatagaatattcgtcaccaaattcaaacggaagccctcttcagtcctcccactattttaagaaaattcccaaaaagtaaaacaaaaaaagttgggtattttcattttcatctatttctaaattcacacgtagctttcttccattcattctattagagcccatattctctgctaaatcatctccctcattctcgcagatttagaactatctcagctatctctatctctgaaattttcaaaccaagattagcaatctacaagtggagtgtccactttggtgaatttcactttcccaatgaatttttgttgagaaatttctaaggtctttcctccctcctaactttgcttaggattgaggttaaaaataaaattaacaaaggccttagtggttgattgaactgatgggtaccagaaactttcttgtgctgaaaacccacgttgattttttacacaagagtattttaaaccgggttgtgtatgaaagcatggttaagattacttgttctatatgggctttcgtttggggatatatattatacgctcttggatttacttgtagtgttatatttaggtaacgatccattctctgatttgggcatcttgattttattatttattatttgttttgtttataagtatatatagttagaattaactgctgttatttcattttcagattaataattgatcatcagcgaagtaagagtactgatattgatgaattcagagaaagaaatggtcactttcgttgtgttaataatgacgaaaacgaaaaacaaagtgccgattcttcgaatggtatggtggatgatacagcctcagctgcaagcacaaacaagtacgagtttttttccgggaaagatttgaatggttttttagaagagctaaaacccatgagcttcactgtcgaagaattattatatatggactcgaacgaatttcctattcctgaaaatcaaatccttgaaacccaagtctcctctggcccagaattaccggaaaacttttccggagcagaagatggttatttggaagaattaaacgacgtcataggtacgttttgtgaggaggaggttttggagaaacgacaagatgatgaggcttctgatttggaagagagcgcagtttcggaaatttcgagtatggacgaagacctcttccatgacccagaacaggggaatttaccagaaacagagctttctaccgaaagtgccgatacgtccagtttttatgaaaatagcttttcattttcaaatgacgtggaatcattctctgaaaagttcacttcaacttctgatgaggatacagtacctaatatttcatgtgatgatgggtctttgagaaaaaatcaagatgttgatttcatcacctataaattttctcgagaaagtgacagagaagaagttaatgaaatattgagccctgaaactgaaaccccttatccttttcctcctcctccggtcattgaagaggaggagagaatttctgaattttttgtacaaaatggagaagaattggctgtttcaggtgaacaccataatgattctgaggacaaatacatagaattagaactccaccaacagcagagtacaacaacctacattgagacaaatcatttacctacctctgagaaaatgaagcttcaagaggaagatgagtcggagtttgtttgggaacatgaagacgtaatagaacagcttaaatgggagattaaaaatgccagaaccggaggactacccacaattttagaagaagagtcagattcagaatctccgaagcatgaagaaagtatccatttgaagcctctgaagatcgattcccagtttggttacaaagatcgaatggaagaaatccaaactgtctataaaatttattctgagaagatgagaaaattggacatattgaatatccaaaccatgcatgcactcggtaagtttgtttgttacagcaattgatttaatcattattttaatttttagattaatcttcagttgcacgaacaccttcttttgaagattactttggccccacccccaaaaaaaaaaaaaaaaattgttgtatagaattatagtttgtataaaactaataaacaaaacgggtcatcaacatatttatttattaattcattttgggtgtggacatcaggttttttgcagctgaaagaccaaggagtgagattaaaacccaagaattgggttaatccaatagtaaagagctttttacctggtaaagcacaaagatcaacagccgtagccgctgaaccaatactaaaacacggtggagcattagataaagacttcgaattggtgtatgtggcacaggtttgtctatcatgggaaatcctccattggcagcaaaggaaagtccaagagttgctgcaatacgacgacgttcaggggtgtcgtccgtttaatcttgtggcctctgagtttcagctctttcaagtgcttcttcagaggttcgtggaggacgagttgtttcgaggacccagagtagaaaactacgtcaagaatcgttgtgtaattagaaaccttcttcatgttcccgccataagaggtgagatcattcaaaacgattttggtttgtgcttttgtagagtcattttttaagttttgcaggaggacaagtgtttgataaaagtttcaagtttcgtttcagatgattgtatgaaggataagcagtacggaatggtaggggatggggattcagtcttcttggaaaacatggcaaatataatcttagaagcgatgttaatattctgggattttcttaggaaagataataagaccatcattaaccaaaaagtaagtcacaaaatggagattggaccagctgactctaaactcttgatagacatccgaaaagacttgtataaggttagatagatttaatgaaaactttcatattttactcaaaagagtttggtttattgtgttataatctaatgcctaattttctattttgttgtgaatgcagaaggatagaaaggtgaaagatgtacagaggagcgggaattgtgtggttaagaagttccaaaagaagcaagagcaaaagggtggccttgaacaagcattgtttcatgcacaagttgagttgagattgatagctagagtgctaaacatgtcgaggttgactagagatcacttaatttggtgtcaacgcaaactaaatcaaattagtttctttcatagaaaggttcacatggaaacttcgtttttgctttttccatgttaactcattagtaataatcttatatttgttaccatagtttctataaccttaaacaaatctttgttttgtctgattttagtgtacactaggtttgtttatagagatgtggtgtaatcatttatacactttgaattgatcaaagatatttacaggcacgtgtataaatatatcaagaatcaaacaaagattctcaaacatttttgtttgttttttattttaccattactgtttaatgtgtatttttccaaaccaactactttgtatattatgtacggaaatgtgtttattggcccaaatcctctgtacaaattagtttcgttttctagtttttgtctcttttatggttcaaaaactacaacttttgctttttaatgttgccactgtaggcagcccttatgtcacaagatcaaagctttgaatttcttgattttcttgaattgtacctcatttaatagcttaatatttgttttaattttgttttaaatagttgctgcaaaaaataaaaggaacgagtttttcaaggtgagtcgtggacttttttaaaaaaattagagttaataattttattttctttaaataagt

SEQ ID NO: 16442 - DNA, 11358 bp, Cannabis sativa
tatatacacgaaatgaaagatatataaaaaaaaaaaaaaactgaatgaaaatggtggtagttagatgaagaagttgaagatggatatggctgaatgggttttgatcgtatgttaatcgtgggggaagaatgtgattttttgaatgaataactaaaaaaaaataaaaagaaaaactaaacactaatcactaactcagaaattgaaaataaaaataaaaatgataagaaaaagaagaaaatgaaaaagatgtgtaagtgaggtgacatacatatagcgtgtgtaagtgatagtgtgtgtaagatatagtgtaagaagtattttgataattaaaagtatattaaaggtaaaaatgttgtccacaccttatagagatatttttgtaaataaaatatcattttgtatttttcatataaattatcctaaaaaatatatgggtaagtttatagtacaccatctaaaaagttgttttggtagatttcttatgcattcaagagagttttttatacttttttttttataatcacgtatgttgtaacaatacatgatcacttgtaaattttcagaaaattttaaatagtttaaatatatattgcacgcacgatatttttttttataagtaagaaactatatttaaattttatttttaatatgataaattatttatagtttttgtaaatttacatactatcctaataagtagcataattaaactaaaaaacttttttatatactgaaacatataaaaatttatcaaaacattcaaacacccgagtataatttgagaaataaatttcctatatatatatatataaattttataacttctctagtggtagaggtgtcctaaatcctatatggtatcaaaaaaattaattattgagaacaaggataattttttttttttttttttttttagtaaagtaaggataaatctatttgaagcaagaaaacaaaattacaaatcttgggaaaggcatatctaatctaaattgttgccaaaaaacaaatcttggaaagggtactgtaatctgtatgggagtattataataaaacttactgcaaaatcttgtataatatctttttgtgtagatgactattgaatttttttagctgaaactagataactattgattgggattttgtatagatacatatgtaaatataatattaattaattaataaataaaattgataacaaagatagaaagtaatgtttttttttttgggaatggaggtagaaaataatgttgttaaaccaaaataggcaataaaagaacaattatgaaataacaaatatgcattcaaatatgcattcaaaaaaaaaaaaattaataaaaaaatatagtatgtttacatacactctaaatttctaatgatggtcattttctgttgaaccccccaaatagtgggaagaaatagttcaattgtaaaaaaaaaggtcaaaagataattttcatttctttattaaaaaaattctatttttctttttatccactaaaaaattcattttcttttcaaatatctctaaattttccaatatgtcatattcattcagacattcaccctataatctagacaaggagaaatttaccaacctctcaaacaaattttcttccttattttcttttaaattatttattactttattttatttttcataaaatgaataaaaaatgtagataaaatgggtccaattaagttacgtaccaagtttcggttatttttccctccatgtcactatcttataataatattaatcatagaagaaaaaaaaaacattcaaaattgataacacataacacttttatttttttatattaataataataataataaacactttttaaaaaagaaaaaaaataatatttgcatggaaggatccacgtgccgtctgtatctcatccgaaaattccttaaaatattaaacaaaatcctttgatgccatgtttctctctcaatcgaaacccaaacacaaagaaaagaccaaagcttttcgctatgattttctcgagaaaatattaaaaatctaacccagaaaaggaaaagagaaaaagggaaatggcaatggcatatctttattattacccatccagaataaacggagagattcggtcacaccttctcaatctagaaactcaaactggagaagaagaagaagtttcatcataattatacttcttcctctctttgcaagacaccgactcagcttctcatatctggtacttacacacatacatatatatatgtatatatatatctgcgcgtgtatttgtcttatatttgttttgctctgttttttttttctttggtttgaactctttgaatatgtactttgttttggaaaataacctgatagattgatttctgttttttgaaaagtattgtttggttaatttaaaactatgaaaaacgagggaaaattattgaatatccaaaaagcaaaaaccctagtggctaataactatgtgtgttgttttaagattggttgtatggaaccttataagttggaattgattgattgcagatatggcgtttgatcaaaattcgattcctaaagatttaagaccgttaaatatagttagaaatttgtctgatgagccccgcattacgtctgttacttcagcgggtagaagtccagatgggtattatgctaaccctgttcgtgagattgggagccctgattccgtacccgtttactacccatcgcctgtttctgaagctgggtttgtaggcctaggatatggaaatgcgattcctaatgtggctgcctggggccctcgtgtggctgtccaaaccttaccagtggcgtatcagagtgtgtgtccagctgttgggtacggttacaattctaatttggccaatcggggtgctggtggatccggcgaacttgtgagcaacaactgtgccatgtcaacagcatctggtggcagccccaatttgggcaatccggctgctggtgcttacggtgttgatcttgctagtcatgatatggctaacaggatggggtatgctcctaatttgagtaaaaggggttctggtaatgctgctgatcagctagtgaatgattcagcggctggatgtggctataatcccaatataggcaatcgggttggtggtaatgcggccgatcaagcgagtgatgagggtggagatgattctgcatcaggaagaaaagtaaagtttctctgtagttttgggggaaagattttacctagaccaagtgatggggtgttgagatatgttggtggacatacaaggattattagtgtcagaagcgatgtgagctataatgagctggtgcagaagatgatggatacttatgggcaacctgtagttatcaaatatcagcttcccgatgaggatcttgatgcactggtttcagtttcatgccctgatgatcttgaaaatttgatggaggagtatgaaaagatgattgagaggtcttcagatggatcagctaagttgaggatgtttctgttttcagcatctgagcttgaatcatctggtatgttaccgtttgtggatttacatgatagtgggcagagatatgttgacgcagtgaatgggattggaggtggtggtggtggtattacaaggaaggagagtgtaacaagtgccacttcaacacaagcttctgatttcagtgcgaatgacgctgttgatggctttcttactggtcaaggggaggttactggagccttaccatctggtatgttattgcgcaagcaaaattcagctaactcagatgacttttctcctagattggtgtatgtggatcccagcactgtaggctatactgaacctactgtagttccattgcgcatgcctttggctaagtctggtccactagaagtcgatctagaaaggtctgttcctgtatcagtaattccgcaacatttgggattgcaacaacctggaatggaaattccaacttctgcctttgtgccagcatacgttgatcctcgtcaggaaataccaaaccaggcagattatctacagtttcctccccatttgggatttccaaattctcagctattgcgacctcctagccccgtgtacacacaaccacatctccatggtaatggggctggggttgtcccaagtcagtattttcctcctgcagtgtgtgcaacagtgaatcctccgccttcgtatgttggtgtaagacaaagtgtgcttcagccaatgattcaacctcgaatagaaaattacgtggatgaaagaacttttgttccaagggtggttcagcctgttcctgttgaacaaagctataattcatatcaggttccggtcccttctgcagtggtgggtggtaattatggttatcaccatcaggttccaaggcaggaccatgccctcatctctgagggtgttgtaccttgccaacaggtaatgttttctgataaaatccctaggattcaggaccgttacatgtgtcaaaaacaattgcctcatgcacattccgaccctatggtacagggtcagagagacagtggtgcaagtgctttgtctgatttaagctcaacacttcatagtcttcgtttggacgatcgtataagaactcaaccaatggctaaggttatggtaactggtgccctaggggaacgggctcttgatcaaggagttgaagctcgacgcagggtccatgctcatgttgatccacaaattggcaattttcaactcgagacaagtggtctcatgcagaatcctgattcaatgtatgaaaaggagagaattaattctcaacaagtagatatcgttgagcatcctaggattcccattcctcaggctgtggctggaagagctattgaagtacaaccgcctaatagtgcattcatgactgcagtactgcagtatggtcgagatgatcctgttcagcaacaatctgttgctgcccaatacctggttaaacaggatcccttggtcaaacctgtcatccaaggtataacacctgttggaggagcagctccagtcctagcttcagagcggtcaaatcgtgaatcgccaaaagctaacaactttcctggcatagtaatgaatgagggtgctgcagacacttccatttcatatgaccatttgagaccaatcgaagggagagtggagtctggtagaaatttcccccctgaaacatctatcctcagtgaccgcagtaagccaccaccagttgataaactaagaattgatgatggctatgatcacagaaccccatatgagcacagtaaaccacctgttgataaatttgagaccagttactgtataccagctgaaccgctgcctagttactctacagaaattcagtacaaccctacttcgcggttggttgaaacatgtgaggtaacacaaccacctatgtggggcaatcctggatatcatacacaaccaaaagttggagcacatctcttggattctgatgaagttcattatggaaaccctgcatttcgtggcattgacccaccatatacacttcctcctagtacaactggagacgttcaagatttctcaaactcacttttcagcaatcaggatccttggaatttgcgccatgatactcattttccccctcctagaccaagtaaaagttcatcaataagaggatcttatgccagtaatgattctattggtgagaaccgctcatttaattacacagaacaaagcttagtggaagatggagttcaaccatcgttcggcatcttgaacaaagacctaggttcagagcagtctcagctggaaaatggtcagcatgcctattattgtaattatttttaatattgtaattgctagtaagtgtcatgatgttgattttgtttatcataactgtaaaagggtcagcagaggaacagatcaagaatgaacttcaagctgttgctgagggtgtagctgcttctgttttccagccatctactgcatcaaattctggatcatgcaatgattccattcatgcagatgttaaaaagagtacctctgagtgtaagactaaagctgaggtgatcattacacatctgcttttaatatatgcatatagttatctatttgtacatacatttatatgttctgttttcttttctcatcaggatgttaaaaacaaagtctctgagacagcaaattctggttttcccgtgtctgatgggattggacgcttgcaggttaacgatttcttagtttctcaatttgagttcattttcttctgctcttctctgaagttaatttattaacctcagttatattatcttgtagaccataaagaactctgaccttgaagagctgaaagaattagggtctggcacctttggcactgtctatcatgggaaatggaggggtactgatgttgcaattaaacggatcaacgataggtgtttttctgggaaaccttcagaacaggagcggatggtctgtcttttccttgaaaaaatttaaattatcaaaagaaagaaagaaactgttttcttagtggcatgctaattatgtctctatatggtatcagagagatgatttctggaatgaggctattaagctggctgacttgcaccatccaaatgttttggctttctatggtgttgtgcttgatggtcccggaggtgctgtagcaacagtgacagagtacatggtgaatggctctctaagaaatgctttgcagaagaacgagaagtaattttctattctcgcacagcatacttgaaaaaatttaattctagagtctgcaaaatgataataattaacagagaagtatttgtttcaggattcttgacaagcgcaagcgtctattaattgctatggatgtggcatttggaatggagtacctgcatgagaagaatattgtacactttgatttaaaaagtgacaacttacttgttaatcttcgagatcctcaccgtccaatatgcaaggttagtgctttcacaattctggtctaacttctatgtccagcatctccattttcttttactcagttcttgtgctggcaacaaaccttttcaagtgtcttcaccatgttcagttatccctcattcaagaatgtaaatctcgccttcatttggccggacaatgaaccttaaaacttctcatctatgctctataaaaggaatttagtaaatttaagcattatgtgagagtactgctatttattcttgattttcttgtagggtagaaaaatatatgaaaagaacaaactaaataaatgaatataaaagtgaccacaatatcctataatgtttcttatgttaggtcatttggaatgtcttttaaacttaaactaatgagatatagctaataacctatacattaattaaataaatgagttcattgtaagaaataatacagagatatttgtggcgaaattatttaagttatattggaagttgcactgaatacccaagtaaatgtatctaagatcaacttttagttgcaccgtaagtatctattaactttgttattagatgttgatgtggtagattgggttaaaatcgtttttgcagcaaaaatatctaagttgtgctaaaaattgcactaaagtacttatatttcttcagcatctaactatacttaggtgcttaagtgcaacttttagcacaaattaggtactttcgccacaattattatttaaactattttatcatatcagcctctgataatgtaactaaaagttgatctcaggtacttttgttgtaaacttaagtccgacttttggtataacttagataatttaaaatgcataaaaaaaaaaaaaagttaataaagctacataaaaaacaatggaaaagtcattcaaatgaaatgagatgttaatactttacaatggaactaaacaaaggaattgaatgaaaattgatatttttctattttattctattctatttcattatttctaaccaaacacaaccttagaaaatgttttgttgggtggaatggaaataaagaaataggaagacaaaggaattgaatgaaaattgatatttttctatttattctattctatttcattatttctaaccaaacacaaccttagagaatgtttggttgggtggaatgaaaatgtgtaagataaattattattattattattttaatcttgcattgaaataattttttcttttattttaaaatggaatagtcattctattaaaatgttagaaaagttattcaatcagaatgacatttcgatactttaaaataaaaaataaataaataaacaaaaagttgattttttctatttcatttcattatcaccaaccaaactagtattatcattagtaagactattgtatagtacaaaagtctctgagggggaatttcttcagattaagtatattcattatctattaaaattcaaaactgcatagttgagttgtccaagaaatgtacactgctacaagagtaaagcttataactagaaatgtacatgagcattaaaattttcttgatcatttgtcaatctgtgtacgagtccttcctcaacatttacatgggacttgctaattcctataattttctggtctccaaacattataagattaagcatagagcctactttaaaaaaaataaaaataaataacaatctggactggtgttgacggcttctatcttttcatactaaagtaaaaaactaaaacttttgaagattctctgctgatgttgttatacatgatgtcacttgcctaatgttccatcgctcttcattttattttccctttctcacaaacttgttttcattttaattatctagtaaaagccttttgccaatttgatttaagcatgtgtatgatttgattccttacaatattgaatatatgcttctcaggttggtgatttgggactatccaaagtgaaatgtcagacactaatctccggtagcgttcgaggaacacttccttggatggcaccagagcttctgaatggtagcaattgtttggtttctgagaaggtttgtgtttggagactgccaatgaaactactctcgtcttcattattcactgtatgacctctgatgatgggtatatgtttatctatgccaggttgatgtgttttcatttggcattgtgttatgggagctcctcactggagaagaaccatatgcagatttgcactatggggccatcattggtaatcttcatctttcacttcaacttcagtatttgtatcaccctttaccgcttgcttgttcagttgcctaacctaatgagagatttgaaattggaaatgcttttaatcagtttccaaacatattgcaggaggtattgtcagcaacaccttgaggccactggtgcctgaatcatgtgaccctgaatggaagtcgttgatggagagatcctggtcggcagagccatctgagagaccaagcttcaccgaaattgcaaacttattgcgggcaatggcaggaaagcttccttccaaaggacaaagcccgcaacagcagcagcagtagcccctccttgtataaaaaaatatagcttatatttttttattatttattattataattatgatcattttcttttttagatagaaaaaatagcatagatagggaagattgcttacactgttctccacagaaaaaattacagaagagtgggtgttaggcttttttacggaagatatttatttagagttacataatatgattgtaaaatggtgattaaattttgcttacaatttttgtgttgggattttcgaattcttttcaacagtaatgggtgattgtataaagtataaactgtattttaggtcaatgctatatattcttaattttggtgccaacatagctctcatcaatgagttcgtccttgttctcatcccattttaggcttatcagtctctgtaccaccatttataaattttagccttattagtctctgttccaccatttatagtcgtgttactaagacggttggtaataggtttaaacatatccttaatgaccttatttcccatagtgttttttttcacaatcgcatcactttgataatattattactgccaatgaagtcattcttgctattactaacaaaatatttggcaaggcaaattgggttgggatgctcttttagatatagaaaaagcttttgataaagttagataggagtttgttcgtcaaatttttaattattttggcttccccactcacttgatttctcttatacacagttgcatctcctttgtttctttcaaacttcgcataaataataatctctcttccaccattcagccttcttgtggaattagacaagaggatcctctctcaccttacattttccttcttgttgttaaaggcctttatgcaattatcagtcataaaactctcaagaaccaatttaagggtatatttatctgtcgttctgctccttctatttcccatctcctctttgtagacaacagtttgctttttactcaggttaatgctcaaaattgtgaagccaataaggacatccttcatcttcctaataaggccaccgaccagactgttaatttagctaaatcctccattcttttttcccctaatactaaccctttagataggtctttttttcttaactaccttaatatggaggataaaccgtttatcgacaaatgccttggtgtaccccaatgcctttctcattctgagagatcttcttttcttttccttctccaaaaagccagcagtaagttatctgtctagaaccaaaaactcttctctaaagctggcaaagagattttgcttaagtctgtgatccaagctattccctcctatgttatgtcttgttataggcttcctgtctctatctataagcattttggtaggcttatggccaatttctggtggggatcttcgggaaataatcatagtaaggttcattggaaaaattgggcccaactttgtaattccaaattttatggagatttgggttttcgtgatataattcatcataatcaggctatgctgaccaaacaagctcggcgcattataccaaccccgaatcccttgttgcttctctcttaaaagctaaatacttcaagcacaatgactttttccatgcacctattggacattatccatctttttgctagagaagtttcctttgggaaagagatcttctttctaagggtcttgtttggaaaattagagatggtaagtcggttgaaatcactagttcaaattggttgcctgttccaggagtatctcttttcacaatggttcttatccacatgagaacactgtgtcttattttattagggaggatggcctgtggaatgttgacaagctcaatgttagcccaagatatgtttccaagaggggggtgaattggaaatttatactaatttcggtaaatcaaaacttttaacacaaaattaagcaattagccacttaatcaaataaaagcaagt

SEQ ID NO: 16443 - DNA, 4856 bp, Cannabis sativa
gactagggagtggaagttttgattgatgtgtttccatatacatgaaattttgtagtttactgaagtggacctttgttcctttatgcttataggttcaactggaacccacaacctcctgggctttagtccgcagaaacttgtctggaccgtcaaaatatacaggaatgttacaagcaacgaaggacattttcagagaagaaggattaccggtacatacataactaacagtatgacattgactgctgttttgttcttgctttcctttctgactttgataatgtttgtattttttatttatcttatggttgctctcttaaacttttttcttgatgtttttaagtacagcattggccttttttctatttattcaaagtaattagtggtctttctttacagggtttctggcgtggaaatgttccagccttgcttatggttatgccatatactgccatacaatttactgtattgcacaaattgaaaacatttgcttctggttcttctaaaacaggtattttgagtactgactagcttctaagaatcagaatcctatggagttattatgctataatattaaggattgtttattgttatagttgttacagtgatcttttttggtgcgttgattttttttttttttgtctagtgtgtagttctatttagttataacctctcaattagaatataatttacttagtcccaagtgtatttttggatagagattctactgtattaataattccactacaatgaatgttcaaagtgtcagtacattcatatacatgtagcagtttatttagaggaaggttgtgaaataaatattgtttgatgttcaggttctgttttcctccatatcagttcagttccagatgcattccaatatttttacttactttcatgtttctcattgttgatttctttttctgcagaggatcacattaatctgagtccatacctttcttatgtcagtggagcattagcagggtgtgcagctactgttgggtcatatccattcgatcttttacggacaatattagcttctcaaggagaacctaaggtatgaatctgaagacttgctttcacttttcctacctgtaaatctagaagtttttaacaaatatggaccaaattcaggtgtatcccaccatgagatctgcatttctggatatagttaatgcccgtggcatccgaggtttgtatgctggattatcaccaacattggttgagattgttccttatgccggtttgcaatttggtacctatgacacatttaagcggtggacagtggtgagttttagtcttgtattgtggcgatgttactgttttctgtgaatttcattttttacttcataccatcttttaaaagctgaaatttttcagaattagaaacctgagtataatgattcttcattttgcagaaacttgtttgataagtatctagttttggtatgaacagagataagatatggatagagtaattatattaaactagatgaatttgaattcatgatggattatgataatatagttgacttagcttggatggtataaatagattacctgagaaatgaatttcctgtcatggatatgtttctgcctatttaaggtaactaaggtaactttagagctgatgctttactgcttttcaatgtaggcctggaaccggcaacaattatccaagataaactcaattggtacggatgatagtattacaagctttcagctctttctctgtggattagcagctgggacatgtgcaaaacttgtttgtcatccacttgatgtcgttaagaaaagattccaggtagatactttgcactttgtattgatttataaatattcttgtttcgggttgccaggcctatatgattcgcgttaaacctcttgtattttattgctataaggtctttcacatgtaaaaagaagccaactagatcaggtttttttcctccaaaagctttggatgaaatttactttctaatgatcttggcacacttactaattgatgccttaaaaaacctcgacattagatcccaggttctaacctggtcccacttctttccaaacccccccaccactagaccccatttatacatatatgtcgtaagtagccttagaccatctccaatcttaaaaatctgctaaattgacaaagaaattgaaagattaaatgatgaacatttctattatttactcttcaaggacattaaacacaaagatggaggctaagattgtaatggaacttagaaactaaatatttgttaacttatgatgatccagttcttcgttgtatattgttttgaatttgattttatttgcagattgagggattacaaaggcacccgcgatatggggctcgggtagagcatcttgcttacagaaatatgttggacgccttgcaaagaatcatgaaggcagaaggttgggctggtctgtacaaggggataatcccatcaactgtaaaagctgcaccagctggtgcagtaacatttgtggcttatgaatttgcatcagattggttggagtcaatctggacgtaaatctaacttttgtctttctcattctcacccatttttcattactcgattcttttgtccttggagaccttaaaaagctctcataatcaatcgaaggtctaaacaattattttttgtttgatttagtaaaattactataggccattatatttgtacttgtaggtatggcaaaagtaaagaaagtgaatacgtagagttcgtattaaatttttgtagctgaatttaaaattgtgaatggattttaataatctaaagctcttgagctggttaacacagctatatttcattccagtaccagtattattatccatattcttttactgttgaaatttgctatgcttctgagtaatattgtactaaattcagtattgtaatatgaggtcatttcacaaaaaagttagtcaatgatcaacaatgctagattctaaattaagatcttggtcaacagaagtttgattaatgacttgaataactgatataataactcagaacaaaagaatttctacatgtttaacaaaatagaagacagatatccgttgtatagtatttctctataatcaatttgaataagatatcaaagaaattttggtaagaaaagaaaaaatccagcgccttacaagccatctttattatgaaatctgttagtttagcagaagagtgagacaaagcgagcaagtaatcaaaatttgttcccgtctttcttcttctcctcttctggaggcagtgatatgaactgcaagatcttatgaacttccgcaacatcaacacgaaatttttcggcaatttgttgtgcgttcattggaccgttttgatcagcagccttaccttcatgcagaagaacaatgtggcgaagctgagcaacatttaaggttccagaaggagtctgagcatcttcaatagagctgtaatctggtttcgtgtttcgtagttttggcagcggtctcttatactgttctaccacaaatgcctgaaacgtacagcctgttacttagcaacgcaaacaacacctctgggaaatagaaccaaaattattctattacttaaaacttttaaatttaatcatgaaaacaaagactaaaacagccagagaggttttagcaacgtgcaaagtacaaatataaattatataatgaaccattatccaatagagatgactataacaagctaagatctccaaaaaacacataatcacctaacaattgaattctaaagtataacaatgaacaagtcaaattcaattttgaggagaagaggtcataattaagaggaactagtcttgtggacttgacaaaaaactatatcagtatatgagtacaaatgtgtaagaaacaacttggaagcaaaccaagaatgttttttagttgattaatgaaagtatgtatgagaactaagaaaacaattgcataacccgccaagctaccaaaaagactaaatatgatcatttaagatgtttttttaacaattaaggaaagattagtttgaacttacctcacccatttccagttttcccccaggcttagttttgattctacccaccatctgaccaagcatggcatcgaatttcgggtctcgttcttcaagtacattatcaacatttcttcccaaatttacatcttctaaaacaaggaaaaacaccaccaccattgaacataaacaacttagtattcagaacatcaaagatctcaccaaactaaaattttcaacgagagcaaaataaaagtgaggatttttcatcttctaagtgtttatgttgattatcaagcagtagctagcaagctctagctctagctcttcctgggtatcgatgtaatcatgaaacgacaatacaaatatcatattgcttgtgtcgtttgataccattcatgtgttttatttctaatgcttgaaaatttttgtcttgcttaagaaccataccacatttgtctttctttttttccatctaataatgattacccatttcttaaaattcaaaattcaataaagttttacttccagagagagaaagatataaagacagaaaattttcaccagaatcgggggcagccccaagctgggcggttttggggatctcttcgttgatggtggttgtaacagtgggaggctttctatcaacaacgttcatgggagtggaccaagacgacgtcgcatcagtggtcgaagttgtacggaatcttccagatgctcgacgaaatgcctgacccatcttcctactggccctgttgagattgtctacgaaagtaacgaatcccccaatttcatttatgacagtaattatagattggtatgtatcagcaaaaccctcagaattagggtttagaagaa

SEQ ID NO: 16444 - DNA, 4917 bp, Cannabis sativa
tactattattttttggtactagaaacacaaaggttgcagattattttgattaaattacattgttgagaaaaaaatttgagatacgtttgaaccttttctcaaatacgaaaataacattatttcctgacccagagcatgagttattaggcccaaccacaactgttgaatgaaggaaatctcttgacttccagccactagctagaaggaaatttcttgacttcgcttatggccctatgcagtatagaaagcaagtgaggagggctaaaattccattgttgcaccatcttctacacttctttggatttggaatttttcgagaatagtccaagatagaaagcacacttgagaacaaaacttctagcatgagtagatccacaacacccaaagcctcgccactagaggttggggataatgatccaccatattggagatgcagccacttgagagctatatcccgagtgttagcacttaaaatatcattttgtcacttaaatatattatatgagttggtagttagttattgaagttaattaagtttggttcttttcctggcttttctgtaactgtaatcttgttttggacttctataaataaaaatgcttttactaattgtgagctacttcaatatttttctttgccgttctcaaattgtgttctgtaatgctattgttctttagagatggtatcagaagtccctgactcacctccacgtcgtctttaaccttaaatcttggtactaccactagctactgccccaactaatcctgctccaaacccaactccatgaaaccctttctctcattccctcacatcctctctaacactcaaattagattagctcaattttcttttttggaaattgctagtggtgcctacggttattgtccatgaccttgatgaaatcctattcactagcgtttcccctcctcagctcttggttattagtgctcctaatccagaatgtcatcaatggtgtcgtaaaaatcaacttctgctctcttggatgcgatagtctatgtcgaagagtcttcttgcttctgtttccaactacaccacctctttcactatgtgacgtgctcttaaacaaaagctttcctcacaaaccaaggctcgccgtctgtagttgaaggggaaattctctcttcttcaaaagggaaatctcaccatatttgattatgttgataaggtccagtcgatctacgatgatcttgctgtcgtgagttctctagttagcggtcaagatcttgttctgcaactccttcgtggtttaggtcccgaattttactcttttgtctctagaatcacttcaagaagtgaatctttatcaatcaaagaagttcaggcattgcttgtttcccatgaaattcgtctcgaacatcacaacgccgtgaatgatatcaatgtcaagctccaagccaatcttgttgtttgttcaagatgcacgaacgatgtttgatcttttgctaatccaaaagttggtccagctggctcctcctattaaccaatggatcgtggaagaggttttcctcgattcaaccagtctaaagtaatttgtcaagtttgtatgaaaagtggtcacatggctcccccttttcattatcattttgacaagaattgtacaacacaaaagccctaagcagctggagtttgattatgatccacaagcacactccaccacgatgattcaagacttaggtaatgaccattcctggtttgcagataccggtgccacgacccatgttacttttgatagcaccaatcttgattcttctatggtatataatggctctgaatctttagctgttggcgatggtaagagattattaatctctcatataggttcttctactctcctttcatctaacaattcttgttctttacatctaaattcagtattacgggtttcctctattaccaaaaatcttgttagtgtctctaaactaactcaagacaattttttttttttaatttcataaatactgttgttttgttaaggacaaagaaatcggagttgtattgcttaaaaggaaagctagagatggcctttatctccttagtgattcttcaagtcgagcaagatcgactttacaatgcaaccttgccattacttcagatactttagttgattcattctgtaattccaattgtaattgcatatttaagaatattttctctcagttcaatcgtaataaaccttcaatcaataaaattgatttcttgtctgtctgtacattttgttttctattcatctaaatatgatgatgtcaatttgtggcaccaaactgcttccccagtcatccaattctagctccatcaacaacctacaattttgtaatgcctgtcaaaaaggcaagtcacaagttgccttttcttatgttaaatagtcatgttgaacaaccattagagctagttcataatggcctttggggaccatgtcatgtggcatctaaagatggtcaataatattaaatacaattattagatgactatagccgattcacttagatatacccactaactttgaaatctcaagcttttaacatgtttgttagattcaaaagcatggcaaaaaagcaatttggtttacctataaagagtgttcaagcaaatggtgatggtgaatacaaactcttttccaagttcttagcagatcaagaaattttgctctctcatccttgtcttcataatcatgagtagaatggaagagcagagagaaagcatagacgcatcactaaaattggactcacattgatagcatagtctggtttggatcttactcacttgtggcatgatttacagtgtgctacctttaccattaacaagttaccaacccttgtgccacacaacataagtccttatgaatgtctctttgggactcaatacaacattttaaagccatttggatgtgattgctttcccccacctaaggtcctacaactcacacaagatggatttctggacacaataatgtctttttcttggttattctccttttcacaaagggtatctgtgtgaaagtgataaatgcaaaatcttcattgcaagagatgtgatattcaattagctttactattctggtctttttccagcatcattatcgcaataggtactcactaaatcaaattcttgctatggtccctttgcaacattttttactagttctcacaatactgctattggtttaatttctgctgttgtcactgagacaaatggtacctctttccccacagtttctcctcccactgcaccaccacatatatcccctcctatccaaaatatcctagaaacatcaccatctacaaatcactcaaaaccatcacctactatagcacctaaaaatgtactccttttaccacctcaagccccaccacctttaacctctgctgctcaaaaatctttcccaatagtttatcaagccaatccaacgataaatatacccataattcccacaacactatttgtctctaataatgcaaaaggatattgtagcttgaacacatcatatacaaccaggtctaagagtggaattgtcaagccaaaggcctatcttgcaactaagcacccattgcccgagtcactactttcttcagagcctaagtctctcaaaatggctttacaagatcccaaatggctagcatcaatgaatcaaagaaatcagtgcactcaaagctgctcgaacttggacattaatgccatataaaccaagaaggcataatattgataacaaatgggtccatagagtgaagctaaatgcaaatggatctttggatagattcatatccagacttacagtaagtggatacttacaaacacatggaattgactatgaggaaactttttctcctattgtgaaacttgttactgttagaacaattctctctctattgtcattttgactaactggccagtcaaaaaactcgatgtaagtaatgatttgattaatgggatgctcattgaaactgtatgtgtgaagaaaccaccaaggttcacaggtccaacaaagccaactcatgtgtgccaattgaacaaagctctttatgaccttaaacaggctccacgagctatgacaaaatcaaagaatgtctcattaaatgggattttcatgcttccaaatctgaaacatcattatttgtgtatggctcttgatccaccttacttattctacttgtctatcttgacgatatcctagttacatgtcctgatcaggctctcataactcgacttatacatgacttgaacaggtccttttcactcaaagatttgggtgatgttcattattttttgggtgttgatattcaccgtgactccactggtatgtacttgtcgcataccgagtacataaatgatttgttagttaaaattaaaatggaaggtgccaaatcctgttccaatcctataagtgctgccacaaaacttttattacaagagggtgaaccatttgtcgatcctacactctacaaaagtaatattggtgctttgcaatatcttcaactaccacgaccaaatattgcctttgttgttaacaagttaagccagtttttaaaatatcctacaacactacactgagaagcctgcaggagactcctccgatatctcaaaggaaccatgtcagaagggctaattttttgacctattaatgattacactctaaccagttagtctagtgttgattgggcctcgtgtgttgatgacaaacactccatgagtggctatgatgtgtttcttggaggtaatcttatctcttggtcaactaaaaaacatgtagttggtcgatcaagtactgaaagcgactttagatcaatggaaaatactgctacacaactcaaatggatcacttctcttttgtctgaacaagtttctttaaaccattgccctatgatttgggttgatagccaaagtgccattgctcttgctgca

SEQ ID NO: 16445 - DNA, 5334 bp, Cannabis sativa
gataacatttttagtctgcgagaaattttaagtaaagcattattagatataatctagacaatgttttcagtctacgcctttcaagctgactttatttgtttgttccctagtgtttattgatatccttttggttcttgttattctaccataagcaagaacatgaacatgaaccttatgtatgaaactgaaaagcaaaatatgcttactttaaacccacttgaaataaattttactcatgtattaataatttaacaatatagttagttacgatatgccaaaaagatggtgaagaaacttggatctatacagatgaatcttaaattatgaggatggtacacactgcacagaaaagaattacaagttgcaaatggtacttgcctccattgtcgagaataaattttaatctgaacgctgggactaaatgaaataaatatacattgagtgaggccgcccttggtacaatgcagtgtgcgcagagagccacatggatgactgctgtgttttcaggcacatgaaatattcatgttcatatggtttggtcttcaatgcctcgttgcaggctctcccactataaacatacacattgttccaccattagaagttcaattgtagttggaggatttcacataatattgccaccctataaagaaaccatgaggttagtatgaatttacaagtagaaatgcagtagctcatatgaacctaaatcatttacacttcaaggagctacactaagaagtttcattttcttttgaaagctcactaaaaagtttcattttcttttgaaagctacactaaaaagtttctttagttgtaaaagttcagaaacaaatcacatactaaatagttttaagatggatgaatttacagcactatagtagtctaaaaatgacataaaatgcgaatagtatcaggactttgtaataaaacacttcagttgcctacttgtacgtatatatgtattaaaaaaaatctatgtagattttaaaagtaaaacatattatctttaattttaactacaaataagattaacaaatacatcaacaatccagaggtaaagccccaactccatgcagatgcagtagtttagaaatatgtcacaaccatgatcgatttcaataccattgtcacatgtaaaggacaaaacaaactcatataaccaaaaaaaaaatattcagagagagaaagtatcaatagtaaaaagaatataagggtcagaagtagattttaaaacttacctatatctcgggtgaatgtctacagttaactggtcaagcaccactaaatccactggtgttgcaagcttgaatactatcagaatcttgaactatcctctttggcattctgtttgatcccccacagatgccccttaaactgctctggatgtcagcagccaatgggttcaaaaaagcacttccgttttggtgctgaaacctgttgggtgagaaaaccatcccagacccagaattaggaaacatttgacaagaatagcggccttcagctctgcgccagaacttggagctcaagaactctgtaccaggcagcttgcagcatgtgttttctgcaaagtcggagttcggaaaccttccacttgatacagccaaatcgtatgacatttcatctagagcgatctctaggccacggacccgtgtctccaaagaattcaatccatattgagagctcccaataaatctctggttccagtaaaagaagaatacattagttagcagagaagactcttaaaagtgtatccaagcaaaatgcacaaaccaacacgtccactctgattaatttgacaagcaataataaccttttaaaaggattgtattttatataatttttaatgaagaggctgaaaacaagcattgttcagtcaatacacacctgaagaagttctaaaagactcgattgctggttttcaatctgaataagttgttcacggatctttgagagatcctcagcatccttgggattctcgtaaacttcttcagcaacattgtcatggacaacatctgaaccatggtattcattatcatcatcaaaaggaaccacgcgagagcccgatctcaaacgaccaaatttttgaacttctccttcgagaatcttactaacgagggcatgtttagtttcctgcctcgcatttctagactgcttctccccagattcagaaaccagagaatcgttctttccaccaacattgtcctcacaagccaccttcgtggaaggagaacttggcactgcaattccaattttccactgagatgctttcttcggatggtccaccttaccgaacatggttggggtagaatttctgtcgttactttttaaaggaattccttttttggcactgttaggcaaggaaccatcagactcagatggaggggaccggttagtggggactcttttctttggttgaggagtctcaaaaccgctgtcttgggagcttttagggagaggaggaaaacatcgaccaatgccattatctagcccaacacaatgacaagggtaaaagaaaaccaaaatgttaggttgattatgaaattaaaatgcctcacccgaactgatcttcaaatattcgggaaaatcatgaaattgtatagttaccaaatgaatcaaaattcaaaggactcgtgagcaaaatatcaaagcgtttaccttgagaagaagatcttgattgaagtggaagaggaatctccgcggaggcattcagctccttccataactctaatgtttgattcataatctcacggacaaccttgacctgttaacaccatatccaaaagccgaaacagcagaaaaaaatcttttagaagctaaatcactactactattcaaaaattaagaaaccttcctttcttgccagtatatttttcaagaatccaaacaaaaagaggacaccacaaatcgggaaaacgttctctcataccttgtcgaatctccgattttccaatgcattcaaacatgaagccttgtactctgacgccaaatccttctctacaatggctactctacccaaagcttcagcagcagccttcctcaccgcccaatcgtcgctacataagaagtccgacacgctcggcacaagccaatctaacgcactcttactcgacgcgccaccggcgccaacaatgctaccgacgagaaccagtaacgctgacttggctttgaacccgtcgctcttagtcaacttccctaacctcggcaaactccgtcgtaactgagccacgtcagggtccggcgccgcctcgatcgcggcggcgaggcacaaagcagagccgatctgggagttgaggtcctgatcaagcgagagaacgtccattagaggtttgtggaaagcagtcgcgaacggcggccttgtgatccgcgccgacatggcggagacggcgtccacacatgccattcgaacaacggagtcagaatcacggagacggcgaacgagggtagagatcatcttgggaagaaagggagttagagaatcgccatgggagttcgaaagaaggcctaggaggctcacgcattgcctccgtacgtgaggcttggaggaatcatcagtgttgtgaatgcaactcaggaacggcgagaaagaatcattaccgaggccccgagcgatggactcgagctcggaggtggcgagggccaacgtgtctcggtcggagagcttgttgaggcagtttatgactcggttcctaagatcctgagttgacccggcgagttgaggagaggcgacgccgctgagcgagttcctccgcgagttggacattgaaggcgagcggttattctagcagttatggtgattgatgccgccgcttgaggcggttaccggtcacaattataaatttggcggcagaatttggagagttttgcagtgtatgtgtgtgtgtgagagagagttttttgatatggaaagttttgagaagtgagtgggtgggtttatggattttgccttgataatttaattaaaaaaaaaaaaaaaaacacaaaaataaccggaaaaaattacaatttatgtattttatgttgtatttagtgagcccaaatttaaattgaggggtcaatattgttttttttgtaagtgagtgggctgttttttctttgtataaaatgttaaaattggatgaaaatttgtaatttattattaaatgtaatataaagtaaaaaataaataacaacaaaaatattagattgaataattaagacattaaaaataaattttattagtagaggttcaaaaaataaaattaaaatatactaaattaaacatatttttattggaattaaaactcataactttcaatatatgtatgaaataattttaatattatacagaagttataaaaattgcttttatttagaagatatgctgattgtattattattatgttgtagttaatttttttttatttgtataaatattttcttaatattattttattgttattttaatattatcttcttattatttttatatagttttttaattattttttttatttttataaaatatcataaaattaaatataaaaaattacacgtaaaaatttaaaaatttattaaaattaatgttttatttaattatacctaagcttttttaaatgttgtggcacgggattaggattagtggactcgttgtacaattggcgtggacggtccctcaattattattatttatttatttattgttttagtagttaaatcacaataaaataaataaataaataaagaattctctctgttgatatacattatcctcttaattaatactgatgaagataaagaaaagtaggcataataattttatgattattagaaattagaaagtttgtttatgttctttcaacttttataataatttttagttatttctgcatctgaaaatacatgtatacgtacggtgattaatattgttatttaaaacattaatatatgagtaacatagtcctatgtattttatttattttgtttgaaaccacacctagttatttgtatttcgatgcaaatgaaatataatatttatctttattatatgtattcttgtcaccatttccgtaatctcttacgatcaaattggaaatgtcaatttttggacctgtcagtatattttgcgacagtaatatcggcagctatttctgacttttttcacctcacaatttttggacctgtcagtgtatttatttgagagtgtgaaattgtcctaagttataattgaagaaattatactaaatttatagaaaactgttaccgtcaacctcttattacaatttcttaattaatttttacgcctaaaagatatgtcgaaatattttttccacgataatagtgggcaaagactaaaga

SEQ ID NO: 16446 - DNA, 9998 bp, Cannabis sativa
attaaatgcgggttgaaaacgggttaacacgacttagacgcaaaaataaaagcaaatcacatgatacaactcacttaacacgaatttaacacgttttgcatggtttttttttaaaataaatgaaataaaaaatttattaataataatataattatataaaaatatatatattttttgaaataaataaaaatatatattttgtgattcaatgttaagttaaaaaattttaaatttaatttttttagcacgaaaatattttaaaattttaattttttattatatataacaaattatatatacataaatgtatataaattttataacggaacctaaatctatcctttttttttataatatatacaataaaacttataataatatttatattattatatcaaatattttaaatagaaaaaatacatttacaattaagatgcatccatttagtgcaagaatatataatcaaataaatgacaacactactaacttttataatttatttctcaagaaaagactaaatatattgaaagtatttttaatgaattattaacaaagtgttggatactataaacttatactaatcagaagaaaataaacactcaaatatacaagaattttaatgtatactctattgaataaacaaaataagaaaaaattgctaaatcttcatctaagattataatttcatattagtaataatttaaaaactataataaaaaaacttaacctatttaattttgtatatggataaaaaaaatccaaaaaaattaaaaaataaaaaataagatacaacgtgccttgcacgtagttgccgtctagtatatataaataaatgtatataaattttttaatggaatctaaatctatcccttttttttataactccaactttaataataacaaaacagattaaagtagatcaaaacatatttaattcagactttttgtagctgtaatttcttttatgttaagcgttgtgaattgatgtttgtcgacggtttagcaaaatctgctagagtttttggcgataatgcaattgtagtccaaggggagagaactccccatgtagttcccatctttcttgttgtttaatgaactagttgttcttccaaaaaaaaaaaaaaagatcaatacgaattccaggcgatttttcataggtcaaaacatgatagaaaaaattagatacgagtcatagaaatagattgacacacctgacacgaaatataaaagagagtcacatcaaatatgacacgaatacaacatgatgatacgttttgctactcttaatattttttgttcattttgaaggatttaaaaaaaacaaagtttgtttgaagtgttaatgtaaatgtttttttctttaacaagacacaatcacacaaggcttgataatccatattggcagagaagggtgttttggtaaattcacatctccatgcatcagagcaagttatgatgtcttcttgtttgttgggtgggtcttcttcttccttaggttcctctcctctctcagggtttatataactaaactacagagaaaagtataacactagttccaatcaatcaagattccatttttatttaactcttaatcaaaattccatacattccccactaaccctaattcaattactcccaaattacttcatatctttcttctttttcttcttaccaaaccattaaaagcaccaccagatcctcccattttagcttacctactcaagatctcatctgggttttcatctccttctccgattatggtatttaatcttttcaattgccttaattaaattgacatgacacggtatgagtatcttctggtttgttattgatttttatggatacccttaatcttatctaattgatttatgttgctacatgtttttaattctgaccgattatgattgttctcgctcaattgtatttaatttgactttgctaaataccctaattaaattcagtgtaacgaaaaaatctttctattgttttccatatatgcattttgggtaattctttatggaacaagacacagtatatcttagtgctaagaccttggagaattgttgattctactttagaaggatcacaagtattgagttagtttatctagaaattacatgataaagcagttgaatggctcttaatcatgaaagcaacgtattattattagttttcaagtttgttaatttggggaactgttaagatgatgacacgaagatccttttggaaaggaggaaaaggaaaaggaaaaggaaaaggggcacccttttctttgtttcttctttatttggtgggattggactttggttaacaaaatgtgaacaagtcccacttctcttttgatgtgtgtttttgtaagagttacttttctgtttatgtaggtctctacagatgccatgtaatttgcattttgacgaggtttttgattaagtactgatttatgctcctcttttcagtagtataacctttgcatggctcttccggggtgatgtggcataaatggaaggagaagttttctctcatactgtccaactgtatcaaatctttcctggggattgaacaaactgtctttaatggtgaacatgaaaccttctcctcgtccagtcatatgctttaggcctataagaccctctgaccttggaactttagagaagattcatggtgatttatttccaattcggtatgtgtttgaccttttgatgtttttccatgagtatggccttcttcggtatgtagtttgcctgcagtgtggttattacatattgtcctaattttcaggtatgaaaccgagtttttccaaaatgtggttaatgggcgcgatatagtatcatgggctgctgttgatcgcagtcactcaaatggtcaaagtgatcaacttataggatttgtaacagcgcgaattgtacttgcaaaagacagtgaggtaagccctgtaaaatggcactgtttacatcctcctccctgcacatttcaaagaatcgtggtttgataaatcagtttggaataataatttaatccttaaggtgtgttggtaaaaataatttaaacccaggtctctaagtccttttttccttacgatttattagtattgttgtagtgtttccctctcaactcatataggggaaataatttgttttgtaggtaggggatatgctcagttatgattcattaaaatctgatcaaactttggtctacattctgactctcggagtagtagaaggctacagaaatcttggcataggtagaagaagtttgtctacttctgtaaatgttttgaagctttgactgttatataaatttattgatcttatttcaaattcaatgtgggatttgcagcctcttcacttattcgcgaggtcataaaatacgccttgagcgttccaacttgccgagctgtttacttgcatgttatttcttataataatgccgcaatccatttgtacaacaaaatgtcttttaggtgtttacggagacttcaaggtttctacttgatcaacggtcaacattacgattcttatttgtttgtttactatgtaaatggcggccgatcaccctgctcaccattgtaagtagcaaaagactgtcttttatagaactaagaatagctcggtttcaatttaaaactatgaatcattttcttgttgcagagagattgcaacggctgtgctcaaatacatgaggaatgcttttaagtcgatgtcagcacgagtatggaggaatgaggataggaaagtgaaatggcctaaaagtagagaaagccgctgcctagtttcattgacgacgcagagcaggagaaacctagcagctgagtgtacaggatgtgaatgtgtttgagtctttattatctatacattgaaaattgagggaacaataggaaaaatgaggtggtgtaggttatattgtgattgtaaaatctctttccttgaagactttttatgtgtgctgctttcttttgttagcctttgaaatgaaattgaaatagtagtaatattattgacaataaagtaaaagccaatatcgctaagttataaaatgggagcatattttgattcaaaaaattcaatgctttgcatctttgtgcccattaatttgaggcaaatttttggactagttacaatttatagcttataacggtttcatgttctataagtcagggaattaattatagttgtaattttcatttagggaatagttttcaaaaaattgaaaccttccaattaaaattgaaaccttccaattctaatttttctttaatgaaaattcaaactttattaacaacaatttagttggaacaaataaggctctagcaaaactatgagccacaattttacatttttgaatgacatgattaaataaagaaatcataaaaatagagctttgtaatacatgtgcaacactacaataaggaccacctgttgccatctatgctctttcatccaactaggagtctcacggactcctgttgcttcaggcaattatggtttgatagtgccatgtaaaaacgtgctacaacctatatttaaaatgggttattggcggcaacagtcctttatattttgattttatatacttaatttacttttttttttttttgtaacaaatgtccttatgtttacttttctttgcaaatttgaggcgtgagttagatatcactgttatatactaattggataaccactatattgacttcgaggttttactgtcacgtatacacagatgtacacagtgatcatccagttagtatttaacgatgatatttatttagcacctcaaatttgcaaagaaaaataaacttaaaggagtttttcaaaaaataataaaaaaaagataaaaaagtttaagtgtataaaaattaaaacataagggagttttactactaattacccttatagatccattagcatcccaagccaccaatccaaatccaaaactctgaccactatcaaacaatgccacatctatattaactttgatactatttggctgtggcaatatccaatgctcaaccccattatttgtctaaaaattagacaaccatgaatctatatcaaattttcagcatttttctcttaattaaggtactttattgcatacacaacaatgtcatcaaccttcaccgtctttcccttccaaacaaaatcatttcgagtctcttatatagcccagcacactctcaccaacaaacacttcatatcgttgttcaccatttcaaacttgtctacgcacccgtcaaagaatttgaaggattgattcctcactaaatcgccaaacagggcacaaagggttcaccttcacatgcttagaactcagttgtaccatagttgggagacaacccttaacaacatgccacaacaagtttttaacctttgtggcagcttcaatttccacattttattccaaaacacaaaaatcatcttcattcaaaccacatgctatgcaatcacttgaggttagctcaagtagcaataaagaattattatggaatgtgtgtggggttcctgatatctcgaattctaactttgtgtaactcaaaaaatatatttattagacgctttaatataaaaaaaaaaattacaacctgcaatgaaacatattataagaactttttacgtatacaatcttgaagtttccttccacatttctattagttttttttagagagaattaagttttattagaagaatattttatgggttcattgtttgattcatttaagcaatttgtttattggatagttaataattgttaataaaataattgcacataatttattattgacgaaagtaatatttgataaaagttttattttttaatattttaatcataaaaataaaaataattttttttcttgctagagataaaaaataacaatcaatattgaacgaatatgtacggcaagaaaataagtaaatattatgaccattggttttaggcaccttaaggtgcaatttgcacttttttttttcttcaataaaatgaatggaatgacattgataccaaagtaagctacgtaaacactattacaattagttaaaaaaaaaaaaaaatgaaaatctaattatgggttggtttagagttaaaaatagttttggaaatgtggagttgaaatgatagtgctaatctttagggaatgtggaggcattattagagcatacaacccaacatttatggcaatgagcctcctataaatacacacctcatttctccaaacatatggaaagaaagaagcaatatggcctcttctctcccttgttctctctctctagtcctctccactcttctcctctccctccttctcgccataaacgaaagccatggttttaaaggccccgaatccaaattagactaccacggcgggcctctcctcactggaaaaatcgacatctccatcctctactacggccaatttggccgcggccaaaagagtctcatccgttgttttctcaaatctctcaacagtgttcgcggggcctctaagcccaaagtatcatcctggtggaaaatggtggagagctaccaatctttcacaaggcatagacacgtccgcagggtccccaaaattcgagttaaggttgtgaaagtggctaccgatgcttcctactcgacggggaaggtaatgactgccgatttcataaagattttggtgcaaaaagccactgaagggacacacaacactctagctctcattttcacggatagacaagtgaccgtacaagagatgtgtaccgggagatgcgcgcagcacggggtgttcggacaccaaccttatgttcttgtggggaaccctgagacagagtgtcctggtgcatgcgcttggccttttcacaagtctgattttgggccacaaggagtggtgttacaaccaccaaatggcaatgttggggctgatgctatgattatatcattggcatcaggattggctgatgctgtgactaacccctttaatacaggcttctcacacatgggcagtggacattttggtttgttgggcgctggaaccatgtgtcaaggtatgttcggaagcggggcgtttccgggatacactggcaagattcgggtcgacccgaaaaatggtggagcattcaacttccatggtgttaagggcaagaagtttttgttacctgctttgtggaatcctgcaacttcttcttgttggacgcctgtatagtctaacttatttatgcccactattactatattatgtatccattcattatatatttttttgtaaagttaaaactgaaattcaatttaccattcatttttctcctatattatattaaatatatataatcactcattaacatattttatgttgtgatgatttatttttattaccttagatttttttgttgttcttatgtgagaattttgtacttagttgaacatagtgaaataagtataattgttcttgaaacaaattggtttttaacctaagagataaatataactatgtaccatatattttgtaaacattcttgggctatcaacccacaataagtaatataatataactgttctacacccattaaaatgagactttaagtggggatgcttattttctctacgataatgggaccccgcggggactcgtccctaatgagaattattttttgttcctgaatgttaaacgacccatctcgacatggactcatttagtattttatttcagtaatattttatatttatttgtattttttaatatattagtactctttttatgaattttaaattgtgttttaaataataattagtttattaaataataattaatttgtaataatttaatttttatatagtttaataatttgaagtttttttttattattttttttatttttacacttcaaaataatttttttttgcatttttacggaattctatacaaaaatttctatagcaactaacggaataacttaaatcgcaactaaaatctgtatagcaacgcacataaaaattaccggagcaacccaaactgtaaaattaaaaaaaaattaaaaaatagtatatgaagtaattctcctagtaatttaatatatttaaatttttactataaatttatttttttattaagagattttccatcctattcccgctcgatttcctgccccattctcgatggagaataaacgggaataagaattaaatccttaacggggagcacttcacgtcaattttccgacccgtgtgcatccttacttataagtacgtgaataatgagaaaaaaaaaattacaacaatgttaactattcaaaattaccctataaaaatttaaataaataaataaaaaaacccaagctttttgtaagacacaaaataaaagaaaagctgtgtaatttcctgtactttttcttctctttcccttaataccttagggcacgacattgccggtcttccaattccaatccgccattgcagcctccctcctcgccgtcgacgctgttgcaggtaaacgtttaaaattgaattatagtgctgtgttagctatttattgaaccgatttacctgtttatgtcgttaatgagctgttctaccatttatcaaggtatacaagaaattcgcaagataagagcttttatgccaataatctcttcgtcttttaccctgttattattgttattattaggtgtattgttgattgaaagagttcatgttattaaattttaaaaattttgatttctgggtgctaatttctggggctggaaacaaagatggggtctgtgtggagtggtctcattgagctgtagtaatgaacccatttagttaagcccaagttggaagttgagaatctcctaatttaatctggttttgcagttgagacttgagagagtggagaaaaggagttaagtttttttaagaaatcaatcttataatgttggccaaagggaggaagatttccgggggccgaggaggggaggctataggtggtgggaactatgcatttggccctgctgatgatgaggttataatcaagcacaggcttctcactcgcaccaccaccacccgaggcgaacctcctttgaagaagcttcagaagaagtttacttctttcttccttgaaactgataaggatgacgactccaactatgccgactgtgagagactctccaaggccttcttgcaggagctttctacttttgagattcctctgcttaagagcaaagctgtggtggaggccaacctccgtgagaaggataattttaatgagttgaaggaggagattaattcccagattctgcaagctcattctgacatttcccaactcaagattcaattggaggaaagtaagattgagaggcagcacaaggaggagtgcgaggctatcaggaagttgattgccgcacagccaccacgctcccaaacccagaagctcattgccgatttggacaaagagattgctgctcttgatgctgagaacacggccacttcaaggctgcttgaactccggaagaagcaattttctcttgtgcttcatttggtaagaaccattttcattttagaatgtgccctgccctgattatcatatagtctctcaagctctgaaattgtcttttcttgtgattaggtggatgagttgcaaacaacaatagaggaagagcagaagactatgatggaggagatgaggttggcaacggaggagcacaagaatggattggaggatgcaattgggggttcagagactatggcaattgattagttagtttctctttctatttctatatctaagaaaatattaggttatgctatctcctctttgtatcctttgtgcagtgtattgtcttcccaatctcatgttcaggaacacataaatcagtaccataaaatttagctgttgcttttttccaaatccatgttttgagaaattatttctgtattcctttcgctttataaatatttaagtggagaagctaaaatggtcaaacatgtggtttattcccacaaactttgaggtttgagtctttactaggtacttacattcctagctaatttacacaatg

SEQ ID NO: 16447 - DNA, 2079 bp, Cannabis sativa
  modified_base (202)..(231): a, c, t, g, unknown or other
  modified_base (344)..(352): a, c, t, g, unknown or other
  modified_base (1203)..(1204): a, c, t, g, unknown or other
ttttctttaatttttaattatatcttttaaataaagtaaaaaatacctaacataaaattagtatacgtgtctcgcacgtaactttttactagtataataatggttatttaaccgtctttattagtttaatagaatattttaaatataatattattaataggattagtttaataaatattaatattatttattttagattaannnnnnnnnnnnnnnnnnnnnnnnnnnnnnttgtaatattattatttttttttattattattttgaatatttcgagtatgttcaattttaatgtttttaaattttatatttatttttcttaaatttttaaaattttaaatatnnnnnnnnnaaaaaaattaaaaaattaataagaaatttcttttaatttataaaattttaaaaatatacataacaaaaataaaaattaaaaatataataacaataacctaatatattataaagtgctaataatttactagctctctattataattagttatatatataagaagtttcgatcatagtaatacaattagttcgttattgttaattttagctagttgtatatatatatacagtaaaaatacaaaaattgatctagattatgtatatatatttatatagagtggtgctgtcctatacgtactgccactaatatattatttacttatgggtgaaattaataggacttgatccgtaaattattaaatttttagtggatctttcattgtgacagatgaatacgtaggtgtgatcatgttgttgtatgaattatatataaggagatagcattttgtttatttgttgaaatgaacaaagagatagcgttgaaaaggtcttgatcattattaatgtatataagatatgtaaggatataatataaaattatttttaataagattaatgctaaaaaccaatccaataaagtgttatattttattatcggtataattaagtattaaaattttatatattttaatttaatatttattttaattatttacaaaatgatattttaattaaaatagtgatggccttataatattttttataattattatattttattttttaattattttattggtataattaagtatttcacattttatataataaatttaattatttacaaaactatattttaattataatggtgatgacttcttaacaatcttttgtattattattattattatnnttattattattattattaggagtttttttatttttatattttaaaataatctttttttttatatttttacgaaaatttacaaagtaaaccacatagcaattaattaaataaattaaatggtaactaaaatttatataaccatttacataaatcactagagcaactcaacggtttatttaaaaaaaattaaaaaatagtatataaaataattctctattattattattattattattattattattatttacataattctctagagcaactcaatcttttttgtttttttctattaaatctactttacaaatactcatttcgtgtgtgaattgtgtgttgagctgcacgcttgagaattattaagtggaatttggaggtaattaaagtgattattatttatattaaaaataatattacaattaattcttccattttcgttttcttttatatatatataacttctggtctatatttttttccccttcttttctttcttctactaattattattatatatgataattatatgtgattgaccacatagaagtgacacatattgggacccttttggtgatctattgtgaaactaacatttggacgcacgtcgtagcacatagtatcttagctttttaaccccactttttcctaaggttcgacccaatgctggcttgaaaagtatagtagacacagtcacacaagatattccttactttttttttgctgttattttttttatttttttatttttaatttattttctgccacccacttgcttggtggtcaaagtgggcactcagtatcctataataaatatcaggacaatatatgattaaaaaaattagtctctagctatatcaagaattagttagttttag

SEQ ID NO: 16448 - DNA, 3012 bp, Cannabis sativa
ggaaaattgatattttgtaatttatacgttggttatgtgacttgcagctatacatatctcgtggctcaattgatagcttttctttggtttccgatgctgcttatataagtgcaagcttggctcgtattatgcgggctctatttgaaatttgtttacgcaaaggttggtgtgagatgaccttgttcatgttggaatattgcaaggccgtggatcgccaaatttggccccatctgcatccactcagacaatttgagagagatatttcgtcagaggtttgtcagcataatgcttaatgatttgtgtgacctttactaacactgaatagtttttcattgtgtttcttcatttgtccaggtactgcgaaagctggaggatagaggagctgatttatatcgcttgcaagatatgcaagaaaaagatattggggcacttgttcgttattcacctggaggaaaagtaaccttttctttttccattgaaccatcaagtagatgctgttaccatgctagaaatacaatatttaccatttaacctttcttttttattattggcttgattgtaggtggttaagcaatatttaggatatttcccatggatccagttatcagcaactataagtccaataaccagaactgttttgaaggtagctacttgattggaaatcataatttaccttcaagattttataaggctggttttcaaatttgtttatttatcaaatcatgtcaaatagaatcagggttattttttattttattttattttttttttaatttttttccctccattcctttggtatgataatcaacttccatgaacaggtggttttactcataacaccagatttcatatggaaagaccgttttcatggtactgcacaacgttggtggattcttgttgaggtgctgatatgattaccttttcttagtaactttccatattatgttttggttgtagatgctattgttgttatacaaaaatgctccttgtatttttgctatattgtactttctttatcttgtgtctgagaatgacaaaaatatgctttgtgatttcagtttatactttatatgctaatgtgagtcttctgacaaaagtcaaattaaccataagagtaagaatttattcaaaaatgcgcttcgagtcaatttggtagagtcctaattcacttatcaatcagctttggctgtgcagtgggaagaaaacggttgcatcataaaactattgtgtatttggtaaattattatttgaaagtagtgcaagatgctaaagtaatattataatgtttcataaactatataattagagtggtctgttgttataaaactactaaaatatgagaacattttaaaatatttttagaataaaattaaaaatgttaatcatttaaatatttttacaatttagtttataattattttattaatatttatttatttcaaatattgctattatttgaaataaaataattatataataaataagtaaatatataaaatatttatagatttttatatatgttaaaagtctcaggttaggttgtaccaattttagatgttaatttctgcacaatttttttttttcataattaagttgctttttgtatgtttactgaaaaaatttataccaaaccgacctttacaccctagtataaagtgtaatgtgaacctaagatagaaagtgcattttgagacaacattcttttctcacttaatgtgtcgaaagagtgaaattcatatatttgttgagatatggtgtattttgttttattagaaacacaaagtttagttaaaatgcaactgttattgttcacaggacttgttcttacatatttatctttcatttcttcttgttaagaaaaaaaaagcttcattgtaattattagttgactttgttgttcttgcctttagctaatgtcttttcactaatgtgtttgtttcctgagaaagaatgagaaggttgcaagttttcatgattatgagatttttaattgaataactcgaaacaggatacggaaaatgatcatatctatcactcagagctttttaccctaacaaagcgaatgtcaaaaggggaaccacagaagctttcattcacagtgcctatatttgaaccacatccaccacaatactacattcgtgctgtttctgattcttggttgcaagcagaggctttctataccatatctttctcaaaccttgcacttcctgaggtagtctctccccccacaccccatctcctttttttttgtccccttcaacttatcagatacaatcaatgttattgataattaattgtacatttagggtctgtctgatataaatctctgctttttacaggcccgcacttcccacacagaactactagatttgaaacctcttcctgtgactgcacttggaaacagtacctatgaagccttgtacaaattttcacattttaatccaatacaaactcaggttctttctttttttgcttttttgaaactagaatccctgaccaaccctacaatatttgatggttattttgtttatatatcttatatatatatattatatggaaatagcgtgtaatatttttttttgggaatcggcaggcttttcatgttctataccacacagataataatgttctattaggagctcccactggaagtggaaaaactatatcagctgagctggctatgcttcgcctcttcaacactcagcctgatatgaaggtacatattttaaatttcctacgcaatatgttgcaattgcagaacaactaaggcaacataattgttcataaagacaacttgaggtattcattttggtcttgctggtttatttcccagtctaaacttgacttcattctacccttgctcaatttacattttcatttcttatcatttgctacagtaagatatttgtgatgtttatgtcactttgcacaagtacaatattgttgaacggcataatttctttttgagtaatttgcggcaaaacccccttaactatcaatttacttgcaaaa

SEQ ID NO: 16449 - DNA, 4304 bp, Cannabis sativa
tataaattatttgaatcttcttaagaaatttcaaaaaaaaaacttactaccatagtcacaattataaatttattttaaaaaaagacataataatttctttctaaaagttactttattatcataaatgttaaatgacattaagtgttatattattattggtgcaattctatattgaattctatttattttactttaataattataaaaaatcattatttataaaatactacttcatagagatgctagatagcattcatcttattatatacttagtttggttttgatcattcaaaatcaatgatttttctaaaaattcaaaaaaatcatgcgaacatctcaactaccctctagaaaagagtattattattattagatattagtagtatttaacactataataaaatgacacattataaataattagcgatattttataaatttattatattaaattatatacaatgagatatttaattatacaaatataacacattaagtaataccaagtactattagagctatttagcatttctcattagaaaataaaaaattataatagtgtaattttgtaaaagaaaaatactaagaggtaccttaaagtgctaaccactacacgagatactatattgctattgttattggtgtaatttaatatcgggtcctatatattttgatttaataaataatatagggaactgctaaccactcacaacgtgccacatgttgggtactttatggtacctaatacaatgctctttgcaaatacataatttgttgaggtgtctaaaagtaggagtgacaaaacatgttatcgtgtcgtgttcatgtcatattttatgtgactcacttctatatttgtgttatgaaagtcgatccgttttttacttgtgtctaattttcaaccctgactcgacctgtaaaaaatcgtatcgtgttcgtcagtggcagacctaggattgaattttagggtgagcttagttatacatttaatataatctaaaataataaataactagctaaatttaagtggaatgatagtttagcagcatcccctattctagtggtttaataaataaaatgtagatacaagtagaaaaaaactgagcaagaaaattcaaaacatggtctttcatgtaaatttgaagaatcttaaccaattgttctatttaactgcaaatgtatatataaaaataacaattgtatattaatattttttaaaatctcagagtgggctttagccctcgctcaagacccctaggttcgcctatggtgttcatattgacttcactttgacctgttttgctattactaaaactggagtagtagagaaaataatagattttgtttctattagaaaacttatatacatttatctatttatttttatatataataataaaaattaaaacatttttatatttttacataattatattattattaataataattttttattttcttttattttaaaaaaatactagtttttatttcgtgtcaatttgggccgacctattttcaactctcaccgaattcactccgactcaaatccataaaatttatgtcttgatcgtattgtatgccatgtcaaaatccatttcacaataaattaacactagtatttctagtgcagtttgttctcactctcacgctttttgggaaatcttcctaatagcgtaaatcaaacacgtttaactgtggagttctttggtgttaagctaccagaaaacaagatatcaccttattgatataagtagtaccaatcaatttatttaaaatattctcttcaacaatataatctcatatttacacaatttcaaaataatacacttaaacttttccaaacgatatatgattgtacaatttacccggtatatttcacgaatcacaagactaggtcacatttgtcaccccaatctaaaagataattggtgccatagtgataagtgataggactgacctagtacacaattttccagtaagacaacacaaagatccaactaagtaatgtcagtttacaaaaaacatatataaaaccaataaagaaaaagtcatgtaagaataccaagtcaacaagtcaaagtaaaacccaaaaacaaaactacataaaatagtgtgagtgcaacactgcatttattcttttttgggttataaaaggaagaaaatcacagaagagaaaacaaagaaagaaagaacaaaacaacaatgtctactcttaccattcctccatctctaacctctcctcgtgatgatgctattcttctctatcgtgcttttaagggtataaattatttacttttcttcttcttttatttttaattcaaaaaataaaataaaaaaattggttggtttcatcaaatatatgtgcttatatatctataactaaaaagtaactgtcatagattttctttgatctgtaataggaacatctaataattggttttggaaaaacccatgttgttgacacatgttcttgtcacccagacactgattttttttttttttcaatttattttttttttggtagggtttggttgtgattcagcagcagtaattaatgttcttgctcatagagatcaaacacaacgtgttcttattcaacaagagtacaaatcaatgtattccgaagatctttcgaagcgcttagcatcggaacttagtggcaaattagaggtactaattccgtcttttaagagtgtttggataaaaaataaagcgacattttataaatgttatgattcctagcttctcggaatatgaacttaagttgcgtttggtttgaggtaataaaatgaaaaaattcgaaaaatatatattttaaattatgtgttgcaatttagctttagaattttgtttttgctatttagattgcggttcttctttggatgcatgatcctgctggtcgggatgcgctgatcgttaagcaagcgctgaatcccgacatacttgatctgcaaggcgctactgaagttatatgttcgcgaacaccgtctcagattcagcattttaagcagatttactattcgaaattcggagtgtaccttgaaaatgatattgaaaactacacttctggggatcataaaatggtaaatgttctctatatgcttttttctcattacatttttgttacaaactttaatgtgaccgatttttttttttttaatcagtttcgctatagcacatgctattttagcgtgtaaattctatgttatgtatagtcgtgtctaagggcatattggtccaaattatacaagcttcttctaaagtatacgacttaatttagatatagatgacaatttctatactgatgaatcttctatctatcgtataaactcaaattattcgagaaacttgaaaactccaactttttgtatatagattacaatatttatacagatgaatcttctatctatcgtataaaaccacgttattcgagaaacttggaaactacctcgagttttttaattggatttcattcgaaccatttagtttcgtgtaacagacacaaatgatatactttattagtaaattattctcattaaaaatctataactaaaaaaaccaatcaatgcctcttcacataagactaaatctaagtatttgatagcttaattagaaacattacatgataacttgaggcataacaattttgttttccatatggttagtgacttttctcattactaaatatattggttgcagctcttactagcatatgtgagtacacaacgttatgaaggacccgaaatcgatagagagatggcggtaaatgatgcaaaacatttgtacaaagcaggggagaaaaaattaggaactgatgagaagacattcatccacatatttagccaacgaagcagatcgaatttggttgctgttgcttcggcttatcgtgacatgtatggatcccttaaaaaggtactaattgaaaatttagttatggtaaggcacgagcggttccatggaataactcgtgttcttatatattgtattatatttccacacatttttaacagagtttcggtttaactgttggtatgaaattatttcaggcaataaagagtgaaacttcgggttattttgagcacggtcttctgacaatacttcgttgcgctgaaaatcctccgaagtattttgcaaaggtaaaatttcttcaagctgtagtttttggtgctcaatgaaattaagacaaagttttttgcttctgtccattttttttagggaaatttacatggtatactaaattttgtcattttcttacaaaaatactgttaggcggaatttttaacttttttactgtgtttttt

SEQ ID NO: 16450 - DNA, 3604 bp, Cannabis sativa
atgattttatttttaaaaataattttttttcataaaaaagcaaaatagttatgtttattttattattgaagtatttttgtaaatatatccatatatatatttaacttgtttacaatatatatttataacatatttataattaaatgttataaatattaacaaaagattagttttggttcaatacactattatattatgtaaaataactaaattacactttttctaactaacaaaaaaaaccggcacatgcctccaatgacatgtctatctagttttgaagcttcttgtgtgattaattgttgtaattgttcttatccatagatatcatttacaaaagtccaaccaaaattaaaggaactttccatacaagccttcatcaaagttgtaagtctaagattataggactcgatattaaattgtaccattaacaataatacaacataaaaatcatttaaccatttctcctacatatatattccaaatattcatagatcatgtacaattttcaatcacatcattgataaaactatccataaaagagtaacttgacccacctttcaaaattgccatcttactcttctcactcaaatcttttaccctcttccttatttcactaccctgctccatcaaacatctgatcccaccctcaatcacttcacctctcacaacacactcttcatcactcaattccctatagaaatagctcttgtaatccaatttaatctcaaccgctaatcccaactccttcaccaattgaaaagcgttcaaatgttgctccgaataaactggccacgtggcaaccggtactccgaaccatatactctctagtatcgagttccaaccacaatgcgacacgaatcctccgattgcggggtgggccaacacattcggctgtgggacccaccctgtcacttttcctctctcgaccgtccgatcgaaaaactctgagggaagaaaatccctcggattagaacacgtgtccggcggagacttacgtagggaccacaagaatctaactccactgtggtccagcgcacaggcgatctctttcagctgagcctcacggaagcttcccatgctcccgaaacacaagaacactaccgaagaaagaggttgagcgtccaaccacttgctgacgtcagcaaactcggtggtcccacacagtgaagagaatctaataacgggtcccacgggatagaaaggtggaattttactatcggttgaaagagctttgagcgcgtgagattcaagctcggtgaatgaatttacaattatacccttggcttctctagttcttttggtgtgatctaatagcaaaggagcccaatctttcaacactaaaacttccggtaatgacgtggcaggaaccgactgaaggaaactcggtacggagaactcagtgacggaatcgttcgcgaactcagtgggatcgacgccattttcgtcgcggagagcttggaaatggaagaggagaccgagataagcagccccagaagcgtagaaaacgtaactaggaaccccaaactcgtcagccacgtccatcatcgccgtacagaacatatcgacgacgaatccgacaacctgagtcgaccgcgttaactcggccacgacggatctgactagaggcttttgtgtttcgatgaagagactctccaacatgccgggatcggtctcggcggaggagtcgtagccgtcttgcttggaaagatcgatgaacttgattcgttgtgatggttccgatgcggcggcgaagaggttttcggtgtaggcagcgagctctggcacggagattgaagttagagtggtgatgaggactgtgatggagagacttcggtgatgattggctagggttttggccgtctccaccatcggtataacgtttcctattccggacggtaacggaataaaaatgagttctttattatctggtttgttcatgtttgtttgggaaagatattatatatttattattgtgtaagagaaagcttgtgagagagagagagaaacaaagagatagagctctattcctgtctccgtcaatggcagttgatggttgcctgactggttagcagatcaggtagcgagagagaaagatggtgagggaggcggaaggcaaagggtattaggtttagtatttacttttatattttagtgaatattttaaaaaaaataaataaataaaaaatgatttatttttattttaagttaatttattttatgtttaaatatttatttacctgtactaaataaagtgtatattgtgttaatccattgtgtacacatgcaaagtctaacatgagcatctccattctctaatggggcaactgttagaaatattatttatattgtaactttaggattagatttagaatttaaaatggaataaaaaacaaataaaaaagataaaaatgcctttatttaaaccatgttggctgaactcctcatgtggccttaatgagtttcaattttactattttattaaaacttatatttcttttcataagtgtaccattttatattctaactttataaatcttaattttatctatttaataagtataattaattaataattaatttatttattaattagatttttcataatctcttaattaatatataaattctaaaaattctttttcttcttaaaatttttcttgttttgtaaaactcataaataagacattgtcattatttagaattctaactaattaaataaattaattaattaagtctacaagacaacattatttcaagtagtgtggggaccatatgggcctatataatcaaactctgaatgagtagttctagaatttcccgagtaaatgttatgtcttattaattcctcctaactcgattatacattcagaattgtactcttgattatatagaacactctattcataaaaaatatatatggtataaattatctactgtttcaatcaaaataatcaaagattatttatagatgatttatattgggtaggaaaacaaatttactgttttacacccttcctatatattttatccttaaaacaattggtttcttataaataatatttcaataaactaatataattacaaaaatagaagctcttccatttatgtcattaagtgaagctttaagaaaatcatcgttttacttctgactagttatagaagctataaatttcatatatatgattaacgctccaactcaattgcactactagtgcactgataaatcatgagattaaataatttgaagcatatataatcacaaattctttccactgtgatgacataatatcttcaagatttaatagaatttgtatattaaaactataatcatgaaaactacatgtaaatctaaataatttctaatcttctattgatactaaataagattatattgaaacgagttttatttagggcataaaattccaacaaactactacttgcactaatataaaactagaggtgcatctcaattaatgcattaatagattttttaggagaattaccctatatactattttttaacttttttctttcaaatttatggtttgagttgctccagtgatttttcttcactgatgtctatgtggattattatgtagatttt

SEQ ID NO: 16451 - DNA, 4150 bp, Cannabis sativa
ataataataacaataaatacgcttatgccttagtcgactgatagggattttaatagcagtattgaaattgttagtgtatcataaaatgtagagctaacttcaaggggttcagtggtaagggcgaatgctggaatgtgtgggagggcacactgttccagactttgaatccctagactcaaaaagttgaggtctcctggtcgaactgccagggccttgtgagatttgtcagacaaccccggttactcaccataagcgtacattactatttaagctttgagagaagaaacatctattgtgtgtgtccaattctatcattgttattattatttggtgtagcctttttactttacccttctatgtgcagtcattgcgtctaggtaacaacggactcaagtcccttccatccacccttttcaagatgtgcctacagctgaccacattggatttacacaatactgaaatcacaatggatatccttcgtcaggtgtgtgtactctactgacataaatcattgaatctaaatcttgtgaaaaatactgaattaatgttgttgcttcttcactttcagtgtgaaggatgggagagtttcgatgagcgtcgacgattgaaacatcagaaacaattggattttcgcgttattgactctgctgatttcgatgaaggtgctgataagaagtgacttctgccctctgaattgtctaagctgttggtcgaagccagccattgtctcaaagctagaagaatacagtaggtcactattatcttttgttggattaccatactatatgtacattgtttgatacatatgatatccagaaactaaaaaggttaaaaatgaattactgatacacaaattctttgtaattgaaattaagaacttttaacaaatggaatgattgcgatgttaatgcatgtcttttcttctgcagcactttaataatgttttcttttttggggggttccaattaacaacaacaatatcgtcggtcactattattttggtgggaacgttttacttgaacttattgtctaactaaatctaaatatgtacgtggtctgattctattagcccgtactatttttcaaaaaagatttataaacaccatttgccaacgtaacttcttatctgagtaaataaaaaacctatactaaagatctgaataaaatcaaaatcttggaatctgaataaaacttgaatgatctgtttaggtaactattttgtattatatttgattatgctgtatatttttatgtaatactatgttggcttatattaaatggggaatgaaggtaggagttgtactataagcttgcaccacattaacaatttaacagttgaactagtgtctgtataaatggagactcctaatgatggcaagagtctccgcctcactttgtcattgagatcacaaattgaccataccaaggccaaccatgttcaatttgaatgaaaaaaaaaaaaaaaaaaaagatgagttggaataggccaagaatgataacaggatcctcatgatgacaattgtcgacaggcatattagcactatggtattgctgactaattaaaagcccagtgagacaaaaaatcattatgaatgtttaggttcttatgaacaaatgttttggtggaaccacacacgtcgtcacaagacagtagccatgcattcaaggttctcgatggttaacaaatcctccagctccagcaccacctcagagatgttattacagccaaaagaagcaactggaataaactcactaaccctatcctaattaaagtgtaaattgtaattattactaaaagttcaatattattttatgttttaaatttttttttgggataaattttaatcacatatataatatttatttaattgccaaaacactattttcgggtaaatgtagctatgtgattttatttgttttaccagaatttagatttattaacatatatgttgattgtaattctataatctaacatcttaaatatgaaatttctaaaaaacgataaataaacattaatgtatagaaacccttatattgatggcagtaaaataaaatgactctttccgttcagatttctaactcttgattcttgtctgtagcagagtattatcaagatctgaacctggattttctcctccttcgattgtgttcatcacagtcttctacaaaggcctgagtttcaccttgaatagtatgggctgatactcaaatacctttggaacaaaaattttgagagataaactatgtaattttctaaaatcaagagaagaggaagaagtgacattagatttttcaattctctctttctttatataggtattcacatagatagggttaagtttagatgagatttggcttaaaatagagactcatgctaaagtctaactctagggccgaattcctcatgggcattagagttagatttatgtcactttatttcatttaaatatataatgtgtctttttttttattttaccacttatttcttctaattattaaaataccaatttcattttaataattataaataattatcatataaaatataatttaaataaatttattaattagacccacaaagtatactaattaacaagtaaaccctatttttcttttcttctcaaaaatggccaaacttggtgaaaattctcaaataaaacagtctagttttaaattctaattgacttattaaatcaattagttgagtctacaagatgatattatctcagacaatgtgtagaccatgggcctatgtaaccaaactcctaataagtatatgcgaaatttgtcaagtaaatttcttagcttattaattcctcttgactccactatagattcaaaattgcactcctgattacatagaactctctatataccaaatatagatacggtttgaattatccattgtaacaatctaaatagtcaatgattatctatagacgatttacattgagtagggataaatttactgttttacccttcaacggattttatcctcaaaacatttagctacttgtaaataatatttcaagaaacacttagatactagttttctttgctagatatggagagagaggatcaccctagcgcaaacctctttgaggaacaatagaacctgaaacttctccattgattagaaaagagaaggtgttggtatgaagacatgtcataataagagagatccaacgaatattgaagcctattttccccataatagctgcaataaagcttcattcaacccggtcaaaagctttactcatgtcaagtttgagagcagcataacctttgttacctctattcctatgtttcaaactatgaaccaattcaaatgcaacaagaacattatctgttatcaatctattgggaagaaaaacactttgtgtttcagaaatgatcgttggaagaacctccttaaagcgaatgaccaacatcttcgaggtaagcttatagatgacattgcaaagactaattggacggaaaagtctttcattgtcttcggcttctttatttttgggatcaatgtgattaaagtcttgttgaaagttgctggactactaccattgttcaatacatttaaagcagctttggtgactaactctccaacaatatcccaattatgaaaataaaatattaccgacattccatctatactcggactttcatctgaaaccattgtcttcattgctgttaacacatccgaggcagcaaattctttagataagaaagcattttgctcggctgtaattgtagttggtatagtagataaaacatgtgacaaggcccaatgatcttcttcagaaaccaagaacagattttcaaaataagaggataccattgctgttatgcaatctttagaggttattatattcccattgtcatcatgtagagctttgattttgttgttggagttcctagctgatgatttggcatgaaaaaatttagtgttacgatcccctgactgcaaccaatccactctcgaatgttgttgccaatattgctcttccttagctagaagatcatccaaaatactttcagccgattggatgtgatctgtgttagcaatagttttggagttcaaagaattaacccgtttttaagccactgttattaggggtgtacatcggtaagtttggtcggtttacgttacatt

SEQ ID NO: 16452 - DNA, 4984 bp, Cannabis sativa
gtagagcgaaagcttgtatatcattgttgcatactattaattcttgaatacttttacattcaattaggaaaggacattcaaattcaagtaaatccaatgtaatattatgtaaaaatgagattgagctcctccttttcaagttcattttggagtattgaagcacatatagtaagatgtatagattaagaaatgatgaatcatctaaaataataatattaataataaaaatgcaaacaaatcaagatcatatcaatttgttttgttattggagtactttactaatgtagcatgtatttggtaaaaaataattagatatatttttaatttaatgttgcatattgttattaatcaagtcttttagtttatcttgtatttgaaaagaaagcaaaacacaattgacaaagtaaatccatttataaattttacatttaggacatagaataagccctaaatgaagtggtttttgatccataaattaatatttaagtaatttagaaataatattatattggtaatgttgtataatactcttaagatagcataagatgacaatttttccttccaagaaaaatatataaattctcacaatcaatattgaacttaaaattttgaagagctaaacaccaaaacatgacactattgactagtcccatctctaaataatagtaaaattgagtatcaaaacactaaaatcagatcaattttgaaattaaatgtgcttataaagagagaaaaatccaaatttacacaagtaataacaatgagaactgggaattttagtcatacgtaagcctctttacaaaacaaacaaatacatatatatatttcagctacacttagtagaaagaaacccaaatacagaatgaaagtagactaaaaatacaattaattctctattgctagagggacttaaagtgaatttgaaagaagcgtaaatacacattagcagggtagtacttactagtagtagtaaattgtttagtgtttttttttggtttgttttttgtttttcgatcgagcctctatccttatacaaatactattctatcatcacatagatttttgctaaaacttttctagcaatgaattttattagcagcaaagcgcacccattctaacaatcttagcaggaaatcaaatatgctttgcagcaaagaaaaggggtgctctcactctctcactcggtcggtagtactactactactacttcaagacgaaccttcttggttattattggtaaagaaacgaacaacaacgcaggtgatgttatcggcactacctctttggtatgcttcttgcatcagtctctcagcagcttgctttggatcttggattggtttaatcattgcaacagcctcctaatgataagaaaagaaaaatgttaaataatcaaattgagttgaaaagctcaacgtgctcggtaattgagcagagacatgattagaaaaccatggcaaacctcatttgtgacaacatcccataatccatcactagcaagaataaggaactcgagtgaactatcgatcttttcttcctgtggtgaaaaagtcagtgtttttacgttatattagatgataaggaattatagagtgcatatacagttacatgttaataaactgcaccagtggtaggaaatgaacctgaatttctggatcagcaacaacatattgcttcaatagcctgtcaccaaaggcacgagaaacagcaagaacacctccgactctccaggttcctgtcaatatgaaatccatcagtaatggacaagcaatttgctacaacattagaaaactttaagatctatagtctgaaatcttaccagcccacatgacaaatcctcctgcttcctcaattctttgcctctcatcagtctggtctggcttgtgatcccttgaaacagcaattgctatgacagataaaaagtaaaaggcaacaatgaaaaaggagaaaaataaagttaaaacatgaaatttttagaagcaaaagatttaagttcgtgttatggataaaataacatagctaaggtagcacgaaaaagaatatataatgtcaaagtcttaccattaccacccctgcagattacagctctcgaatccccaacatttgcaacaagcaaacggtcaccaactaggatggcagtggaagcagttgatccagcatctctgttctgattattttctgacttcagaaattcagagtcggtatggttgtatgcatcagctgcagaaatacaaacagaattccttttagcccttttcttttcccttttgaatagcatgttgagttagaaccattactacagatatagaatgacaaacctatagcagattttgtgtcggaaataaactttggatggctgatcaaattactaaaaagattctgcttcacgtattcagctgcacgagcaccaccatgacctgaaacaaacatcagaaacagttttgtttcgttaacatctcttacttaaagcagtttttttcttcttcactgtcacaagttttttattctttactgtcacttactaaacgaaaactgtgactgacatagttagatacatgcatattatcatatatccagtagcacataaaccatactcactaggaataatatagccggtttgtgaactaccaaataacttttgcccacgagagaattagtacatggacggtcaaaacagatgcaaaataaagcaagccaaaaagtcataataataactttgtacctatagcatggttatgccgctagaataaaagcagccccaatgggttcctcagataaagataaatttacaccatttaaaagagtacaataacactatacatgcacagtgacattgatatgtgactagaaggtgagttcaaggtgaaataagtatgcttagcattcacaatcgccataaaacgttgtatatatcctgtgtttacagtataatggattcagatttgcattattttataaagtgcgagagaaagagatataccatcaaaaacaccaaagagaccaacaatttccccctccacaccatcaattcttgtctcgtagaaatcttccattgaagaccttttcccaggagagctagcatatccataactgaattttccattctgactgtttgacataaaacatcacaacaatgtcacactctttcccagtagacccattattaaaatattatatacatcattattagcatttagttaagcagtagcaaaactagttcagattgaagacccttaatttcaaaatcaaaacaacaagatcaccagataaacatataaaacccaataacaaaatcaaagtaccagagtatcctttacatcacatggaagaaatatcaatatcattctttgatttttttccattgctaataacgggattttgaacctaaacattaggaattagtgtggttatcaggcaggctctttaaaaccataaaaaaaatgactcattacaagcattccgaaccaaacaaaacgcagtctaaataataagacaaatcctaactagtcatcacatcacccacattcataactagccaatataacacaaaaataaagaatcataactagccaataagaaaatctaagtcccagagtatcctttatatcacagagattaaatatcagtattattcttcaattcttttccataaggaataaaggaattttaattttgatcctaaacattaggagtgagtgtgtttatcaaggtctttaaaaccataaacaaattacaagcagtccaaaccaaagaaaccccaaattttaaatcaaatttcgtgaattgtgaaacaaatcctaactagtcatcataaagaatcaacacttccattgggtttttctgaagcttcctaatttggacttcaatttaaagaaatataacaaaataataggtaggaatcttgactcaaatgataaaatcaaacaaagctaagtacaaaaacaggtccagatccataaaaaaatgaggaaaaagataaagaaaataaaaagaaattaacctgagaccaccgccgctcacaggtgcatcatcagcatgaacttggcttgaagaagaaagaaccgaattaagataacccatgttattattgtatggattcccagattgcccagcagctcttttttccttggtcaaaatcagaaaacgaaatcctatagctacaaaaacaacaactgctgctgttgctatatagacaaatttgacgataatatgacctattttggaatattaataacaaacaaaccaagaatcattacgtattcatgatcgaaaaccccaatttttctgactcactaactgacctgcaaagtgattcatataaaaacaaaaaaaaaacagtaaatccaattttcagattcattattttttcttgatccaattcacagatccatttctatataactacatgccaaaatctcaagaatccaacccaaattaaataataaaaaccaaattaagaattttcttaatacattcaatgatttagagaaagaaaaaacgtaacagtaaccctacctggagatgaaaatggccgagaaaaagatcagagattggaacgaagtgagatgaaaagagccttttcaagagagagagagaaagagggaatttctagagagagaaagagaaagggattcgatttctggttttggtttttaatttaaaataaaaaagggaaaattaattaaaattgttttgtaataaaataaataataatttattaattatggaaaaaggttattattattattagtaaatgtgggaaagaggggagttgagtcggtcaatgagccgaaaaagccgactggagcggcttatatggtgccgccgtggctacaccacacacgtgtcgcacatgcacaaacaatccaaaattattattattattcactatagcatcactgttataaatattattaattatgtgaatgtctaaatcttttatttattaccattaattgtaattaacattcatctttttttagtttct

SEQ ID NO: 16453 - DNA, 3493 bp, Cannabis sativa
ctaagcaaccaaacaaaaaattgaaaacataccaaaaacactaaccttaagcaaacccaaaaccttagacacctcctccccaatcaacctcttcttcaaatcctcataatacatcaataccaccgcttcaacataaacatcgacgtcatcacagtcactgatctccaccgagtgcgagactccccggtcacggcggagtttatcagcgaaaaacctgctcttggaagcgagtatgctcttgtggacatccatggataccttaaaaccatctctagcgaccaccgtgagcctcacatcaccagaaaccaatcccccccaattggggattcgaaacggcgcgtcttccagtaacttcgccacacgttcctgcaatttccgtcgcttttcatcggagagcttagactcgcggtattgctcatcgttcatcatgtcgtaaagggtttggctatgagaagtgggacgagccatctgagtctgactcggcgagttgggtgattgcgcggcggagaatggcggcggaggaggagaacagagggttttggatgatggcgaagatgaaggcgagtacaatctggaaatggatcttgatggtgagaatgagagtgttgtatcagaaatgaagccctgttttaacatagccgaaacttcccttgatttcagtgagttctctgccgccattgaaagctgattttaactcagtatttgaagattttatcaggaaaaaaaacttgaatgaaaaaaaaaaaaaatcaagaaaactctgaattgagttcttcttcttgttcttctttttggctaaattagaaagtgttagtttttaagggtaacaaaagaattatgttaagattcaaatgggaaaatccaagaaagatatagaaagtagagagagagaacaagaaaatgagtattttttttcccaagtagaagagagaaagtgggaatccaaggtaggaaacaaagaatggaaatttggactgtttaagaaaaacttctttgggttggtttagtaaactattgacaatgattacaaacctaaataaacggtttgttttggctaaaaaaataaagagaagagaaaatcaaacaaaaagttgaggaaattattatcgctacacacatgtaaagtagggagtgacccttctaaattatcaattgtgggacctaatttgtgtgaagggtaagaaaaatgttaaaagagacttaaaaaaaaaaaagaatttgcggtataaatattaagtttaacggctagttgcaaataaatacctaagagtaattttttgcgataataataagttatagttttaaataaattatcacgtggcaatccctgattgatcaaagtcattaaatttttattatttaaaaaaattagttcaaatataccaataagaaaatgacatgtggatataattacttaacatttaacagttaggtacccagagttccagaaatataacttatgtattattaccgccacaaattaaacttaagtatttatttataaccgaaagttaaaatatttatactacaaattactctaaaataatgtaactaaatattatttaacctaatttatatactataaaatcttaatgaattatactgtttattccgatttcgattctgattttgattgttataagtaaataatttattgaatggttatgattcatcaattcagttgaggataaatctaatttctaattaatttagtttttaatcattaattgatttatatactatgtaaatattttattttataaatatgtgtacacattattattctacttatcaccattttgtcttctttttctattttttttatttgtttcttttttactttatccatcacctatactattgcttgcttcttctgtctccacaaaatgaagacacttaaacattgctttatcttttcttgaaaacttttggcagtctaccatgtatgttagtcaaattttggaactattttaatttttgaaaaggaaaaatgttaatgttatgtttgagggttttggatttcattagaaccagctaataataaatgagttatttaattaagtaggagaaataaagatcctcttcacaaggttggaaaagaaaaggacaagagtgaggaaatcaatgaggtttaaatttaatataagagatccaaaaaactgttcttaaaacaataatacaataatgatttatttgattaatggtgaaaaaaagagaaagagaaagagagagtggagtggagtggcagctaagtaagaataagaaagaaattgagtagtagttggttggtagagtagatggtggtgatggacactaccatgtgggtatgtatgttttattgtcctatcaaattaatcaccctattatattaccaaattctatttattttctctatttaggcataattttttaatttttgttatcatatagttatttagaattaattaacagttaaagaaattacataacatgagctttttcttaacctcctcaccttactttgtaattttagtttctctttctttatagagagagagagagagagagagagattaagtgattttctcaaagtcataaatgtttacaattaaaaaagaatattcatccctttaaaatatttagtacacttcccttaccctagaaaaagtatttggttacaccttcatttattatattatgaatggagtgattcaaattaagttcaaaattaggcaagtgtttggttatggttaaggtaaataaggttgttgttgtgatagtgacaaaaggggtcataatgattgtgcgttgcaatccttttcagactgactcaagtttgtgcagatgtatgtgactctcattggaattagctccacattctctttctctttcttctcttattagatagatctatctacaccaaaaaccataaactagactacacactatagtatagaggagtatagatggcctatggcctatggcctatgacaccgcccaatgtcagcttgcctctaccactacccaaaactgaggctgatgtttcatacttacatgtcaccgacgcaattatatttccatatatagggacacggttttgtcccgtaatatacttttacggaatataattcgtgatttacgacaaccgttagattagatgaaagaagttatttgatctaagggtaattaggattaaaaattgttaacgtatcctgacccccttaatgtatcgaatacatccgctgaaagtatatatatatatgcatgtattcatgtatagctatgattatgaatgggatatatgaagtgtagaaccaaatactttattgtttcttgtgtagatgaagtgatgtgatagtgagcattttttgtagatagtgctaacatttcttttctatatgatttataggaaaactgtaatagtaaaatatatatttagagttaaatcaagaataaaattgtactattttaacatttaattttttactaaccataacactataaaaatatatta

SEQ ID NO: 16454 - DNA, 13998 bp, Cannabis sativa
  modified_base (2026)..(2031): a, c, t, g, unknown or other
  modified_base (13949)..(13954): a, c, t, g, unknown or other
caaacatggacccgttcccgcctttaagctccaccaggtacacgctcccgatgtcgccgctccccagcctgtgcacgaatcggagatcgcctagtccgagatcttcgccaccgccgacaacgccgactacgtcgccggattttctcctcatgcgctggatcgcctcccaacgaggatcggatgaaggcgcgtgcggcttaattgaagaagataagaagctcgaagacgtcgtccgagtagtcgtttcggaaccggaactcgtgctccgcttcgtctcgacggcggtggtggcggtcgtcgttgagttgaagcttagactgtccaagtcgtcggcgagatcgtcgacggtcaggtccattgtggccccggcgagatttgaacagtgtggatccagtagagagagtagaagaagttgaagaaggtaagagagttgagagtgggaaaacagggaacgagaaggaagaggtttaaaaagggtaggagctgaaccagtatgggccggcaaaattcaaagatgggccattcggacggttttgatttgctataggcccaatgtgggcccaatagctggactccatctttttaagttttgcattccataattgccattaaaaaccttcttttatatgttatgtatttctatcttttatatattttcttcttggaatttagtattttacatacaactattataataatgaatatgatatgtagccagcggttaagtgtacaccacaaaaaattttaattgcatagtatatagatatataatactagatattataagacataaatctatgtataagatagtgttgtacattgtggtggtttctattttttaaagcataccattaccaattcttttgaattataggtatgttgatcatgatatgatatctttgttgtcttttgaatgtcattaagcctaaagtgtatataaatatatacaatgattatgaaataattaataatatgtttacagaagatattcctcttgagatttttcttctaataatactttagttttaccatgttactgagatttgcaagtaaaaatgccaatagggttcatgggaagaaaatactaagttgggttttttttttactgttgacactttcatattacatgctaaaagaatttgttttatataatttaataaaaaaattaaatttttcagggtattcttaataaaactagattaaaaaggaaaaaagaaaataattgatggctttggcttgttcttttgttttgcagttacttattgtgcttctctatctcccatcaaatcatgcaaaggtacaataataacaattattctcaatgcatcaaaaccataaattttgataatctcatttagccaatagagattttttctatcgacaaaataaaaaaaaaatgttatcaatactacatattaattcacatttacactgtaaaattaaattagataaacgagtattaaataaataaataaataattagagtcatgccttttgttcttatgaatataggagttagcatcttggtgaaaattattattcaatttttttattatattatagttaatttatgatattttataaaaacagatattaaaacatcatgtgttgtgtgtataagcatatgaatagtttacaatctttttgtgtgatagttattgattatattatttctttattagctgttggtgatggtggtttatattatgtcattttacttgtttttaatggtgttgcttatacattgacaaagtctattactagtcctataagagtttgtatttggaaagatatttgtcttgagatttttaagtactcttatagagttgatttatttgattaatgataattatgagtgttcattcaatccaatccgcactattttgttcatagtgcatctgatccgcactaagtgtgaattttattttttagatccaatccgcacaatagctaaaatctaatctacagaagtgcggattgaatcaattattttagatttgccactttttaatattaaattatttannnnnnatgaaaaaaaaatattttttttcacataactagcaacaagataaaacaaattatagttattttatgtctctaacaacacattaaaataaataaaataacaaataacaaaagaaaatatatatatatatatatgtataaagaaatatttaattttattttaaattctatctagaaacaaattatatataagaatagaatacacatttgattgaaaatataattgtattatatgtgttagacctttaaattactattttttttacattaaaatattatttgtatatattatttttttataaatatgtatggatttgattgaatcggttaattttatatgtcaatcaacatccaatccgcacaagtacggattttaaattttctaatccaatctaatccgcacaagtgcggatatccgcactttgcggattagattggattagatcgtgcagattggattggatcggctattttatgaacacccctattgataaccctaagcatatggtataggtgtgtttataggactatatttttaagcttatctatattcaatccaattatatattaaacgttagattttacaattcgatctgatcaaattaatttcagtcatccaatcaatccaacatcattggatcagttctatctattgcgggtttatctaatattttagatcaagtatttattggattggatcaaatgtatccaatattttagatccattatctattggattgaattggatctatttactaaaaaaaaagtataacaattcaaaatctaattactcaattaaattaaataaaaatattaattaatttaattgaatgttagatatattagatttttttgagaaccaatttaagaaccaattatatattaaaaaataatatacaatttgatgtatcgatttattcaattcccctaggtacaagtgtcaagtctgtattgtgtacatttccatatttttccatattattatatgtttagatggttcaaaagtcatgggtcatgagtctaacttattcttttcctgtcctaacaaacaagtgaacaactattctttccacttttccgagcaaaaaaaaactatttttttccctttagtaacattcctcattctcttatatctttgaactttttcagagttacccacagaaatatgtgagaactggctcatggacttcttctgacaacataaggatacaaatgcgatgaagtgaatataaattatattatatatttaacaacatcaaaaaatatttttattgaataaaataaaatgggacataaatgattagggagggtaaattggagattagttaggtggaaaaaattaagttgctgattttgacttctataatacatggaaatcttttgagcttgactcttaaaattaattataagagtaattaacattttggatttaattttttcttttttaggcaatgaatatgataatgagtgtaagtctgatggtgctggtgggattttagtccaccattaaaggaatggccaaagctttgattatagaggttgaagaaagtagataatgtgactactttgtttggtaataaaatttgaaagatatatttatatacatatagatcaaagaaaaaagatgtatatataaatctatattacttgtttttaagatttgttcacaaatataactttaactttagttcaagacctaccaccacatgttgaagcactaaatacaatttgttgttagttcatgaattgatgaacatgataataattgcttctctatctctctctcttgtatatacagtattttgaagatcacaaaattaagtttttttcaaatgtaagatgaacattcaaagcctctcaaaaccacttattccatagtctttttttttttcttttttttcttttttgtcttgctccatagaattggtcaaagagaaattcattgataacagagatattcaaacattatgtagacataattatattcattaatatatggaacgtacatatttatttttcttaaatgtttaattattttcatcatgaatcctctctggctttcttccaacaatatgcaagtaacaaaagtagagtctttgtttgaatccttattacaatttaaaaacaacatttagaatatctaattaaatatttaattaaacttaaggacataattctcatttctttaatggatttttttagtactttcaaagacataaattaataatgaacaggaaaacagggatccttttttaactatggaaacaggaaatacaataaaccaacagaacatgcttgccaatatgtaatcctttctcttttaccatgtgtattatatatataattatatattatcttctttaatatcttaaaatataaataattaactaaaatcactgtaaaggcacatgtagtactttctaagacctctaataaaacactgagatgcttttcagtcaaaacttgttggtttactgcaataatactaaccagttggacatatcattgtttttttttcttctttgggggatgatgtctcatgtataatagaacacttttcttatgtttttttttcttctctcttttagaatagaaaataaaataaaataaactaaaaaagttaaaaagggacaaaaagattaccataaagttattggaataatccaagcacttcattatatgttgatacttcaataacaagcaaaaaaagaagccaagagcattgttaaaagggttaattgtacaagtaaaagagagttttagagctgagacagttgtatcaagctgaagattaggtcctcagtcaacatcaatcattaagtaaaattggagattaattaaggtaccacttagcacttactgtatcctaattaataagtttttaacatttatatttttatttttaaaagtagctggacaagattacacttttagcttcatctttttgtcattagagaggatgcctagtctctaatacaggatctctaaattaaaatatcattgaccttttcatggtttattaatattccttctagaacaagttttatttatttaacagtcttaatcctctacataaccttgtatttgtcatcatatttgtttatatctacttcactttcactaccacctgtcttttatatttatttctctctatatatatatatatatgtttatactactactgttactgtatacattatatatatatatatagttttgtggaaggaggtggacattaattagactatttaaagtttcattaatctaagttatgatttattggtatatgtatttaaagatacacctatactctcaattactatagcttaaatatttatatacatatatatttatacacacacataataataataaaagttttacatcgaaatttattgacatgtataatttattaactatgtatgaaattacattcttatgctgttccatacatattacataaaaaattccgaatatgagttatcttttcaaaaatagtgacaagtttgttaaatatataaataaattttaaagaaactcaaaaaaaaaagtaatttaaaatatacaatgtaatgtgattttacttaattttttaaaaaaaaaaaattgaaaaattcttaattattaaaggatctagtgtgaatattttttttttcaaaaaataaaaacattttcattgataaaatctcaaacatcaaacatcaaagtatcataaaggatatatttttagtatttctcaataatattgctttagagtgctttttcaccttaaaatagaaaaagaagggataaatatcataaataacaataatgtaacagcggttgctggttataatcatttaattgaggaaaaagaaatggcagttaatgaaatgtactaaaaaagtggcagcatttgcatcgccattattgcaaaacagaaaaaagctagcagttcatcctatcaatacctaatctaatagttgggaaatccatcttatcaactcaatatttattttctaaagttgtacagctttggatcaaaaggcagtgatgtataggtggctaaacagcttaaaagcataggactaataaattaagaagaaaaaaaagagaagccattaataaatgagttcagccttgagtaaaaaaaaacacatactcctatcctaaattagcctaatgcatcaacaacccaagtttggagttgaaacttggaagttttagctccaattatggaccagaaatgccaggaagctatttgcttatggttgtgttttacataaataagtttttttttttgtgtgcacagctaggatatttaggttctattattctctggtgatgaaatttaaaatatatatatatttataaatttgtacttgtaaacaatatttaaaaggcagaagtaaacatggtagaatcttaaaagctctagcaagtaaaaaggaggaagaaaagtcatgcaatgattcctgttctcttatgaccaaaatcataatgaatggaaaccccaaaatgatactaaatttcacaagtacatatttctgaaacatcctcctcatatttatatagggtataaaatttagtggtggtattcacctgagttaattttgtaacaagtgctatcataaaatttcagatcctttacaatacaatgttgtttgcaagtatacaagaataagcctgtataaaatgttatcagcagcatatcaatctagataaatatgaagaaagacagcctcttacaataagtaaagagaatacttaccccccctatcttatacattgacaatccacttgactacctattaacgagtctcaatgaatggttgtagaactcaaattatgtaggtctgctttgaattctttcgactacggtttctttttggatttgaagtaagaatgcaagagaaagcattaacaagttcagaatcctcttcagttatcaacatcttagctttactaggatcagcaagcaagattttcgaaacaaggtatccagcaattgaccaagtttgatacagatgtgcttgtttaccaacgaaccttgctctcttggtgtcataatattccggccacttgtctcgtgacaaccgtttctcagcaatttcaacagcttttgcagcaatgtcaggtctattcatctttatgcatgcgactgtaagctgtgaaagacaaatagagtgtgtcatacacataacattgaagttccaatggatattcaataattcagagacagaaaactacaagttcatcagggatgaaaatttagcattcgaacaccataaatgtttcaaaaagtattgtagtcaatttttgcaatcctagaaaataatggtctaaaatatatttatgcgaacgaccgtagaaagctaactccagtgcagactgcctaaacaaaacacatgctaataaaattgaaaagagaccaacctgccataggagtgttggccaagaacctccattgtggtaggaccaaggcctgcatcagaaacaaataagctgtgaaattgagagcctaatgaaatataaagaaaatgagaatatggaaataatgagtttaggacattacgtgttcttaggatcactgcctgttatgatctgccactccataccttctaaagcagggtaacaaatcttcaaaggcatgtcagctatcaaatctgcccatttagcttctataagatccaaaatggcatgggactgctccactgtagaaagactgcatactatggaccacaagtttcctaaagaaaagaatcggaaatccatatgagctggttgcaagtttccaattaagtaaccacctttgttgggcatccactctaccaaccaaggagaaatctgatctgggtaaatgttgaacttattgactgcgtcataagagtattcttcagttttataacggtatatttcattcaattttttcaagtcaacccagtaatactctctgatgtgaaatgacaaagctatcaaacgattatttagtgctcggataagatcagctgatccatcatctggagcaagcatctcacgtgcacacagtaacgctgaatagaaaagtgcctgcgagaaccagaaataatataaaacaggatacattaatcatactgggaaaatgggagaatgaaacataaaagagcacattctatagatgataaacatgacaattaagtcttgtttttctgtcaaataaaaaaaattgcaagaatttggtaaattgaacaacctaattcaaatctactgagttacagtgtattctgttgtctaatggataactactaaaagatttcctattatagtgaaaagtagattctttccgagtaaaagaaaagttttgtttttactcccaataagcaaaggactataaacttgtgtcatagtgatttttcaaaagccaaggactacaaatacatgtattgaaactcttggaaacaaatcagatagaaaactcttaatctgtagcccattgatgatgctcatttacttaatcgattgttcacaacacaagcacgccatggaaccaaaggaaaaaaaccttcccttgcaaaactttatgtaaattaatatttccgaagttcatgtctgcccacttaaggtgccattgataagagaaaactagcaccaaaaatgaagatatacttcaagttataaatatattataccagaattccaggaaacaagtctagcactaaaatatgattaagcctgacaccaccagtctaacacataaagatcaacttgctcaaatcaatatcagaaaaatcacaggccgtaagtttgtaggaacatggaaaaaataaaattacaaatttcacctagttatgacacaagtaaaaatttacaaataatcaaatataacttgaacccgcgaaaacaaacaataaaaaccaaaaacaatcacttagactcctaaaatatattctcctgtgctgcactcagcaaaatataagcagcatttcaatcccagtaaattgtgttaacaaacagaagtttaaaacatcagagttcactttctggtcgctgtactgcactgaaaaagggtttaaagtgatttttctgtgaaaatgatcgtggaaagatgaagcaactccaataaatttaactcttttgatcctcgtctctgaaattatttcatcaaaggttccaaaattaaccctcatgaccagtggcggagccaagaaggagcaagtgatgactgtggacaacccttccccccttaatatattttttttgttctagatttataggtaaaataatatttattttcattttggcacccacaatatttagttataattgttttttacctaactttaaatttgtgcttgctatgcccctgcagcctgcttatgagtcctgacacatgggtctaatctaattccgccatttccacaccacatttaatagctggatggctaaatttaatatttctatttgttcgtgattaacacagaacgtgattgttgaataatgagtgataattaaaataaccacaagcacaaacacactttttacctggatttccaagggatgtccatgtatacccatacgccgatctatcatgcaagaaccatctgtcaccaataatgtagggaacatatcaaaaccatcagcaagacatagctttaatatcatcttaattcccgtctgaacatcaattctctcctgaaccgaaagatcaccagaacattttccatatgcacgcagcaatataatccaccataatcctgaaaatttcataagatgaatacaaatatagcagtatactaatgcaagcatgtattttgattcaaagaatgtcattaatgtcaagtaaacttagttaccagaatcaactggtgctacacggccaattgctgcctccccaaagtctggatcaagtacctcttctgttgctgattcatcaccttccagcggcactgtgcgaaccttaaaactagcaggcatcaaaccttgaccaggactgtgacaatccattgttttctcccagctctgcaatatgtatagtattaaaccaatcttcctatggatttatgaagacattaaggcaaccctgcaaccagatagctagggtgcgtggagcactgttaaatattatatttgcatagacttatagggttaaaaattcacataaagatattcatccgtcggcaacaaaaaaattcaacttagatgattcgatgcttcaataatgtcaaaactagacaaagaataatgaattcatcaccttactattgaggacaacaaataagtgcatgaatttaaccagacagcgaatgcttcataaatgatttacagaaagaacaaaaaagaaaggcatgctaaattgtgaaaatacctgcaattgaagtgtatgcaggataaagtttcgaacaatatcatactcccccttcaataagaaagctatcccagaaggtatgaagtcacgaatgaagacctgatcataattcaacacattggagctggtcggatcattggcagcaatggttccaataggactgctacaataattaaccacagaatctcgtagcaaatcccatgcttcatcctcaatggaatcaacagaggtcttatgtaagccatctctaactgtcccattagcaccattagacttcaaagcctcctcttcctgtttcagttgttgaatatcctgaaactccaacacattcggtccattcaccgcaccattgattgtatccaatttctttgcactatctacaaaccaccctccatttatatcttcggcacttagcccgctaacactttctgactgttgacacttgcaactctgaagccaagagcgacgaagcattgtcatatttccatatgaaccactccctatcccatgaaagggataagttcgaagcccgctatgaagcatagttgaacaagccagtgactgcatattccttgacactcttttctttatccagtttatgtggtgtttagaagaagtaatgggatcaaatttgcttaaacacgagtcagtaaaaaaatgacaaggtactgttccagaaaaaacttgcaacactgcttcagtagaacccatcaggataaaggtttagcagaattaatattttctaccaaaccaaatctttacagcttgcaatgaatccaacacctcagcccctaaatcaaacaaaaccccaaatgtaatttatacaatgtttgcaagaaacgtttctataataaagaaagagagaaactaaatttaattgcatcgtaagctttaaaaatcattcccctgcaccaagattgtgcacacgaatacaattaaagtagcccattatttacagaataatacaaaaccaactcaagccgaagaaattaacagcacctgccttcatcagtaaccaagcagtacaaatcaaaaccggagctagaaaccaaaattactctccaacaaaaccgtacgcatacaaatcaaaaccggagctagaaaccaaaacttgccaaaacttgccaaaaatcacaataagtaatttgtgccaagcaaagagggaagataaacgaaattcccaaaaagacatggcaaagtacaatataccataattaatacttctaagctggtgatggaaatcaaactcagctaaaaacaaaacaaaacaaaaacacttaccgaatgtgaaatatagaacaatttgcagagggccgaggaaaataatgaaaagatcccagtgaaagtaggggggcaaaaggggagaaaagattttctcgtctgccaaacaaagttggaaattttaattttttatatgaacccaaaaaataacggtgaaggaaagtttcgtacgcagagaaaagcaaacgtattagactagtcaatccacatgtgttagatttttttcttcttctttctttctttattttttctttttctttttctttttctttttttgagtcatttatttatgtatttattttatttcacaatatttatttattttcttttgggatactaatggtaatgatggtagttttataaataataataattcaacgatgatggtagttttttttaagaaaaaaaaaagagagagagagataataattgattaaagacaaattcaattttaaaaaaataaaaagagaattgattagagataataaattaatagggacacgattttattgtgtttactttctatcgcgtaggaaagtaaataacgtcaaaaatgtatatacgaggagttttctccaccacaactcctatcttaatttgcagcctttgaaaaatttgtcattattcccaacttaaaaggcatatttacaaagaagaatagggaggaaaaaaatgaggtggaggtggtttgaaaaataggttgattttgtttttagttttatggtatgttttggatatgaaaaataggttgaggtggtggtgtggtggaggctggtggtggtgagtgaaagaaatgggttggttgaggtggtgatgatggtttctccatggttctagagaaagaagaataggaaaaaaaatgtaatttctattatttattttttatattttaaaataattttattaatatataaataattaatattatataaactaataaaaacataaatatatttgtgtacactagataaatattacgtgccaaagtcacctatgttaattttttttttttaatcaaatatggaatttattcaaaaacactcaaaatatacaatattcttaaaagcgctaggagcatcatgctcactaaactcacaatctgacaaataacaagaccctatagcaacacaatgagcaattttattagcagattgtttaacaaaaatcaaataaacattagaaagagaagaaagcaacacaaggcaatcccgagctaataatccaaactgagaaggcataagaatagcgctattaatagcttgaaccaccaccaaagcatcaatttcgattacaacattagtccattgtttcttctttatccaactcaaggcttctttgatcccaattattttagcaatttctgacttgactaagccacgacggctcacagacaaggccgcaatcaagcatccattggaatcacgagccacacaaccagccctaaacttgttctctgcttcaaaaatagctccatcaacattcaccttaaccgttttgaacataggattcctccaacgctcacatacattgttaatatcattaactaacaaagcaccacctttttgagattgagcattcttccattggtcaaggacaactctagctgaccgaaccacctccatagccgaaaaagatttattattccacaacacatcatttctggcagcctatattttccaacaaccattgccgcttcgcacaccaattcccgactttgagtttcagccacattaaagaaccagctactgaaatcggctcccaaaccagcagccatgttgacacccgaaactctccaacaggattgagcaaagccacactgaagaagaacatgatgaatggattcgctagctaaattacagaaaggacacatcaaatccacattcacatgtttagtattaagctgtgtcttagttggaaggcatcctgagatcgctcgtcaaataaaatggtgaacttttaggggaacatcaagctaccataacagcttccatctcgcatggttttcaacaatcataccagtaggagaagtttcttgcaatagcttataggcacttttcacagtatagaaacctgatggttcacgacaccaataccaatcatccttcacagctgtagcactagttgaatagaaacaatgagatttctatctctaacttcaaacatatcttccactaattccaagtcccaagccaaatcacccaccaaaaacagactagaaaccctttgattgaccaacccacgattaaccgaagtaacatatgagtaatccaaatctggcaaccacgggtcttggagtgttaattccatttttggcatnnnnnnttgacaaaaatattttattattctttgtatatttcggctggcat

SEQ ID NO: 16455 - DNA, 5317 bp, Cannabis sativa
aaattcagtttttgtggttaagtgttacaaaccgtaaagttcaggtggtttagccgctaatattcctattcaaaaataccattaccaaataaagatattgacatgcatgccatcactaatccttgtgagtttcgaataattgctccaattctaattgtatcacttttatcatccaaggatgcatccacattcaatttaaaggtccccaatggtggagtaatccactttgacgttgatgtacaaatagtcttctcttttaaactggtagtatgttggatactgttaaattcatcataaagggattgaatacataaaactataacttcaggagaactaatttggtgtccatgaactacttggtttcgctctccccaaatataccaatctgcctaaggaatacttcaaattttgtctgtgataacacttctgatgctttaatgattatttgttgaaaagaaacttcgatagagagactatttaagagtttgaactttaataatttctacaccttcttaaacatactacacaaaaaaatagcatggctatttgtatccgaattgtaaccacatagtggacagttagaatggttaataatattcctttttttcaaactaacattagtaggaagtatctcatgaaaacctcgccgtacaaagtttaaaatctttttaggtaaatgcatcctccaaaacctctttcaccaaactgcaaacacatctttagaaggagattgatagacaaatcaagagtagaagctacagcatagctacttttaacggaataagaaccatccaacgtaaaataccaaagccatgaatcaatcttggaaaactttccaagaagtatagaaccaatacattgctgatctgtggcgttaaacaattgtcgaatcataggtaaattccacacccttctcgtatcatctattaaatctttgaccaataaatttggatgtgtagtactattagatgaaggtaaaaatgaatatggccgaggtagccaaggatctttaaataccaatatagagtctcctgttcctactctttttcgaataccttttttaaggagagatcggccccaaataatactacgtcatatataactaggggattttccaactgcaaatatattcaaaatgaccacaatttaaataaagtaataataaagaacctcacgagttaaattgataaaaaagtaaccaactatactaaaaaatagtattagttaaccacttagacaaatgaagaaattaaagactaccaaaataattaaacctttacttatatttacaatctttttttgacaaaattaaagggcaacatgagaacactaaatgtaaagataagatttgatctaataacactaatattttgttggataaagaattttagtccgattcgacgtaaaaccatttgagtaaatataatcaccttagatttagtttgtgctaaaagttaatattaaagaaataaatcacaaacctaaagcatccaaaaaggtagtataatgataatatttagctttataaattcgagttggtaaagtattcggacaagtaagaatcttctaagcttgagtagctaacatggcttgattgtgaaagacagaagaacgaaaatctaaaccacccttttgctttggaaagcataatttataccaggccaaccaatgtaccttttgtttgttcactaaattagtccaccaatatcttgccattaacccttccaactcttcacaagttttcaatggtaactgaaaacaggacatcacgtaggtgggaatagattgaataactgcttttaataatacctctttcccgccataagagaaaatcttattgttccaagaatttagacgagtccaaactttctctttaacgtcattaaataatcttcgttaattttgaccacttagcatcagcaatcccaaatacttctcaatggcttccgtaacttgcatatgaaaagttgcagtatacaaagatttaatatcatctgatgtatttggtgagaaatacatagtagatttattataatttattagctgcaaaaaaacagaaataaagttacataaaacaacatagaaaatgaaagaaaatatttattaagagtatagaagcaatgtaaataatgtagtttcagttatacattaactaagtcataataagagtctctcaaacctttattttaataagaatatatcatttaataactagtagattaattaaaaaattgtgaacaaaggaaaaataatattaattataaaaccatagaacatatggttaaaactaatacactttcatagaattggcttaaacgacaatataagtttccccaacactttttattgtaagggcataacctttttgacacctaattaatcattagtaatagaataattaaatggaataaacacctgaccagaagctttagaatatgaattaaaaagctcaagcagtgaagaacaagaccgagaagaagcacgacagaaaagaatactatcatctacgaaaaaaagatgagtgatcggcaaggttgaccgagctattttgtagccaattatctctctattcctttcttcctggcataatagggccgaaaagccttccgcacaaaaaagaaaaagatatggtaaaagtggatctcattgacgtaatcctctagttggtgtaaccattcttttaacttcgccatttaagtttaaagaataatgaacaatacgaacacatttcatgagtaagctcacccactgatgagaaaaccctaaggtgagcatcattgattctaaataatcccacctaagtctatcataggctttgctcatatctaagtttattacaacataacatctcttccctttattcatagcccttaagttatgtaataactcatatgcaaccattgcattatctgggatacatctacctccaatgaaagtactttgagaaaaatgtatgatatcatttaaccacggtttcaatcgttgaaccaatattgttgataaaatctataaaggacattacatgaacttataggcctgaaatcactcacttttttttgcagatttaattttagggataagagtcaccacagtggaatttatagtggataaatcagacgtaccatttaaatattctagcacagcttgggtgactaagtctcctacttcactccagtgggtctgataaaacatagcattcataccatcctctcccgaagatttatctgccgtcatagaaaagacaaacctcttgaaattcatcaatagagaaaggaagtaataacgatctattcatatcatcagtaactcgaataggtatagctgaaactacagccccattttctgcatctgttggaaacggtgtcatgaacaaggtagtataattactctcaatatatttagtacctctaaggaatcagtacaccaaactccattataattaagaagacctatcaaaacaaagttagagaaagattagaattcaattaattaactttaatcacttaaaggaagatcataagtaaacaaattatttttcaagaatgccaaaatatctaagcagtcacaatttgaaaatacaaattacaagatatcatactaaaatcatgaacctagtatcaaaatataatgactaaactaagtaatggacattagctcatattaaccctagtatcagattataatgacaaaactaatattagctcttgttagaccatagtatcagattgtggtggcaacaataaattatggcctaagcttaaatatatatcgttaaaaatatagaacaagccatcattaagaaactatgaataagagcataaatagaagaatgaataagaaaattactttatatcaaaaaaagaaaattagaagaaataattatagagctttcttatgggcatgggtttttgtggagggccacgccaccactccttttgtggaaaatgtacttttaagaataattaattttatgaaaattatggatgatatgagattaatgagtctggataaatttttactattgtcaaattaaatcacaatatgtagtttatatatcttagaggaaattacactatatatatctttgaccttgatgcatttaatttttattttctctttcaatataaaacaagccatcatttagaaactaagaataagagcataaatagaagaatgaagggaaatcaaataaagatagacataaaagtgaaaaaaatacatttaatgatattattttgaactctagtactagcatatcgataaaaaaaactttgtattttgatccccagcttttaatcattgaacacgtgatcattgtttccaaaagagttcttctttttccaataacttagacaattgggattctaattgagacactttcgcctaattataaacacgataatccacattttgagcgtctgagagcttccgttttgttctgcagatatcattaggtagtgtatggtatttttcaagatgtcatgagctgagtttttgtgaacaggaggagatgtttgaaattatgacatctaaggcagaagagtcagcagaatgcttccatgaaccagcaaaaatctgatggcattcaggatcctctttccacaaggcttcataatggaatcgcttacgtttgttctacagtgccctttgagggtcatatgttgttcctaaatccaaactaagtggtcggtgattagagccaaagaaatgtaagtggctaagtttgcaaacggaaaacaagtattccattccgagttaaccatagcccagtccaatcattcttgtatagtactagagttagtattatattttcatgtatatcgttcaccagaaaaatccaaggggaatagtgcacaatcttctattgcacgtttaaaattttccatttgagactcccttcaaaggaggccaccaactttatcgtcttggttcaaaatttctaagtaaatcccaagagaagtgtctatttgttacttttgggtctccataaaattcactaaaataaaatgatgaagtaactgtagatagagatagccaacaattaatatgatgtgattggattcaatatgtgatatttccatagaagaatcccacaaaagtataagccctccactaagaccgttactaggaacttcatgatcattagaaaatgagaaattttgacatatggacggacaagaaccctttttcagcccagtttctaacaaaaataaaatatttggacgacaatctttaagaaggagatttagataccgtttcctctccttgttctttaaacctttaatattccaaggttgtataatcatgggttgaaaaa

SEQ ID NO: 16456 - DNA, 5733 bp, Cannabis sativa
ccatttttctctctcttttggatcgtcctcatcgtgaccttccccttgaagttcatttgacgactaccaagaacaccacctgaattccatcaccttctccattgagtccaccatactcagttgacaccaatcctcaaacaccattgatacacacttttttccacaaattattgatttattttacaacctttaatttagatcatatttatgaatatcaagtctcccatgagccttatattcataaatctcgattaagatttcacctaaaatcatttgctgtacatttatccatacactcttgagaacttaacttttgtgtgtcagatttaatcaataaaactacaagtagacgtagctccattaccatcgcgacattagggtgaaccactataaattcctgtccatttaattctttgcagttttattagtcagattaattcactatgatccttttttattttacgatcaattgacgaaaaaccgtgtcaacaaccgcaattatttttagtaaaaaaaaaattattccttattaaatcaatatatctataatatttacaaagtaacaacattgatggtttccaaaatgggttttcttttaactattaatacagagtatatataaattagtatgttatctcagcatgttgaccatccatatctatcttggcttcaaaataattaggttcatttttatgagtagatcctactaaggatgaatttattctattaacgacaaatttattaagtaccttaaagtgtctaatactataataagaaaagtaaccatactttaatataacaagcttctatactatttattattaaattaaaatatgtggattttacattaaattacatcaataatatgacatttatttatttataatattggacacattaagataatgccggttaagttttctcaatggaaataagtttgctttgtctgccaataagagaaatggttggttagtttagtttcagttatgtgtaactcttaccttgccataggtgcataatgagaggtgcatgtatttatttatttatttcgaaaggagaggtgcatgtattaaccgggaatataatatgttgggtatttccttaaatggaattggttcacgaaatataaggggacaatcttacttaaccttttcttttataactattatcattagattcatttttgtataaattcttactataatgcactagtttgacttggatggttgaattttattttattttacttttacataggccggcagtctccaaatgccaaaacaatatgaatggaggaaaaaccaaagataaaagctagtgatgaaaaacttgatggattatcaaaacaataagaatatgcatgttcattaacgttcacgtttattttgtcatttaccacataataattaatatatagtatactaaacgaattgcattttgggattttgatattttcttttttattattctcaatgaattgaatttgggattggttttaagaacctacttgtacttgattcttttcacaaatgttcacttctgtccttaccaactaatctcattagatgaattgaaggtaaatggaaatagtttttttttttcttagataaaatatcatgaatgggtagggtacctataaattcacttttttttttgttaccattctctatcaaataaatcacatcatatgtgatccactgtgaaaaaaaaaactagtgttgtgtggtgtagtggtagggattatccttttttacttggggttaaaggtttaaatctcaccacaattcttcattgggaggaattacgcgtgacattttaggaggctagtttgctgtgacggtatcatacttaataggatgagaattcttaaggtgcataccgataacttaattaaagtaggatgagttataagactctatagctagcatatagttctcgaaattgttaaaactactgaaagagtaaggaagagatctgcaccatatgatctccattttattaagcaaaaaagaaaaagagaaaaaaaatcacattatgcctaaaaggaaataatagatatttgcattcaggatttttttttaagaaaaaaaatgaagaaaaagaaaagacctttactttaaatattcacatctccattaacattatagacttaataaaaaacataaaaattaataaagataatttgtgtgtaatttaagaattattttttataatatttatttaatccgtttttattttatttttttaattaaaaaagtgaatctaaaaatatattctatgaaattattttcacttttcaattttttaattaagaatcaaaattttgaaaaaaaaaaatcactttttaattttttttaaacagttttaatctttttttaatcaatattttggacttcgatcttaacctaaattttggaacttggactcagaccatgacccaaacccagacctgaaccccgacccagaccccaaaccccggaattgaacctcagtcccaaaccccgatcctgacctgatcaaccttaaacccaaatcccaacctcgacctagacccaaatcctgaccccgatactcatgaacctgcaccctgaaccccaggatcagacccgacctcaaatgaaaatgaaaataaaatttacagtacacatttttattttctgattttaaaattgaaatataaaattggttatataacacattttgttttttaaaaataaaatttcaaaaacaaattttatttttatttttgtgattaaaaaatttaaaaataaaagttgtacaaaacaacaattaattttacaaaattgaaacacataattttttttttttttgaaaacaattgaaacacataatttagaagggaaagactaccattcttcttctatcttatttttgttccgtagttatctgtttgtattaattttagtttttgaaagggatttcaattaattattttgagagcaaaaatgaatattagtagtattataattcttgttagagtcacaaaattcaaccttagaaatataataataacaatattaattaacaatccctaatattatttaatgatgattaatccggcttcattttgacaaagtccacatgtccttactactataatatatcctcctatacaaaagcctctcttaaaaaaacacaccaaaatctaaagtatctcttttcctctctctctctctctgcttataattctcaaaacccatctcatcataacatcttccatagcaaagaaaattttggttttctttcattttttttttcatatggggaaaatcaaaggtgtgaaagaaagcaaagtgggtaggattatgagagctcctttaagggctcttattaaggccagagacttatacataaagagcatgactcagtgctcaagtcatttcgattatggagcagccatggggtgtccaacggctcatgtcaacaccactctgacgagaagcttcagcaccagctcggtcaactccaacaacaacaatagtacccaagattttagggaacttgttaaggctgcttccacaaggactctagccaataataagatcatcaatcataatcatcatcaaaagtctactgttggggttggtagtagaccacataataagttgcccaaaagtcgaagtgtgggatttggtcggatcgatgaagacaaggcttgtgatgagtttgaagaaagagatgatcaagtgatgataagaacaacttctactgctcatgatgcttatccaaggagcaaaagctatgctgttcataggagaactttgttttaaggaacacattacatgtttttattttttttaattgcaaaattaatggaaatgttatttcttcaatattgtcttcatgttaattaattgcataatttaaattttcatggtttctgtttctagccaatagccaaaaaaaaaaaaaaggaaagaaagaaaaatattggttgttgttgctttgctgctgatgtcattctctggtttgagagatatgattggtggtgatggtacagattttttttttttatattattattatttatcattattattttcatgaagagtagacaattaatttacaatatcaatgctattctatgttatcatgagaaattaagtgcatttaatttatgaaataacttctctgaaaaaaaaaaaaagaaactttttgtgatatcaatctagtattcaaagaaaaaaagaaattagtggagagcatgaaaaagactacaatttggagactatttttttcttttttccttctttccaaaatagtctttttacattatttgatacggttatagtaagtcattattattatttttttcttttttcctttctttgattggatttaaagtcaattttcaagagggtgaaaaaaaccacttactttcttaccaaaaaaaagcttttatagaactgtatcaatttcctctcccccaaaagcttatccttatctcttttttctttccttatactctctttgttttttagatattatcacacatttcagcttactaaaaaagaatttataaatataactattaataatctatatgtttataaaagaatttatatatttgattgaaagggactgtttattgtggttcaaactttacaaagctcattatgtatgctttctgtttttggtcatttcattcaagattgtcaaagctgtattgatgtattggctatgtattagatgatttatcctattaacaaaagtttcatattttcaaaaaacaaaaagaaaagaatttataaatattactattttatttcctaaaaataaaagccatgtattcaaataataataaaaaaaacacacgagcttcttatttccctgaagattgtatttaaattgagttttctatgtgctctgatttcaaaactgtatattgttggacaattcgtattgataaagtcttattttttattaaaaaaatgaaagctatttattcaaattcaatttcaaaaggggtattatcatggaggaaaaaaaatgactttcttaatttcttaagaaagaaaaagaaaaactacaatggacaattgtttcatattacattctggtccataattttaattaaaaaatcacttataaatcttattcagattttatatgaatgcaagtttaatcatgtgtatcaggttctaaaaaaaaaatcatgtgtatcaaagtttgagaggtttttttttttcttttcaaaaggatggtttgataaagaaaaaagaaaaaggcatggagattaattaacataatgttatgatatttaagaaaaaaaaaatcaaagatgaaatgctaaagggtgatctgggttcacacggctcggttgaatttcttggatgtgttatatatgcggagaagctgcggtctactgtttggccatttcgctggctatggagttagggcataagtttgttatagtggagagtgactcgagattagctatcaatgctctcaatgagaaggagttccattgagctcttgataactatgtctcattttgtattaagtcatctccctcttttatttgttgtaattttttttaatgttagtagatcttgtaattttgttgcccataatgtggcaaagtaggctttcacccactagttgtactgatctattttgatctccaccttactggagtagctattttgtaatgaccgagaggtctaacttttgctttatctaatgaatgattacgcttattttcaaaaaaaa

SEQ ID NO: 16457 - DNA, 8044 bp, Cannabis sativa
actttaaaatttcaaagggcctaagttgctcatggctccccaatctttcactcaaaacaaatattaagagtaatttttaaaatttattttaagcttaatttttttaaacattagaatgtacttattattttatggaatgtaaatagaattttctttacttaaattagaaatatttattctttttataatattattttatttatattaatttaattagaagtgaaataacccaccttggagccgaacttcctattggccatgcgcacccaaatgcatccgcgccaatacgacatgaaatttgtgccacattgtagacatattttatagcataagaacatttttaatggtgctctctattttttttttttatctaaattttagctaaaatagctaagttagaatatggagtcatttttattattcgtatcctacttcaactatattccatactttagttagtattaaattattttaataatattgtataatttaaatttattaaatataaattaatttgttgaaataacctcatagcattcgattataatttaatagtgcttttattaaaataataaaaaaaaattagcaaaaaactaacaaactacctacatttctttatccattttttatcatagagatctattattatttttttatagttaaagttcagttttttaaaattcactttctattttagtcaaaaaaaaaaaaagtgtttaaaaagcattgttaaagatgctgtaagtatgcttatacaataatttcactcttcattcgttgcatttgccttggagtaaaaatgaataaaaccaatccataagcttcttgaaagcgtgccacttaagttttcaatagcaacaggcaattgtaaatgatgtggaaatgaaaaaaatagtttcatatacattatttttcctgttttaaaaaatcattttgtcttcaacttcttaccaatagtaaaaaattgggtatattttaaagacacttttacgataagtagcaaaataatataggagtacactttttgtgcaaaattatgagaaacatcattattaatcttgagaaataaattgaacttaatctttaaataaaagaaaatgaactaaacattcatcaaattcataaaattacaaaacttctcaaactcttataaataattatctattttttactaactcattttcaaaaataacaataaaataacccattctccccattagaagaatccacattcagaaatatgtcggcaacttcaccgtgttcttacacgtggcaaacaaattcaactacaaaattaacatcaaaaagaaaaagaaaagattttctaaatttttttaggacaatgaaacaaaaggtcacacagtgatttgtccgcctgataatccttctttgatagcaaacaacgtactcactgccaaaaaaagaaaaattatgcgttccacaacccagaaaactcaccaatccaatctgcaaaacccatttcttcttcttcttcttcagagttgaattcaaatcttgcatttcttttttgctatctagtgctgaacatccatggctttcattctaggtctggttctgggtatcacttttggtctcgctgtgatcgttggattcgtcaagagtgagaatcaccggtccaggcgccggtccgaactggcgaccactgttgccgcttttgctcggatgactgtggatgattccagaaagatatttccttcggagttttatccttcttgggtttcattcactcagtggcaaaagttgagttttcacttaattttagtcttttaatctctggatttttatgaattttttatttgggggctaatgtttttgattttcccatttggattttgttttttaacagttgaaatggctgaaccagcacctttccaagatctggccttatgtcaatgaggtaactctttattttttcaagtctaattattgatttatgttccgttttttgcttataaatggtaatgcatttattgtagtacttatgaattttggggctgtaggcagcgtctgaactgataaagactaatgttgagccggttcttgaacaatatagacccattatactctcatccctcaaattctcaaagttcactcttggtacagtggctccacagtttacaggttagtttattattgttgtgcgtttgggtttccttttccttccatccacactttgcttacaccagatttttttgattaaaatgtggtaatgtacttttgtcaacaatattatgctattttaggttaaggatttatctttttatatcaaattttaatcaaatacttccttttaggttaagttctgatacttgagtaaaagaaaaggaaatgaaacaaaagggaaaaagataaatgaatcttgtatttgtttatgggtcttagtaatagatgttggtcttaattaatggacattaaagataaacttcagatgaatatatcaagaattaggattcttatgtgaactaattttgtcattaggaattcgaattgttgaagatgatggagcttctgttatcttggatctggaaatgaagtgggatggaaatccaagcattgtacttgatattaaaactttagttggcgttcggctgcctgttcaggtttttgaaacttattgctttctcgcctctttgattaattattagtactttgtgaaacagagtgatagagaaccttgttaaagaattttctcaagtctatttagagcaatgaatctgcgtatttgtttcaagcttatgttcgatattttggtatgtaagaaaaatatgttttctcatgttaggtttgaatgtttgaaaaatggaaaagtggatatcttgtgacattttctctatgaatattacagtagtccaatatcatattatcacataaatttgattaattaagctcagtaaattataacttattctaaaataattttactgtatatgttcataaatcgcatgcagcaatcctattcggacgactagaatatgaattaattcctttggacatgtgcatatacagtatgatttcataacaatgattatttactggaaattccatatgttcattagctctttgtaccagggaattgtaattgtcacctcttcaaatttcatgatttgtcccccttcattcaggttaaaaacatcggattcactggggttttcaggttaatattcaagcctctggttaatgagttaccgtgctttggagctgtttgttattctttaaaagaaaaggtgcagtcttaattttgttagtgctagtagtgaagctgtagacattttacattcatagcattatgttaaaactagtgtaacataatttttagattagtactatgtatgtataaccataaatggagttagttttatttcttataaagtttggttgaaaagtattcattttctaagcctgtatgccgatttctgatttgttgcatgatgttaaaagccaccacagtgcaaattttgttcttgggttcacctcagacaatactattaatcgatgaattccgcctcgcttttagatacacacatagactcaacatatacacacatggttttatgaacatctattgttattcttttttgtgcagaaagatttggatttcacgcttaaagttatcggtggtgacatttcagctattccggggctttatagttcaattgaggtttgattacatttataaatactctgttaattcatcggtattgttgctatgttaacatcgttgccattggcagagttattatggtctttttatgtctcattgtctaagtttagattggatgggtctctcttgaagtatgttgtcaaaaagcaatcattgcatttagtacactcatgcaattcagtgtcagacctctaagcttatatttatgttaacgtcaaatgtacttgaaaagataagcggtgttttatcctctcataagcttacattcagtgctagtgtaagcttttaagctagcgtacattctttgattctgtggaatactagatattgaaaacaatatttgtaaattctatagtagcatgtttacatgtcagatttgattaatttcagtagaaaaattgacaatcctcaacttatattgttggtttagaagcaaagcatcaccagcattgtcattactctgcgtatgcacaattctctttgcatctttcttgaaattcaacttggataaaactaaacaacatactggcttttttttttttgataattgagcgaatataaaaatctagaagggttaagtgtaactgtcttcctttgctacgggttttacactttacgtatggggttaaatatactgcatacaacacttgtgaggtgattgtgagaagtagatattcaaggagggagttggactgtgacatatattttggttgtttggaattgatttttgtgatcatttttttacttcaaatggttcataatttttctttgcattcctctttgactgggaatcatttgccacagtgacaatatgaataagtgaattgaataaaataaactcatttttcaaaaactgagtgtaaattctggtcaactgagtaattgtgatggttgttttgcaattaattcttttgaaaagctattgtactaatatatctgttcattaattttaagactggtatcaggttataaagaatatgcaattgtaatgtttcataattatttgaattacttggtattgtttcatacttttgtataactgtgatgcctctagttcaatgagatgtttatatatatttacaggggacaatacgggatgctattgaagatacaatgacatggcctgttcgtaaaattattcccattattcccggggattacaggtaaataccaaagataactttttatgtttaaaatttttctgtgctcatgttgattactatgggctgttgatatttatgacctaatgtatttctgtgtgctattcagcgatcttgaattgaagccggtggggacattagaggtgaagcttgtgcaagctaagcagttgacaaacaaagacttggttgggaaatcggatccctatgctgtattgtatatacgacctctacgtgaacgaatgaagaccagcaaaacaattgtatagtaacttttttttccctttataatcctgtttttgtcctctttatacttggtttaacaggttcttacattgttttttcagaataatgatttgaatccaatatggaatgaacactttgaattcattgttgaagatgaaactacccagcacttggtggtaaaaatttatgacagtgagagtcttcagtcatcagagctcattggatgtgcacaagtgcggttaaacgaacttcagcctggtaaagtgaaggatgtgtggttgaagctggtcaaggatttggaggttcagagagataataaaaatagagggcaggtaactggaaggaggctgagcactctcttatttttaccaccataatgatatcattttcagttactagtattaggtcttgtgaaatttggacagcaaaataaaaatagcagtcgaacacgaacacgaataatcacataactagcaaattcattctggtatgagtacccaaaacaaagcataaactctcagttgtaaaccctctgccaacaactgatttcctaagagaaaccttcggaaacataaactcacagcacaattatctacgtcaccctagtaagtgttaccctgtatacccttgtgcctagagtgcctcaaacgaacttgtggtagcatctttatcctgaaaaattaggtggctgcaactacgatggcgaaaccatggtttctcattgcagaaaattctagttgcactgctgcaggaatctctcaatcatctaccaatttatgtctttgatcaatgtcggtgctgtctttcccttaaggattttcaagattttttatttttttaaaatttattagaaatttaagtttgatgcatcttgtttcatgcgtacttttattaagcacttactatcatcctaggcatgggagagtattacttgagatttagtagttataaagattaaatgagttagttgataacctggaactccggtttatgtatattacctaaaagcatcccatagatcaacatgcgaacgtattcgaactaggattccagtatgtcgtgactcgtgaatatattttgggcgtgtttcatttacagtataaatatataaaaataaattgtaggtacaattggagctattatactgtccatttggcatggagaatggcttcaccaatccttttggttccgactcctcaatgacctctctagagaaggtccttaaaactggggctaacagaacagatgttactgaaaatgaaaaggaaattacacagaagaaaagggaggttatagtcagaggtgtactttctgttactgtgatatctgctgaagacttgccgcctgctgatgttatggggaaggcagatccttatgcggtgctctcattgaaaaaatcaggaacaaaaagcaaaactcgggtaagctatggaggatataatttacagttcactgatatttaaaaaactatgaaatgaatctttttagttgtgaataagcctttatgacattcttttcgcatctgtatcatatcttaagtgggttattcttacatcccgatttatgtttttctgtgattacctctcacacaagtttttcttgatttgatttttaactgttttttttttttaatttattatttattgtttctttttcataggtggttaatgacagtttaaatcctgtttggaatcaaacatttgactttgttgttgaggatggattacatgacatgttaatggttgagatctgggatcatgacacttttgggaaggtaaaggatcctgaatttataaagctgtttttttatttgttggattccatgactttttacctttatgttttccttatcttggttgttttgggctatgatgaactaaaatttataaatatcttttacttaatagtggtttattttataaaacactcatttaaatacttgccaataatacaggattatatgggaagatgcatcttaacactgacaagggtactattggaaggagaatacagtgactccttccagctagatgaatcgaaatctggaaaactgaatttgcatctcaagtggatgccacagccaattatgcgcgactcttgaattgattccttttccatgggaaggcaatttcacatgattcttgactgatccctagtctcatcaatggataagtacgcaaagaatgctatatactcgggatcaccggttaatagttctctcagtcatatactcttcaccggggaaagttttaagtacttgaatggtgtacataattgtttcataacagagtgatacagagaaatgaagttttgtggtttagagcgactacttgtggaccttgacaaataatttgacttcatcttcatatacattcgaagcagaggtttcaccaccatatagcacatttttttctttgtcctttttccattctcttttgtatgtatactgaagtttgtgagagtgatttagagcattgtctattttaaataaacagtttttttctttttttaaatcaaaccctcgaggtcagaactctgaccaagcccattatacaaaggctagtgagatgctgaccaagaggaatcaaaaatcaactcctagagctttttacatgagagacggggaaaaattgtttttaatcattcgaaatatctaaaagaacagaaaaattatccatgtactattctacttttagctttagaagggcagattttaaattttaattgggaaatttgagaaatcatgctaaaaaaataacatatggtgtttaattaaactaaaaaaattacacattataaaggggagttttatttgcacctcataaaattataaatatatcccattattaaaaaaaaatatataaacttacattttttttaaaattattcttaatatttttttaaaattttttcctcacattattttatgttaatttgaatacttattttgattttattt

SEQ ID NO: 16458 - DNA, 1996 bp, Cannabis sativa
ttaagagtgcacccatcccttgtactcaacacttcatagccaaatctaattgtgtatttacaatgtagtagctgatactcagtcatataaaatttcattttattcttcattttcacaatttgacgctaataccaactttcttgagcagtagtctcatagttccaccaattatctcctttcgaataaacattattcacccatttaacccacaaaatatttttttttgtagccacagcctaaacatactttcccaaagccgtctggttccattgaatcaatttctaaaagcccaacctccttctttctttaacctgcaaagatgattctatgaaacataaccaggacctccatgacactacaagaaaagacctttttaccggcacatttcgtcaaatgcgccgataaatgttgccggcataaagcaaagctagcctaaattcccactttcattcagggtttacttttgccgacgcatttgacgatcctcaaccaataacccaaattgagatggcatgtgaatggagctattaattgcttgaaccacaactaaggcatttgattcaataaccacatcattccaaccttttttcctttatccaactcaaagtctccttgatacgagttatttcagcaatttctggtgtgacaatcccacaactactatccgaaattaaatagcctccactaatctaccatcagaatcgcgtgccatacaaccaaacccaaatctttgttgtgcttcaaagatagcaccatcgatatttatcttgaccttaaatctttctagtttacgccattgatcactgcccttatttacatcagtaacaaaaagggaacccaggccctgcctgggattgagcaatctgccattggccaagagcttttcgagccgaagaaactacctcgttagcagaacaagacttctgttgccacagtaactcattgcgagccttccataacctccaactaaccatagctgcctctaaaatgacatcagaattattaccatttagcagagtaaaaaaccactgaaagtcagaacatgaaatattatctcattcaccaaattacaaaaagggcaattaagatcaacattaacatgcgttattggacacacaaattccataagatcgtaaaaataaataaacaataagttttaaatgtataaatgaattttttttttaataatatatattattattttagtgcgtgactagacacgcaaattactctgtgcctgattaaattgttagtctagttagcaatcactcacataattaaataaataaaaaaaaatattatacatcaaaattacaagctacataattcttctagttttgtccacattccatatttgttttttttttttttttttttaatttctatccatgtgtacacattccaaatttactcaaaagaattttcttttattaaggtggtgaaaggaggagaattttatagagggattaattcttctatatattaatattatacacaatttatatacaaaatggctctcattattggccatgatgccatccaacagtaacacttattgcctttgaaattaactgatttaattattaataatggaaatatatatatatatatatatatacacgacacgtttttttttaataaaataataatttcatcaagctgacttgatcatctacctaattgattttatatttgtttaaaatatacaaaagactttttcctttctcctctattcgttctcttattattatatctcactcaaatttgtctatacaatattttatccaatttttttattacgaatccacgcaaactattaaataattaattaaaaatattatcttatatttatctttctgcctatccatacaatcattggacagttctaatatgggaacaccataaaagtctttcatttgggttgttttctatttatggtatgttatagaatcttaattaatgtatgaaaagataatgtcatatataaaatttataa

SEQ ID NO: 16459 - DNA, 12970 bp, Cannabis sativa
cgagctgcagcagcgacggctgctgcagcatcgccaacaagtgtgatatctcaagccgaagttgaaaagattataaatggtttaaaaccttatgttatgtgtctatgcactagtgaaaacttacaagagtgtgaatctgcagtgttagcaatatcaagattgtggaaagaatcaaagggtgatcttgaagttcattcttgtttatccgaaccaactattgtaaacggttttgttgaaatactctctgcttctctcaacagagaagtgttgagaatttcaatctacattctttctgagttgatatcttccaatgaaaatgttggagaaattcttactagtgttgattctgatcttgattgcttagcttctttattaaagaatggattagctgaggctgcagttttgatataccaacttaggccaacttcatctcaactttcaattcatgaacttgtaccttccattgttcaaataatcatcaacaaaattgaggagttagacgatgatcttcaattcattatggacaccaaagttgctgctatagcaattcttgaacagattttggttggaggagatgaaaacaacaagtccatcaatgcattgagtgttatatctgcaaatgggattcctttcttagttaaatatttgagtaaggtagaaggaagaagatcgattgtatcgatactcttgtgttgtatgcaagctgaaaagagttgcaggagttttatagcaagtagaattgaattgtgtcatgttcttgaattatttcatgttgggaatgattctgttaaaggcatatgtgttggatttctctctgagcttgttaaattgaataggtacatactattttaacactacaattttgaggtttgacaagttggttgttcatgtttacttatgttctaatccatgtttttttttaggagaacattatcaaatcaagtattgcagacaattaaagatacaggagcatttagttccatgcatacatttcttgtttaccttcaaatggctcctatggagaatcaacctgccatagctagtcttctacttcagcttgatcttctggtttgtgtgtttctccttaagggtctgtttagtatcccgtattatattatagctctgatatcatgttgagaattataggattccattttaaaaccaatttggtgataagtgaagtagcctatgttaatatatatggctcaattaagcttttgagatttactaatcacaagttgttcccattgtaacttctctaggttgaaccaagaaagatgagcatttatagggaagaagctatagaagtattgattgaagcactaagaaggaaagagttctctaattctcaaagtatggcgatagacgccttgacatctcttatcgggcgaattacatcatctggggattcatatattgaagcttggttgctccaaattgctggatttgatcaaccttgtaatgctttgatgaaattagaacatatgaaaaacaatgagagagatttcatggaaacaatggtatgcatttacttaactattaattctttttagttatgtgttagtactaatcttaaaaatcttttatataggaagaagagaaagctataagttgttgggagaaaagggttgcttttgtactttgtaaccatgagaaaggttcaatctttaaagcattagaagaatgtttaaagagtagctccttagaaatggcaaagtcatgtcttgtgattgtcacatggctcacatacatgctctcttcaatccctgaaaccggtgtgaaaaccattgctcgaaaggctttgctcgacgaattcataaatgttcttcaatcatctaagaatatggaagagaagattttggctacactagctttgaaaaccttcattagtgatccaggtaagtttagtactttttaaacttgtctacatttcgatagaggttttaacttcatgtttcgggtttttagatgcaactagagcattgggagtgtatgctaaatccatctacaagacattgagaaagcttaagaggaattctatggtggtaaatgatataatgaaagcattgatgaaactcccatctgttgatgcagtaagtattatcatagagaaaacagattaaagtgaaaagtacataatttgctaacttcttctaatgttttatgttttagacagagttgtggagttgtactgaactggttgaattagactcaagttcaaatggagaagtcttgtccttgattcatctaaaaggccgagttttaagcagtcattctgatggaactataaaggtaagaataggaatggaatggaataaatttcgattgaaatagtattctaatactttaaatagcaacgaaacaaatgaatgaaatgaaaatgaaaatgttttcatttctaggtgtgggatgttgggaagagggtaatgaggctaattcaagaggttcgcgagcacacaaaggcggtgacatgcctctatgcttcatcttccggtgataaactatacagcggttctttagacaaaacgattcgggtaaaccaaccctactattatgcttgctattcttctctagttttgtattgttgtttcaaacatgaacaataatgtaaccaaaatattttgggctatgttcaataggtatggacagtaaagccagaagaaatccattgcatacaagttcatgatatgaaagaagcagtacataacttaacagccaacactaaactagtgtgctatatttcccaagggagtggagtcaaggcaagttaattttaatttactcaaaaagagtttgaaaaaacatttagggagagtctatagtacacctgagtattccagtagactcctatctagttcgacatttaggagaatttttaagtttaatatttcttcatgatcgtgtatgttatagttagttaggactacatgtaaattttgttgtactcgtgactgttttttcttatggtaagtagttgtttgaaagttatcaggtggtcttaaataactacaacatacatgatcatgaaaaaaattcaactaaaaaaccttcgtgaataccgaaacaaagaagaaagtctattgaaacacccttttaaggtgtgtacttttttataacattcaaagttatgtggtaacaggtttatgattggtctgggacaccaaagcatataaactttaacaagtatgtgaaatgccttgcaatgatagggaataaagtatattgtggttgttctggttacaacattcaggtaaataattttgcataaaaatatgaatttataaattttatgaatttttgtatttttttttacaaaaatatgattttttttttaaaaaatattttgtatataaataaatcatgtaagggtgattaggtactcttatggtataagtaagtaaactttatgctgttttttttaatatattttttaatttttttctaaattttccataaaataacctttttgagaaacaaaatcatacatttacaaatttatacttttaaaaccataaaaatgaaaattaacctaacaaaaattatgttaacacaatcttattacattaccaattgaaatgtaaaattttatttatgtttttggttatggaaattaggaggtggatttatgttcatatacatcaaacacattctattctggtacaagaaaattgttagggaaacaaaacatatattcccttcaaattcatgatggtgttctctttgctggtggttcattagttgatggaactgcaggaaaggtaactaaaatctctgtaaattaatttcttcagaataaaaaagaaagtattattgtagacattatcccacgtggaataaatggtagagaagtgagccatatataagaatatagacttctccacttattgccaattgattttgagatgaaaccccataattctcaacaagtataatttaataatggccgtaaatattttggcttagtttcgataattctttataaaatggcttccgatgctctaaatatttgattgaatagagattattttgcaattaaccgagatgttattaagagtaatttgcggcttaaatatttaagtttaatttttgattgcagataaatacctaagtttaatttttgacagtctgcaactttcgtaggtacttggccgtgaagtgttaagttattatccacgtgtcattttttatcagtatattaaaattaatttttaattaaaaaaataaaaatttaatgatgtgaatgtcacgtggctattgatttagcacttaatgatcaattacttacgaaaattcaaaaaatataacttaagtattattaatgtcaaaaattaaacttagatataaatctgtaaccaagagtaaaacttagatatttatctgtaactgagagttaaatttagatatttatctgtaactttaaattaaatttaagtatttataccacaaattactcatataattatttaattgagtttatgataatgtttcaatttttcttttttctcagatattcttgttgtcatcaaaggcaattataggatcatttccaagtggatttgatatccaaggaatatccataaacaatgattttatatttacagcctctaaatgtggaaacattgatgtttggattaaagagagatatacaagaattgcttccattaaaatgagttgtggaggaggacataccaaatttacttctttgacctcagatacacttggggaaatgttatatgcagcctcatctgatggaaaaattcaggttcaaacaattatatattcggaaattttatttacactttaaaaatttattaatgtattttagtataattatttttattttacataaaatgtatatctttactttttttctaatttatattcttaaaaaatataataaattatattttaaatattataacaaatgaaataaaaataaaaaaattaaattttattagaaaaaattaaaataaattttaaaattaacacaaaataatgtagattttattaaaaaatattaagaataatttttaaatattattttaagtttattttttaaaaaaatattagagtatatttattattttataggatgcaaatactattccccttataaattatatggtttgtttacattttcttttatttatttaaaatttccatttcattcttattcatttttctcttgggaatatgcaggtttgggatttagactagtcttgtttttatgcaacaatggtcaaaatctattctctccattaatttgttatgtaaatttttcacttaatacatttcattctactttcttatgtaaaattttcacattttcttgtaatattaatttttgtttatcgagaaggtaatttctttttctctatgaactaaaaataataaaaccagaaagtccaggccttatatatatattattttcctgtgtcttaatttatatatggaattagtgagataatatttaattcagcagtctataatcttgcttcctgtagtattttaattgtttcccattactattgtcgttttccccaataattgtcgtttttattgattcatgtcgttttgttgattattgtcgtttattgtggatagttattgtcgttttattgattattcatgtttttttaagtttatgtcgttttctacaaatttatgtcgttttttattaatcgttgtcgtttttttattattgtcgtttattatggtttgttattgtcgttttattgattattcacgttttttaagtttatgtcgttttcgacaaattattgtcgtttttattaatcgttgtcgttttttattattgtcgtttattctggttagatattgtcgttttgttgattattcgctttttttaagtttatgtcgtttttaaggattgatgtcgttttttaaattattgtcgtttattatggttttttttttttgagaaattttcgtttattatggttagttcttgtcgttttattgattataagttttttaaagtttaggtcgtttcgtcgtcttattgattattctcttttttttttttatgtttatgtcgttttcatttatcattgtcgtttaagtttttcccaaatccaaattctttttcgctgctttcctctaatctactatgtcgtttcctcccttttaaacaactctgtgttgtcgttttactctaccaataagatattctctcttttagccaattactcattgtcgttttcagaaacaacatcggtcattttcatgccgttttctcacactgaactcagtttcacgattttgtccacactaacaaataattaactagttgacacgtgtcactatcttactttttcctaacggagaacaacaaatcaaattccgccacgtgtctttcccactccctcagtacggacataattacattttagcccctggaaatgaggacatcgtgtggatcgcatgtcaccacaaattggtaaaatagcaaaaaaataaaataaataaataaataattgaaattattatttaataaataaaaaataaattaaaaaaaaaaaaaggagagaagagaaaaactccatagctaacgattcttggagctcaatcttcaagctcatggatttgtagtatctcagctaatcgaagaagatgaattcgatgtgaattcttcaaaaaccctaacacaacactatggaaactcttccgtactcgatcggcgttggcaagtactacaacaacaacaactccctattactgagtcgtaaagggagaaaccgggtcaactcgtccaaacctatcgtattccgacaagcactgtgtttttcctctatacgattcaagaattttccttcttctaagctcaatttttctaatcttcgttgctctgtcgttgccgcggatcaccatcatcacgaggaagatcgtgatcatgaccttaaccatcatcatcaccaccattgcggcgattgcggcggtggtagttctgagctgacggaagctcagaaagcggttattagattcgctaaggctgtgaaatggactgacctggctaatttcttgagggaacacttgtatatgtgttgcggttctactggtttgcttcttgcagctgctgtgtgtcctcacttgcttcccaagacggttgtgaagcctttgcagaatgctttcattctcgttgcttttcctctcgttggggtaaaaattttaattttgagtagcaagattttgtagttcaactcataacatgcttgaattgactaacatattattgaaagttcacaaattttttatttggtcttgcataattgtatcatctgtaacgtttatatcaactgtaatttttcgtttgactgttattaatctattggaatgttgttataaatggaaatttaagctgtggtaatttgctatatcatctggggttttcatacagcagaatgcttactaagttcagtatatttgatttttgagataatctgtctttgtaaaaacaattgtagtttgaagtgcaaaacactatgcatttatataattatggctaattaggacttctagcctcctccactgaaatttgatatatacccaaattgtgtatcctaaactttttagaccgttaagttggttagattcaagaatttccattcaattttactaacggggctgtatgttgacgaaagttcgggagccactattcggtacatatcaaaatttggaagatactttttggtacacagacaattgtcatgttatgcctctattagtaaaattgaacggaattgaacaaaaatccttaaattcaacaatttcaataatttggggcgaatttttaatggtcgatatataatcaaacactatgagtttgattcttttcctggtttctaaaattatagtaccaattgattaagatatgctcaacttttgatgtaggtctctgcagcacttgatgctcttatcgaccttagcggtggaaaagttaacatccatgtattaatggctctagcggcctttgcttcagtatttatggggaatgccttagaaggagggttacttcttgcaatgtttaatttggctcatattggtaacccctgcacaatcacattttagtaaagcttttttttgctttggattgaaaatttgattatataactcatgggatgactacagctgaagagtacttcactagccgttcaatgatcgatgttaaagagttgaaggaaaatcatcccgaatttgctctggtgcttgatatgactgaagatagacttcctaacacagccgatttggcctacaaaagggttcctgtacataatgtagaagtgggatcctatgttttggttggagctggtgaggtatgtgatgctaattttattcatgtcagttttgtttgttggaatagtaagctataatggtcaaattctgaggtgaaactagtataaaatagaagtgattgttttttcttgggacttattctctgaaccagtgaaagtttatctgttgattaattagctgcactgcatgttctgttttgaaacttttgacattaacatgagttcatgacgagcattactgtctctcaacactagaaatctatcaatatgcctggactaccatagtgatggctttttgctgcataaatgatggtctgaaacaacttcaaggctgagaaagttacggatgtgacagactatcatattatgattcatgatctgaaaacattagtcctctgttgtaataaatgtcaagagtttacatatcaatattgtgatttttacataatgtcattgaaaaagaaagaaaacacacgcacatgcgcgcgcgcgcacacacatatttgtagctttctgaattcatttaacaatatgatctagctttttttatgttcttttcatttcatgtaatttaatcatttattttccctgcaagttgcaaagcatttttttttaaagttgtgaattagtatataacggagaccttatatgaaaatttaatttatcaacactataattgatacttggaacgtatgcatctttaataaaagctggtattttgattagtctgtgcctgtagattgtgaagtttttcaaggcaatgcaaccattactatcgaacacttgactggtgaagtcaaacctttagagattaaagttggtgacaggattcctggtggagctagaaatttggatggtaggataattgtaaaggtatgtttatgataattgaaggccaatttgtacgtgtctgttttttttcttctgataattggacctgtaaaacatagtttaaactgattgttttttcattatacaatgccttgctctataatctttagttccacaatttaagaaacttactgatttgccaataccttgcgaaaatggatgattgtttagaagcatgatgtttgataggagaacttggctatttattaaatttataaagattatggtgctagtcgtctgtttgtttataaagaaggtgctttggtgctgaaagaaatgaggtggtgatacttttcataaatatccttctgttgtttttcattctgttaaaattgttcattattcaggctacaaaaacatggaatgattcaacactcaacaagatagtgcaattgactgaagaagcacgcttaaataaaccaaagcttcaaaggtggcttgaccaattcggtgagcaatacagcaaggttgttgtagtcttgtctgtagctattgctctcattggtccatttctcttcaagtggccgttctttggaacatcaggtagtgttagtttctatggttccctcatgaactctaataatatctattacattctctttacatgccccgttacgggattttaaattttatgaaagtcgtacttttacaatgaaaatggtccatttatttgttggtttttatgttcagctttaagatttttttttttcattctcaaaaaacttgtttttctttaattcataacatttctactttttgctaatttaaaataataattgcttcttgttgcttaataaaaaattgcttcttgagtttgttttccaactagaagttgtcaagatagaataggaaatattcaaatacttgatctgttttctttcttatcttgtttcttagttcttggctttcaagaacttgtgaattcctatcatgttgctctttttttttccttcttaatttgcactttcagggaaattttcatcttctgtttgtttgacattggttattcaatttagcttgtagaggatcggtgtatagagcattgggtctcatggtggcagcatcaccgtgtgctttagctgtagctccgttggcatatgctactgcaattagttcctgtgcaaagaaggtatgttttggctggagtctagaatatctgaactttgcttgattttttgaatcacaagtttttaattctttttcataggggatattattgaaaggcggacatgtgctagatgctctatcatcgtgtcacaccgttgcatttgacaaaaccgggacgttgacaacagggaaactagcattcaaagcaatcgaaccaatttatggacatcaggctggaaacagtaactcaaattttacaaactgctgtatcccgaattgtgagaaagaagctcttgcagtcgcagctgccatggagaagggtaccactcatcctatcggaaggtagcatcactagaccatataatttactttttatgctagttatttgggtctgcaatctttacattatctactcgtattgactgtaacgctgctggtttgggtttgcattggttgagaaaactaaatgagcaagatcttcatatacaaaatcttacccagaatccacaaagactcaattaaagcatataacgagatatccttgttttgatttcttgcacaagaatatgtttgacagcaaaaatgtcaaacccaagatgaacagaaatagtagtttctgtcctttaatgattttataatagtcattagcaagaaaacacgcaggcatataatgtaacggtggtttttttatcttttattttcagagctgtggtagaccatagtgttgggaaagaccttccttcggtctcggttgagagctttgagtactttcctggaagaggtctcattgctacacttaatagccttgaggtaagtctataaagattcacacaaattcttgttggtttttcaaaatagtgacacttgtgccatttttctggtctaaatatatatggcaatgaacacatatcaatcatccaatataagagtataattgatagatgtgccaacatttatctatttgactctactctatttattattatgatgatgattgtttcactttatatggttttatttatttttattcatcaagtgctttacattcgtttcaagttattacagccagaaaggggagattgtaaattgttgaaagcatcacttggctctgtagactttattacatcacgttgtaaatctgaaggtgattcaataaagatcaaggacgctgtgagtgcatcatcgtatggaagcgaatttgttcgtgctgcactttcagtcaatgaaaaggtgaggtttcaaacaacaatgctatttcagtctcgttcataatctgcaataccaatgcttagttcttatcattatcattacctaaactacaagttagaaagaagcagtttccttctggtagaatcttatgatttgaagtacatttctaaattgaagttcttcatgggtatacaggtcactctaattcaccttgaagatagacctcggcctggagttgtagacgttataacagaactacaagagcaaggaaagcttcgtgtgatgatgttaactggtgaccacaaatcaagtgcatggagagttgcaaatgctgtgggcatcagtgaagtttattgcagcctaaagccagaagacaagcttagtcatgtgaaggaaatttcaagagatacggctaagtcatctggtcagcactctatttcactaaaatatcttcacatcccaatttttatagctgatgaaaaaccatgttggtaacactctaggcttggattttacatcacagggggtggtttaataatggttggcgaaggaattaacgatgccccagcacttgctgctgccactataggaatcgtcctagcccagcgtgctagtgcaactgctatagccgttgctgatgtgctattgttacgggacaatatttctggcgtaccattctgtatagccaaatctaggcaaacaacttcactggtaccttgctagtctctagactctagtaacacgtcttcttatttgctttcgaaactgttattaactccatgtatttcgatgcaggttaaacaaaatgtggcccttgctttatcttgtatcgtcatggccgcgcttccatcagttatgggatttcttccactttggttaacggtaagtatctaaaatgattatctcaaatctaatctcatttccagttatgttttgtttggttttatacataccaactttcataagctactcaaatctagagccttcccttgattagaattttatcatgccattaaggtgttgtttgagtactaatcattctaacaaaatggttgacaaagtcgttagttgaaaccaaaccaaaaataaaatggaatatttaggtgcacatatcaattattacgtcataaccaaacatgatctaaagagtattaatgttaggcatcttaaggtactcaataccatatcgatgtaatacgttgtatgtagatagtgctttctcacattatttacttaatagaagacccgatattgaattttactaataacaatatatcactcttttactattattattattgtgtaggtacttttacacgaaggtggtactctactagtgtgcctcaactcaataagagctctaaatgaccccacatggtcttggaggcaggatttttggtatttgctccatgaactcaaatctaggctcaaccttttaaaacaacaacaac

SEQ ID NO: 16460 - DNA, 9132 bp, Cannabis sativa
ctctctctctctctctcttctattgactgatttttttttcttcttctcctcctttattagtcttattccaaggactctttaacttcctaaaatccttaattttttctaaaacctctaaaattccaaaacactctccttgtgccttgaaaaattcttccaagccactttgacttttttcaactcaattttgacttttcttgagttgtaagcaacttaagttgttgagcttgagatggctagaatgaagagaagcagaagattacctggtgagtatgattcccatgtggctcagttcattagcgctaagctaaatgtgtctaattctaagaacttagacaaggtgtgtggtagaaaagtaatgacaactgagcttctcaaagctaccattaagagtgacaatccaagagatagagcctttaaagcttaggcctcttgtgtctagtacccttactgagcttcaaggtcaaacaatccgaaatgattactgtcttcctaaaactattaacggaagtctcggcatggtgctccaaagggttctcagaatacttgttgtagtgtctggtcaagattccacatgaatgcgggtgcttacttgcccttgcatccatagttcatatccataactaatttcttcggtgtctgcccttagcagataaacccaaatggctataggattcttgccaccttctgcatattctaccaccttaggaactagcctattctatctactcatgagataaactttctttgcaacttgaaaataattctagcctacaaagatcaaggcttttaccacttccatcaatttgcctattcatagaaaacataacaaagagtagttgtagcctttactaccaagagtacttctatacttctatccttccgtcgagatacattaccttacaaaaattggcccttttaaaagacctactgttcttattgacatgaagagaagagctgaggccatgttgcttgaaatcgatgcatgggagagagatggtcaaaccctctttggtattgaaaaatcttcagaaggctgggttaatcatgtcatgccaaagaatgtatgctgagactagtttccctaaagaatcttggactatgccactcgagcaaagtgatgaagatgcccatagtgctactgttattttatctcaaactgtgataaaaaggtgacttctgttcgaaatgacacagaatatttagggagaatatctgtgttcttagaccagtatgatagagaacttaccttcgttaagactactccggagaaggatgggcaatcaataggtggctgacgctccatattgtgctcattatctttttgtcttgtttttcttttgttgtaataactttcagtctttattctttgcagacaatatgaggttcttagctgccatggcgtcttgtttgaacttgaagaggaagattatagtgttaaaggaaactgagcctttggcaagggaaatggttcaaagaattcctattgcctctaatattttgaagaggaaggtcaggaagaggggtagaacggctgatgccaatcctcttgcccaagactctggtaaggagaaatttaacactgctggcgctgatgagagatctttgattgacctctctctagaggactctaaacatggtaatttaaactcgagtttagacttgatagagaaattgcatgagcaaggctcctggctccatggaaacactgaggccctgattggtgctagggctgagaacattccattgcagcggttggttagcaccaagcctctgcatgtgatttctcaaagatacttctctgacatctttagggtcatttctttgtcttgtctccttctagcttaaatttttttgttttatcatcacctgacagcattttcttatcttcaagcttgtgttggttatgcctacaccatggataacaaacacaagaatgtggtggagcttgctaagaagcttggggtcgctaaagatcgtgctgttgctgctgaaaaccaagtgattgctctgaaggagaaggttgattctcttgagagtgagatggcctaacttcaagaagtggctaatggtaccaacacttaggaaagtactttgaagaagagcttggtagctgcttgaaagaaaacttttgatcttacagattcctctcatgatgtcctggataagcagactgctatggctgatgatctgagagaccaagtcaaggtcttggagaagaaagtaactactcttgaagaacgggtcctccttgatgttaccttctacaatggcatgtgcttcaatgccatctagacgacttgggctgctaatggtggaccaagtcatttagttggaaaggcttccttaacacacatgtaccaaacttcaacaggcagtgtgagtagcgttttgatgcaaaaactctcaaggaaatcgatttcactgtgaatggtggtgagccagttgtcagaaagactacaggagttgaaggctacaaccctgagcatcttgacttccctccttctactggtgatgtgcctcctagagagagtgaaggtagggaggaagctattgttgacataacatgcttccaggaccttctttaagcccattcttcttttttatttatagcatttagctttagtgtgttagttggtcgttcccggtcagcctctcaatgtggataagccttagtaaaatgttattagaattttattttagttaaatcataatttatttccaacttaataaaatttcaattccaatgcttattttttttgttttactttatctattaccgcttgactgtttaacaatttcacaatacacccatgtcttaagaaactcaattattgggattaatgtcactacttcttaaagttatctttgccatgagagtacttacgcagatgtgcaaaaattttatttttttgaatgcttatgtaacatatgactcttatataccataacataatatatgtgccccccaagtgatcaaagaaatgtcatcattggtcacttgccataccacatccccctgggccttcgtgatcatgactcttgagtattgttacacgtgtgagtactctccacttattcgaggatttgtgggtggcaatgtttaactcacttaataaacaattgaagttatctcaagaccaactcacaagctttactcagcacttaaagagtgttgccaggtctgtgagctgtaattgtttaatttaaatgaagtacaaaaaaaatttactcaacgctttttctcaacaaattaaatacaattacattaccgtgaactaagttgaaagaaaaaaaagcacactttgaagtagtagctgcataatttcttcttcatccaagcttagctgaagtgatcctcgctaagctaatgccttatttgaattttaacataggagtcataccttagcgatggacctattaacctagggatagctttgtcacatctcattagttaaaaggcgatcaattcacttacttgaagtaaggtgaatatcactatgaagtgagctattttggagacagctgcttttattggtagtaccattgtagatgcacctcgttccaatgccttggtaccggcactggattcaagttatagtcatagcgtgtcaacttgtaagttttgggttcaagcgcttcacccacgacttatggcccttcccaattaggctcaagtactcatgctagtacaacttttgttttcaggaatacccgtcataacatcatgtgtccaggcttaaattcatatctttaaccttggattcgtaatgttttgtgacctttttctgatacaccacctttctaagcttaaacctttctctgatctcttcaattccatctagggattcaacaagtagttgatggttggtttgctgatcgtatgtaagtcttcgatgggatggaggtgtgagctctacatgtgtcatggcttcgtacccgtaggtaagcaaaggaagtgtgacttgttgctatttttttagttgtacaataggcccatagtactttgggtagttgttcaggctaattccctttagcttactctagacatttctttaatgtatcattaagagtttggttgactgcttccacttgtcatttgcttgtggataggaaaatgcttggaaactcttaatgattccatgtttgatgtaaaaattcgtaaagaggttgctattaaattattctccgttgtctaacactatcttctgtgggagtccaaactaacagatgatgttcttgaccacgaaatcaagaaccttctttggtgtgatggtggctaagggatctacttcaacccatttgctgaagtttttgaccgccagcactacatactgaactctacctttccccttaggcagtgagcctatgaggtttccccacacaataaatggacagggtgtttgcatactttttagttcatttgggggtagctctgggtatcttggagaacctttggcattttttcacattttctaacataatccatcgagtcttctatcattgtcggtcaaaagtacccttgtctcaagatcttctttgaaaggctttgcccctagcatgattgccataaaagccctcatgtacctcgacatgagtagtttagcttcttccttcgtgacacacctcaaaagtggcattgagaagcttcttctatacattaatctgtccatgatgatgaagtaagctgctttcctaatcaatctcttagctttgttctggtgagttggaagaataccttgttctaagtactatgcaattagggtcatccatgatggagtgttgtcaatcatcaggataggctatgagtcttcattaatgctccatttggcaaggtattcatcaggaactacactaagagtgtcaaaatttatagtgctagctagtttggctagtgagtctacattggcgttctgttcacgcaacacttgttggatggagtagtgcttgagttgggctaataggtctttagctttgcttaagtatgcgatcatgtttgaccctcgagcatgatactcgctaagaatctgattaacaactagctgtgaatcactgtagatctctagtgatttaactttgattgctagtgccaatcgcagtcctgctaggagtgcctcgtactccactttgttattggttgcggtgaactcaaactgcaaagccctgtgaattcaaaatccctcttgagtaactaagatgaggcaagcaccagaaccatgctcgttggaggagccatctatatataacttccagtaaggtctagtgtcttcctgagttgtagtctcaggcgtgtggatctggtcttcacatatcatgggattgtctctgttgaggccagtgcattcaacaatgaagtctgctaatgcatgtcctctaattgttgttcgaggctagtaggtgatctcaaactgacatagtttaacaacccaactgagtaggtgccctgatgcttctggcttcatcagaacttgcctaagtagttggtcagttaacaccttcactgtgtgagcttgtaactatggccttagctttctagaggccaggaccaagcagtaggctagcttctcaatgggagataccttgacttggtcccaatgagacgcttgctgatgtagtagacagggtgttgtactccttcctcacgcaccaaagcaaaactagttgcatgctcgatgatttccaagtagatgtatagttcttcaccatctattggcttggataggatgggaggcttggctagatgatgtttgagagcttgaacggcttactcgcattcatcatttcattcaaaccccttgtttcttcctttaaataaattaaagaagggaacacacttgcctattgacttggagatgaacgtgctaagtgcaacaatccgtgcttactcgcattcatcattttatctgtgacggtgacttcatgtcttgcaaggccttgatcttctcttgattcatttcaatacctcttgagttgataatgaatccaagaaatatttttaattggacgccaaaggcacattttagaggggtgagcttcatttaatattctctcaagatgttgaagcactactctagatctttgatgtggtcttcggatcttttagacttaaccaacatatcatcaacgtagacttccatattttttctaatttggttgtggaatatacggacgactactctttgataatttgcacctgcattcttgagtccaaaggcattactttgtagcaataaagcctaattccagtttaaaaactcatttgttcttcgtctaatgtgtgcatactaatctggttgtagctagaataaacatccatgaatgtgaggagttcatggctggctgtcgcgtccaccagttaatcaattcttagtagtgggaaataatatttagggcaagctttattgaggtcggtgaagtcaacacaacttctccactttccattcagtttaggcacaagaacatggttggatacccaaaccaagtagaaagcttccctactaaagttattctctcgtagtctttcaacttattccttgagagctttctaacactctttgtcaaggagcctatgattcagttgtagaggcttgaagttaattttgtctatgttgagggcatgacagatgacttgggggtcatgaatcccaatcatgtctgcgaccaggtgaagatgtcttgatttctcttgaggaaagccatgagcatctaacacaagacctttgttagatttgttccaatattgacaatcttggtgatcgggtctgatgtgttgaggggaagttctcggaggtccttggtcagaccaactctcgagtcaatttccccaacataggggtcaatgtcgtccctatcttgggcacaccttcaagtggctttaggtgccacctctgtcttctttatagtttgatctctggaggtcttcgttgtttctctggattttgtgggagaggccttgctcgtcccccctagtgccataacaatagtggaggtcttgttcaacccctctaaatccgtagcagcagagaaggtcatcttggcgagtgataacgatgtgttgtaacactcgcgggcagttctttgattgctaaggagacaacagataccaactgccattgggaacttgatagacaagtggtacactgaggatcactgctacaaaaaagactttttgctttagtttttaagtgacatataaagaatttgcttcggcttgtgtaaccaacgctataaccacagacgcaaatagtgatattttttacttcggttgcaaaaaaaaaaaggtttttgcttcgttcataaccaaagctaatattaatacatttgacgctaattgatttttgcttcagttatgaaccgaagcaaaaaaataaaaaaaagttgaaccgccacatcaccaccaccaccatatttacactagaaatccaaaaaaacagacaaaaaaaaaaactatatgtacacgaaaatatatacaaattcaaatttatacattatttaactaacaaaaagcaccactgcaccaccaccataccacctcaaccctagaaacaaaaaagccaacatcagattatagaagacagatcgaagaaacatagactcattagattaatattacatgctcaatagtatatagatagtcaataataatgtctattaactacattacatttcatttcaaggaatagagaccaaagccaaaccaaagccaccccactccccaacattgaacaaccatacaagccaatgtaattacaaatatatattgtctcttactgaaagtattttttcgcatgtcatgtcatgcttatattctataaaacttcatagtactagtcaatagtagtaatcccttgctcttcttgctaggtgtgtgtgcatgactatggtaaaaatgcaaactctttatttcatacatgtgcaccagctcggcttattatgtgtcaatttatacccctagaataggataaactagtatttaatcataagcagttatatgagtaaaaacgctctctgcctatatagttaaaaattgcacccattgagttagattcaattttatttgtgcatgttataagggtatatattgttttccttagtatgtgaactgtgaaatcaaatattattttacagcagaaattagaaaagaaaatcatataaaattaacaaactcaaatgatgaaactcttctaaccaagaaactatcaactcattagacacaaatcattatataataaggaacctagttgtcactgaaaataatttttttaacaaatgaatggaaatcttccaattaaaaacttataattaaaaaatcaaatgaaaaaagaagaacgatagtttcatttaacaaaagtttttagtttctccttaataagttaattacataaaacttttctaactattaccgaagaatgttattctttatatataatatatcatataattataatagttgaataaaagtattgacaatatctattaatctaaaacaaacatagaggcaaaaaaatataccatatttatgttaagtatttatttgtacatgacaaaatttatttaattaatccgaactataattatttccattaataatttttccattaataatttttttttttttaaaaaaaaaaaatcatataagtattagtgatataaaacataactatttgctataaatttaaacaaagataatatagaagagtagtttggtaagtgtaaagatatacacataatatagaaacaactagtagcttttattttgagttttgacctcctactatctactcccaaagaaaatagaaaaggatcaagaaaaatgacacactattattgctgcaagtcagaggatagctaatagagcatgatcaaactatattttccagtgttaaaaagtaaccaattccaatttattggtcattttaaattagtatattgtgcatagaattgatatgtccatttcaactttctaatttgaaaattagtggccaaccgacaattagaattttgaaccaaaaatcgaaaaatggaaaagaagatacaattgatagatgttacgtgaccagtcacgtatgttaattttattttagtttttagtttttactttttttaatatcataattttaaaattaataatat

SEQ ID NO: 16461 - DNA, 3858 bp, Cannabis sativa
  modified_base (2793)..(2815): a, c, t, g, unknown or other
acaattacatttatgctcaaaacttctagacttgttcagatggtccagacttatgacataaacaaatacttgaaccactaatagtgtatcattgcagctggcagcattggacttcattgcctgtgcaacatcagatgtattcgccatgaccgattcagggagccaattgtcatccctagtgtctggatttcgaacgtattatgggaatggtgatgcgcctactttgagaccaaacaagaagagaatagcagcaattctatcagagaattacacaatagaatggaagagttttgaggaaagagtaaaaaagatgattgaggaaggtcaaagagtccgtgtgaggggtttaggcagaagcatttatcgtcagccaaggtgtcctgagtgcatgtgcaaaactaattaaccatatactttgttttatcttcttttttctttttctttttgttttggtaaatatcattttatgctctctattttgtaaaagttactgattaaaccttctgttttattaaatgataaattaaacactatattttgtaaaacttaaaatttataacctaatctaaattttgacgagaatgattacattttctttatctattcgtgctagaaaaatatctttaacttgattagattaaaaaaatgtatattttgtaccatttttattttggttcaaatgtttttttttttttatgtttttacgaaaaattctaaaactaagttaaaaatagcatttatatttattgtgttttaatcacctccaaaacaattaagaagagagatgtctattggtgcaataaaataaactaactaatcaagacaatgaaaaacattaaatggaaaacagaaatcaaatcacacaaatttaacgagtttaattcaatcaatttcttggtagtagcaactgtctacttcccagatagaacaacctttggctttaatctttatcgattcacgttggtgttacaatggtgattatcaccaacaactatgaactcacaagacgatcgaattctatagcttttacttctgtagagagagaattttaggagaggaggaagaataagttctgaaaagttgttttctatttgtacaagaggttggtatttaaaggcattgtccaaagtgttggaaagatagaattgtccccaactaagttaattgctgagattgaagctttaaggaatttatcgtcgaaacacgagaaaaacaataaaatggggaaccttcctgaaaaaaggcaggtcatttttctacgttctacactagtaaaaatggtaggccatttctatagaaacggcgtgtggtttttcactacaaaaaaccaaaaactctccaaatcgacctaaaacttccccaaaacttccataaaggtccaaaacacctatacatgccataataaaccattcgaagcaatgaaacctcagaacactcaaaaattctaaaatcaccattgttgaatcaagtttgagttcatgagctcaaacttggtgaaatccacaaaaaaacacctaaatacaacccaataagcttaaacaacctcaaaataacctcaaaaatttacagcaaaacatatctaacctaaacagcaactaaaacacaaatatgcatgtctaacccaactaaaacatactaaaattaaagaaaaattagggttaaagcttaccttaagatcacacctcttgaaatcttgttacaaaccctagaatttaagatttgaaagctaaattcttcctggttcttaggcacaaccgaacaagagagaaggagagagacaaaccctaatttttctattgtttttttcttttctcaatttcccaactaaagacaatcctaatgttatctttttcttctatagtggccatctgccaacaagaggaagtgtcacctaagcctcaaagtcaaaatgactaaaatacccccacttacataattgaatggtaaaatgactttggggtaaaatagtctaaaactataatcacgactaataccgacattccaaatatctaactagatcgtcttgctattctaaaaatactaaatcatactaaagtgactctataggccatacgttgtgttccactgttactgcgcataaaagtatgaacaatatcaaattcatatataacataaatggcacacctagaattcaaatatatctcaaaaatcataaaaataataattaaaagtctacttgtgaaattagaccctaactacctactaattctcaaaaataacaaaacggtcattacacaagtactcaattatagtgtgcaagattgtgaagaatccaaccaaattgaaggagagaagatctaagttcagatcttgacaatgctctactacaaaaaggattcaatggctagagatcttaatggaaggagagattattcttctaattccatcgatgtaaggatttcttaatctcttatgtatttatttcatcgtattagaaaattcatatttagggtgttagattatagaatcattgtaatatccgcttttcttgaagggtaattaattttctttgtacttagtttattttgtttgctaatggagataatttatcattttgaatatttatgagtttagtggagtatgagatttttttttgtaacaataaaatttcttttattttatttattcttatttttattctattttgaggttatgtataatgttagataaataattaaattatttataaatattattataggcataatattaataataatatgggtaaatatattgtggcatattatctagtttattattattattattatnnnnnnnnnnnnnnnnnnnnnnnttattattattattataatttatgttagttttatatatatgtatatatattttttgttttagggttaagattagagctgaggatatatataggatgcttagaagatatttttagggtttataacagagaaataaatttaagggaggaggtggtgctatcgagcgataccgaaagagagagaacagtgagatttcgagtttgttgagtttgagagttttttggctgctctagattattctttgagttttatttcatccaagaggattttagatgcgattagaaggtttgaaatcgcacctttcgacagacaccattatttacgttcaaaatatcgttcttaaaacaaactcggattcgaacgtgtttaagttgttttggagatcaaaggaggttgcgtttaattttatgggaccccaattatcaattttgacatgaagaaacaaagtaaagagctttgaaacaaaaaatcacagttttggctccatatttggcggtgtaccgtgtttggagaagacgatctcaaactggccattttgagacaaaatattagttgtatttggcttctttgaagttctgggatccttgggaacattttccaatcaaaaagacgcatcaaaacggactatggaaagagtttggatctcgccggcgccggcgccagagaagacgactacgccgacgaccacgatctgggtagatctgaggtgtttttcccatctttttttttatatttcaattctacatattattttagggtgtttggtgaattttgataaatttatgaatttatttggaattatttggtttatttcctaaattaattataaaaatacttaggttgctcagaaaaatctaactttattttctatgattggttatggattacaaactattacaaaattaatagattagatttttggtaaattttgtatttttcatgaattatttgtgttatttctaaatttaattatgaaaaatacctaggttgtacataaaattgaaagttaatttttagggcttattacatactataaactgtgtta

SEQ ID NO: 16462 - DNA, 7975 bp, Cannabis sativa
cgagttacataataagcggtgaattacgacatctacaaagcacaaagtttcacacacaaaacccagtaagaattaagacatttggtacaaagatgttgatgtacatccaagagatactgatggatgatcatatggatttactttctcaaaaccttccaatgaattcaatatagtttaatcagtagtttctgcagcaagatacaaaatcttccatagcatttactcctacacttccaaataatctaaccaacattcatttgcagaagcagtaacttataattaccttgtacactgcaccaaaaccaccctccccaagtttgtttgcaggatcaaagtttgttgttgcagtctttatctgtctcaaagtaaatatcccagtttgcagatccatatttctgaattctgttacaaatgtggaagagaaataattgagattcgaaaaggataaaattcgtctctaacaataccaaggaaggagaaagcatttcagtcttgtatgttttttcttagataaaatttaaagattgatttgtgatcatgttatttatacaacatggacaaattctcagcatccattggtgttagtaacagttggactagaagaaatctcttttgaaattatgagctgagtaattatagagtttgaagttcatacctttgtctgtggaatcttttcctccaagccaacccttcctcctcagaatgactgtgattagcaagcaaagaaataaagagctaaccaatatccccacaattaacaggacattaatctttttacttatagctgaagggggtgaagggggtttgaagtctgcaaaagaatgaataataatgttaaagatcatatacatatacataagcatatgtaagtttgacagtgccacaagtcttttctccaaaacagcacttactaggatctactgaaatggctgaaattagaggaccataaaaccctctttctgggattcctgttgtcccttttccagcccagtaaaaccgaatctttagtgtattacttgtgacaaatactgtaaaattcttcacaatgggtttaccaacatcaccagcttccttttctatattgaaatctttcaggactaacttttcctatatgcaaaagagttaagtgaataacttactactcacaattacaaacagtgaactctctagtctctaccatactgtatttgtgggattttagttacctggatatagacatcgaaaatacgctttccaagactgatgaatgacttgtcattagtgaatatgatctcagcaaagtgaagctttacagtgtagtttccattaatgagacagagtccatagtaagtggcagagagaggagagacgcgtgctgttgtgtataactcggaaatgggccttgagacgttgagagcagtagtgttggtcaaaatataggtatcgtcatccatgtcattgtcgacgaagttccctgtgctgctcaacgcccagtcctggcctgagtaatacattgcagcacctctttgttccctatcagcttcataagtcgttccattgatagttacttcatttccgccacaattaatgtgcaaagaaaaacgatctgtttcaatccgaaaaaataacatcaatggcccaagatttgcaaggttttaaacatcccattataaagcttaatgtattagacaagagtacttttcattcatttaccaattctttatttccatgaaatgctataccaaaatgaggtggtgaattgatgaactttcttattgaaaaatgcaactttgaaacaaaagtaaatcttcaaataacaaggctaaatttatcatgctatatgtcaaaatcctaaataggcacattagaacattatcatgctataatgtcaaaatcccacaaccatgattggcagtaccgacacaaagttatgcacttaccatgtttccccgaagaacatggaaaattctgtttgaggcatgaatggatttttctgcagaacacacacttcttatgacttggaggtaaaccaacttttgataagacttactaaaacaaaagtaatgataaatacagattgagaaggacattaaactatgtagaaaaaagtccttacagtttattagctgatgaggagtagccttctacaaggtttctgaataaacacagaatgtattagtaaccatagacagaatgaaattaagtagataatagatatcgctattcgttacttacacacttcctcggggacattcattaggacttgagttatgccaagtgaaattgttggaagacatatccctgcaaaagaatgaaaaaagaagtaaaataaatagataactaaattagaaaatcagtagagtgatgctgaattagtattttaaacatgaaaaaaaaaatcatgttgtaagttatgagaatttcatcctagaaactactaaagttatgtaactggagccagaaatcctagaacataaggcgatatatgaattgaaaaatgaaccgaagaagaaatcatacacattgtcattcttagaaagcacccagtttggtaaacttccagtaagcttgttccctgtcaaatatctaaacaaaagaaaataaatattatgtcgcgtcacattaataagaatggggtgatatgaaagtttagatcattcttctggcttacatgtaatctatttttgtcagttgggcaaaagaggcagggatttccccagtaaactcattatagctgagatcactataacgatatgacaaagcacgaatcaatatccagaaacaatggaacatgaaatggaatgggatacagattcaaagtgtaatagcccaaatcagtttctataggtaataccacactgtcctatatacttctttgagtacttacaggcttttcaagtttgtcatttgtccaatatagtcagggatcttatcatgaattaagcaattcctcagtgtcctgtgtcacaaaatcaacgttttcattctatcagatacaataaggctaaattgagagaactaaaacattacaaaaagctttggtaaggagagtccaactcacagtgttttcattgattccatcttaatcaacggtggaaaaggcgacccttttcgtttcaagtcacttatcctcctaacattagagaaaaagctcagtcatatatatccatatgctcatataattgaaagaagagaacagtaaataatgagagttgcatacagatcggttagttttgtcaaggcggatatgctagaaggaataggcccctcaaaggaggaaccctgtatatgtctgcaacatacagtaaaaacctttggatcagcaaaaaaaaaaaacttcactataaattgaaatgaaaataaacaattagaaacttacagtttttcaatctttgtcaactttccaataaaatcaggtatccggcctgagaaattattgtcacaaatcctcctaaaatttacacaaaaaatagttcaacatggatccttgaacatcattatttacaaaactaaattatcaaattctaacaaaacaaaaacatatatttgtggccataaattagacaaacttacaaatcagttaggttgatcaacttggccaattctactggcaacactccagtgaaaccatttgaagatataacactgaagaaaggtaatgacaatttttggttaaaaacaacagttaaaaaatagtaatgaacgaaaaagaaaacgatttgaggcatataataaattacagtttctgcagatggaccaattttccgatttctggaggaatagatcctgaaaataggtttccctcaatgctcctgtagtttcacatgtatcatctattagtttttcttttcagcaataatttctacaggaatatatatgtatatgtataatgtatatgtacattaatttagttggacagtatcacaaaacaaagaacaagttagttggagaaagcttctttgaaaaatcacatagttccaataaaaggcttggcttttcctttctacaaaaaattattctcatttgtaaatttctattgggatgaaaaggttggataagttttatgaccagagatacacagttggaaaggagtgtgtatctcaaataatattaaaatcgaaatgaaaccaaccaactcttttatactaaaatacactattaacaacaacataaaattttgacataaggactcaacatacaggttcaagagagtggtaatattggttagaacttttggaaatggaccagacaatctgttccccataaaagaactgcatacaaattcaacaaaacaagaaattagttaacttccttataataagataaaacattgaaaaagagataaagtgtggttgtttacaggtcagtcaagcgcatggaagaccatgctcgaggaacagatccattgaggtagtttcggctcaaatccctgtaagaggagaggaagcaagcaattagcaaaactggtgaggactgtgaattgattaacagataaagtagcataaaatggaataagtttaaatcagttcatatcagataggaattggatcactggtttcactcacaatgatttaagatgaggaaacttggcgaactctgctggaaccggagctgataaattcattcccttcaaagctctgcaatgtcattttcaattaaaagacctttataagattatttatatctacataaaatgcatattttttggcctaaagttgctcatttatagcttatttaatcatactttgttcttaattagtccaaatcaacagaaaatactactaacacaactatctataataacaccagtcaatttaagtgaagcagatcattgtgcattagtgaccattttcatatttgatagatatgttttcattctaacatgaaaaattagactgtgagacagttgacttgcagtgactagaataacaccagtcaatttcttatgaactgggtcaactttccattccattggagtaaactaagagccaagagggtagacttttatttgggtgggcccaccaccaagagcacccaaagcttttcaaaaggataaaaaaaacagttaataacatgaggagccaataactacaactaaattgatgtcgtactagaaatgaaagaagtgaaatcacactcactcacatctactcattaagatattatttataattatgatactaatttaatagatatatatatatataattttatcttaaacaaatgaacatctcaaattctcaacagtataaccccacgtgcttttactaaattctcagaaaaaaagtctcaaaagacaactcattttgcctcttctctgttcacggacatgcccatttgcacaaatccatagtaaaaagttgcagaaatataagattaaaaaaagcttgggttgaccaagaaccaatacaaattcactccaaataaaatattgaacaaaatagtatgatctgtgagaagagaagtgaaagagatttagagttaaagtattagtacatgcttacgatgtggcaagtagaattgttattgaaagtgcaattgcagatcactgatctccctgaacctttcccaccaactaattgattccagcttccttcttcactacatggatctttctcaaagttccaatctttctcccccagctttcttcctatttctttcagaaccatcactgttcatttaataaaacccagaaccaataatgatttaaatgaaggaaaacacaatcttttggagaaaaaaccaaatgggcaattttgaaatacccaaaaaagcattctctgattgaaaagctcaaagctttagcttaaataagcacaaattgaacattacccatgaaccattttcttatcattttactcagaaactaaatgggaattgaatgaagtttaagggaaagtagtcaaagtaccttcttggttgtgaagtttagctgaggctgccaattcaaaacttgcaaatatgcaaaataaagtaatgaaaaagagaagcagatgattctgcagtactaagaaaccagctcccattttttggctaaattcttcctttttagtttcctccaatgaaaatgaatgcactgtgtatagaatcaaatacctcacattcagctttggagactagaaaaaaatattgtcttttactattattatatcaatacaaagaaagaaactattaagtgggacagtggcactggcacatacaaatcaatacaaatacaattaataaacctctctttgttttggtatgtgaggagactttataatggatttttaataaagttattaaaccacaattccatctactgtgtaaagtatttgtctttatatagatacttgtggctcttattcttctctctccattcattaaaatatatataaagcttgtgaaaaatatgagtaataatattagaaaatgtaatttgcaaagcaactttagaaaccaaccaaagtttttgtagaaactaagtattgggagttggttcaaatttaattagtgtgaaagggttgtacttggagatgtatagtttgcttaatgttcttttttacataacatggtctttcaaaggcaagaaataaaagtttatgcttaaaagattagtaatggtaaaattagaacaaaaagtttttttgactgagatggtttgattggtccactttcaagtctcagataatgtcatttttgggtcaaccagagtcataatgaagagtaagaaatgtgaccacaatgttggccaagtgggtttttacccacaaataatttggtaacttggtagtttagtgtatttgtatttcaatttattttgtaatgaccgagaagtttaattttattatcaatgaacgttctttttcaaaaaaacaaaaaaaaaaaagtaagaaaactggtattttattttattttatttttaattttaattcaggcttcctatctcaagtgacaggattgcctatctcaagtgacaggattagtgagtggattggatgagttaaattttcctatatagggtagaacacaagtaaagaagggaccattttaatttattgtaactaactaacacaatttaattcaccgactacttaataatactctttattgataaatgattcaatttttcttttctttgaataacggcaattgacaattagagacatgttagacgttttttttacattcacatgttaatttatacataatgatttatgtatatttctttgcattgatagactaagaaagcaatttttttaacaatgttgtattattaagagctatctctagtaaaggtgaaaataagtggtgaaaagttaaaatataattcatttaataaaaagtatacttcaatagtgtgccaaaaaatgaaataaatttagtacacataacaaattttatgctaaatttttatgtttagataataaaaatattatatttaaaaatatgatgtatagaataataaagaagttgatgtatagtgtaatgtaaaagtgtaaagaaaaatagagaaagtgaagttttgataatgtattttagaataaagtagaaaaacttatgagtttttattttgccaatgttcacaataggagcagatcaatgtatattaacttaaatctcaattttttaacaatgttcacagtatagaccgatgtatattaagttaatttaaatcttattaaagaaaagaaaaaaaaaataagtggtatttggttagaggtaataatgaaattgaatttgttgcattaaagtattagaatatcattctaatagaatgatctttaactatttttgtggaatgactattttattttgaaatagaaaaaaagactttccaatacaagttagatttgaaaaaatttaataattttttatatattttaaattttattttatttcatttctattcttattcatatttatattcttatattttcgtttgttcttaagtcactttacatctcaagactaatcaagtgttgtacacattgttattcttacaatgattctaaag

SEQ ID NO: 16463 - DNA, 6373 bp, Cannabis sativa
  modified_base (621)..(630): a, c, t, g, unknown or other
  modified_base (6345)..(6346): a, c, t, g, unknown or other
aaatgaaagtaaatttttttttttgaaaaataaaaatgcgttctgtaaccacttttgtttttcaattttaaaaatagacaataaaagtgtgttcaaaaaattttaatttcaattttattttttgattttatttaagtcagatctaggtctggggttggattcgggtttgggtcagaggccgagttcagtgccaaggtcgtgggggatttaggtccgggtctaatcggagtccaaaatatttattaagaaaaaaaaactgtttaaaaaaatattgaaaaatgatttttttttttcaaaattttgattctcaattaaaaagttgaaaagtaaaaacaattttatagaacatgtttttgaaaaatatttcgcttttctaattttaaaatggaaaactaattaaaaagtgttaccaaacgccatctaaaattttaaaactaattaattgacttaaaaaattcattttgatattaaaaaaatatattaaaattttatttttgtaaagactaaattttacgggaacaaacttgagtatattttgttattctcaaaaaatatagatttgtttaagtaaacataatattttttataaatttaatttataactttttttcaaaataattnnnnnnnnnnattgaattttttaattattttctttatttgttaagaaatgagtttataaatataaataaatttggttttttcttcaaaaaattttagtttatttaaattatttatttgattcttaataatttaggtttaatttttaagatacgtgtttataaagaaaataaagtttgaaatattttttacgaataatttaattttttttaagtaaaattaatagttttaattaatttgatatttttattaagttttttaaataatttttattattttttagaattaatagaatattataattatttttaaactatagaatattacaatttttaaaataattttttttaataaatgggggcaaaattttgtatcggtcaaagtttaaggagtgaaaatactaatttttaatgataaaagaaacagaacctaacagaagaggcataattatgtaattgttatattttagggagaatttttaacaagtcgtatttttagggggtaaaattaggtagtgccgaaagtttagggggcaaaaatgttaattattcaaaaactattttcaaactttattttgtttataaacacatatcttaaaatcaaataaaatttttaaaaatctaataaataatttaaacaaactaaagttttgtgaagagaaaatcaaacttatttatatttacaaactcatgtcttaaacaataaaaattaaaaatttaataaaaatataaaattatttgaaaaaaaatagaaattaaaccaaaaaaagttaatgtttactcaaacaaatttagattttttgagaaaaaaattgactcaaacttgttccggcaaaatttagtttttacaaaaattgaatttgtaatatacttttttttatatctaaatggattttttaagaaaaaatatttaattttttaaatcacttaattagttttacaattttgatttcaattttaagtttcttaactattcaaaaatgatttttttaagatctaaactatttttttaagatttaccaaatataaaatgttgaatatctttcttatttttatttagataaggtacagtttcatagttgtcaaagtttaagagacaacattattaatttacaaagacacatgagtatttaaacgaaataatgagaaagaacgtaacacaaggactaaatttttgtaaattttaaaaattgttaacaagtcgtttatttaaaaaaaaaaaataatcagcgtggaaagtttaagataaaattattaattattctttattttaattaaaaaagaaaggcactttaattaacgtttctccaagcaaccttgtgtaaagtgttgtattccaaagatattaaaggcctttaccaatatgctcatgacttctagaaacttagacaagggttgcctaaataacaggcaacaattttttaaattagctttaattaatagtacaacgattcttcttagccaaaccctaccccaatttcgtccactctattatacttaccaataactcaaattctcaatttttcttaatcgtctttctgaagataaaaaattatctatattctacatcatcaatgacgctgagtaactaactatagttgactaagattttttctatctctttcttgtgatttggccacacttctctattgttggacattcgttcttttttacttttttatttggttaataataaacttaaaaatccgacaaactagctctaagatagcgtagaaggaataagaatataaatataatatattatatattaataactaaataaataaaaaccatttacagtactttactctagccaaacccattaatttacacttggtaaagctttagccacatatagtgtcccaaatatgtataatcaaatacacaataatatatttctaccttcccttaaagacttgttcttattaatatatgggaaataaagaaagaggagaattataatttggattatggaagtaggtgattggtactattccatctaattgacagttggcttagtatagcgatttaagagcttccaatttgaccaactcatcgataaaaatgaatattaaaaaagaaaagaaaaataggcattaacagaaatgaccccaaccaaggttgcactactcagtctcgggttggtaaatgtgctattattatagacattattttttcacttctttaactatttacatttacatccaaacctaccaaaaatgcatgctcaggaatctgtaataaagattgctcactttggaactcttggaagttatagaaagtttcccaaattaaatatacctactacaaaattacaaacaaagagtacgatgtaagagttttttttcttttcttttcttacttcaactgtaaattggttagttaataattaattaccaattctcctttttaaatttttgggggttctttattaatgatgaatattttgaaagggagttgttgaaaaataaactgtgccaacatattaattactatgtttaacataaactcacagaaactatttcagtaatataattttgaaaaatctcatcagtgaagaacagtaaaaaaaagaactttctataatttctataatttcaaaaatgttgaactaagaggaagttagaacttttgtctgtccttctcaagaatgagattattcaaattgaaaacaacattagtcttctctctaggagagacctcaagaatgtctgccctgtttttaccactaaaatttatatctaataataaacttgaacagtcacaactactgaatgaagaagctgagactgtttcccctgactcaccaaccgtatcaacttcttcgtcttcatcattactactacttctaaccgtgacccaattctgttccaaactcaatgtagtataatcctctgttagcggtggagacgatgacagccgtctgatcctatcaaccggcgaatctcgaccgtttgatacactaccgaaattgctaaaactctccaattcatcttctaatgaattccatatttcgtgatcgagaatactagtaggagagatagattttgaattattcgattcgttgttttgcttcaactctccaatgaatggatgctttaaaagctgactcgccgtccacctctcatctgggttccttcttaaacacttccccaagaaatcccttgcttcgtccgaaagaaaactcggaatctccggcgactcaccggaataagcaatcctataaagaatcgcaattgggtcactgctatcaggccacggcgagcctccgcttgccatctcgataatagtgcaacccagagaccaaatatcactagggagtccttggtgctcaccacgcgccgcctccggtgccataaacattggcgttccggcaatcggtccggcggagttaacccttctagcgcagccaaaatcggctatttttggacccttttcgccgatcaagatgttccgacccttaatgtcacaatgcactatctcaacagaatgaagatactctaacccacgaacgatttcccgcgtgtaatgtccgatcaacaattcgtcgagtctcccgtcgcggctagaaacgacgtcggttagagacccaccgggcacgtactcgaggaagagattgtatatgggtttgtcgttttctgttgtaatgtcttgaccaatgtagctcacaacatgaggactagtaatagaagaaagaaggctctgttcttgttgcaaagctttagaccgggacaactcggcggacttgacggcgaacacttgaccggaccgggcagaggtagcgacggagactgtggccgaagaacctcggccgatgacgtgtcccctgctccagtccatttgggtgagcctaagaagaaaagagaaataaataaagtttggaactttggaaaggctttacttggtccttttgagtaggttaaattggggtttatatatattggtgagtggtgtgagtatttagtataataagaattctaaaatggttagtttttattggttggttaggtgtctctccctacctctagggagagagagagaaagacagagagttgacgatagctttaacgtgagttatgaacgtgtcgaaatttgggtggagttgacggcaatttctgcctggtctgatcatgtcttggcatagtgtcacgtgggcacgtgttaaaggttgaggattttagggtgtgaacagaacaggtgatttatttgggatggtacaagtaataggggatacgatacggtagcttggatggatgatccaaacttgattctttgttttgtaattagtgtatgacaaggtgagagagtgagttttgctttaggtattgttaataataagtctttgaaaatgcttagacgggtggggttgagccaccaatatggttgaattttagcatcaactttcaacattttgtatgaagttgaattagtggatatgtctcctaacattgtcaaaattgattcatttcttttttctggtatgagcaagaggaatgtggtcaggtttatgaatttggattattttgttacgtattattgtacgtgttcctaatgtgaaattgtgaatgttaatatatgtgaatgtgagttgtgaatttgtcgtagtgtatgaatatatgaattgaaaactatataaaaaaaattagacttaattaatacaagaaatttgggttttttttattattttcggctatagtgataattaaaaaggtgtatttcactttttttaaaaagaaaattatttatagattgtcaaagtcaaaaccaacatagtttttttttttcttcttctagttataatagttttttaaaagtaggcgagtcaatttaccacaacgccacatgctctctttcatttacatataaatacttttttttgtcttgaaagatatatgtgacttgtgttattcgtaagccacgtttgctaataatttttcattgttagggccaatccacatatgttttagggattatttcacgaacacaccaaataaataaaaaaattataaaaatataatttcatgaaattttaattatttttacgatttttttattttatttataaaaaatatgagcttttaagttgtactcttttaaatttttattatttagatgttatttttatattattttatgtaatttttttttataatttttgcattatttttatgaaaattatcttttaaatataaaaatataattttttttttaaaagaaatattttaggtaattatctcttagttttatgaccaattgtttttcacattctttaaccaaaatttaatttaagtagccaatttggttagaagaaggtgtcgatgtgtcgtgtgcccattttacctcatcaagaaaagtcaaatttcgtaccaaatttaattaaaattagctagggtactacttgaacagcatcatcgctttacaatctgtttaattattggataaaagtatacataaatctaattgggtagtatccatgtatatatgctgacaaaattttggtacaacttaaatttgaaaaagttggataaagttttggaatttactaaactaaccctcccatttgtataattattttcttttgccaagcatgtgtgcgccgacaatatttttctataatgctttgtttcaatggttaatcacatctcagtagcttaactataaacacataactaattgtgtcctctaagtaaagcaatcatgatatgtgcatatacatatatatatatannaggtgattgttacgtgccaagccacgt

SEQ ID NO: 16464 - DNA, 7791 bp, Cannabis sativa
atcaaccccattcatcaaatcatataagttaactaccctatttaacttttaacggtacatcacataatatatttcatcacatatatctattagctgtgcctattaaatatatatataacaataattaagaacaaaaaaaaaaaccccaagtctcaccctttaatctttattcttcatcgttctctgccctggttctctctctcaatcgagatttctgtcttggaagtcttctcctcacaggtcagctcggttctttggctctcttctcctcacaggtacttgaagtttttctcttttctttttctctgtagagaaaatgaaagttcaattcagtgtcatttagaaaatttataaatttattgataaaaaaatgtcttactataaaattttaggaaaatatttcctttttatctttcccctatctcctggtcctggaagtacttaatgctggatatttttgtgggttgaggtagcaaaacagctctagtcgactcagtagtagttaaggatgagttttatttagctctgactttgaagagcgtagctcatacttttgattgatgcgatgctaattattttatatcatgattatgttggtatgaatagagttgtcaatctccctgaagtaagggtatcgtcctgaaacaatggcggaacaagtcgtggaagggagccaaccagttgatctcgagaagcatccttcgggaatagtcccaacattacagtgagtcttttttatgttattatcagtttggtcgattgatatgtggatttaataattttagtttttacaaaagacaatgtctagttgcggatcctgtggaaatatattgtttttcgggtatttgatttttgtattgtgggtaatggatagtgttcccttgtgataagaaaagtttgctcttatattatatatgtaaatgttaatctatgaacgagggcataccatttttccatttatgcatctcttttgttgtagttctcatacaacataaactgcgactgaggatgaaattggagctatagagaaggattgtgctggactcagtcttagacttgcttaagcactatgcttcttacaggcttttgacttttctttttcttttttgtgttttcaggaatattgtctccactgttaatttggattgcaagttggatcttaaggccattgcgctccaagctagaaatgcagaatacaatcctaaggcacgtggtgtttctttatcttgcctcttgttcctcctcctgtctttttctttgacctatttgtttcatgtataagtgtctaagcttgtagcttgataaaaatgagaattttcttggtgtatgtgaagtcaccgttttgtatgtagacgactcatttagatgtcatttttcacttagtgcttgaccaagtcacgcatggttcagcacaaggaccattgctatttttcaacacttgcttataagaagaaaacgactttctgtttgctcactttgttaatttgttgtcccattgcagcgttttgctgcagtcattatgagaataagagaaccgaaaaccacagctttgatatttgcatctggcaagatggtaagttccagaagagtaactccttatgtcattcaaataaattgacgtggctagtattatttttttgtgacattctccttttcctttacctcgccatatttagtctttgttgcttttgttggccatgtttatatttaaagtcctccatttagtttctcttctagtctgattatgaaagcatagttatgaagccagatgtagaacacatttattttcttccagattttatttaggccctctttatggggctcttctgatagttatatcaaagacactcctttttaagttgaagctgactccttcagttacttattgctatgctgtataggtatgtacgggagcgaaaagcgaacaacagtcaaaacttgctgcaagaaaggtaatttttatttcctccctggtctgtaggctaaagataccttagggtatctagtttttcagttggcaagatcaagcttgtttcttataatacttttacgagtgtaccatgttatgtattaaaagatttgggcctgtgatgatattgctaaataatccacattaaggaggaagtctaaactactgaatcttgtttgaagacatgaagataaatgggtaatggactggaaatattggagaaaaacattgtgatctggttactttgtaaagctgtaattcctataccacggtggtcatactttgaaattttgcattcttatgtgccttatttgttcttcagtatgctcgtatcattcaaaaacttgggtttcctgcgaagtttaaggtattatctttctctttccttgagaatacatatattattttctattgaaccttttaaattcttaattaattttggtgttgaaaggaagttatatttaaaagtatctcatattactatctatacacttttcttttgttgatctcatttttcttgttcaggattttaaaatccagaatatagtaggctcctgtgatgttaaatttcccattaagcttgagggacttgcattttcacacggggctttctctagtgtaagtgacatacatatgtttatatctataacttacgttttctcctgtcaaataactagttagggctcatcttaagaaatgtgaacaatttcgccaagaaattgaagtgatgagatttgtaggggatctatatctttcacatttttgaattactccaagttgtcgagtatggccttctttcttttgttaatgatgaattctttcacttctggtgatcagtatgaaccagaactatttccaggcttgatttatcgaatgaagcaaccgaaaattgttcttcttatatttgtctctggaaaaattgttcttacaggagcaaaggtagacctgttatgttacttttgttttggatttatggtcagtctattctgtctgttactgaccggcatcactatattcttaattttttggcctttttaaggtgagggaagagacctacactgcttttgagaacatttaccctgtcctaacagagttcaggaaaactcagcaatgatgggatggcagaggactccactgtcattgttcttgtattaaaattttggtatttatgtttttaacatcagtttacatagcctgaaagtgtatccttacctagtgctactccttgaaatcgtcaaataagaggtatcttcacttcgctggcagacataactgatagagcaacaaaagacaatttgtctgcaaaaggtttgcaatgacgaccgttgtgccttaatagaattgtaaatatagaaaggtggttgtcactgtttgattgcctaatgagatatagaccagtccagtacttgttggtgggtttggtgaaattgtttgaacaacatctgccatgtctttgaagtcagtgctggataatagaggaaggagtgggaagaaaaaacttggtaacttctagttgtactttcagctttgtgcttatatgagttactctcattctctctctctctctctctttgcttaataaaagacttgagattatgttcaattagccagcttttggggaattaatgattattacagttatttgagagaagagctgattgttcaaacttcaaactatgagtatcatcacctaataagtctaataataaggaaatcttgattttcattcgaagcctaaaaagtctctactttgaacttgtgcttgttgagctactttccttctaatgtaacctatgtactaagccatgtctaaaagaggctaactgtgattggttatttaatacagtggtgtccattttaaataaagattgttggttatttattattattttttaattgtaatgttttggtgtataatttgtgcatatcattaatcttgttgtataaatcatagaaatgtttatagtagactcttaaaagtttgttttagtagagtttttatttgttttggcattcagtaaagttttttagtctaattttttttatgattgtgtacgttgtagttatttaagacaagtaaattttcaaataatctacagtacaattacttatcacgcatataaaaaaaataatcgcacgtgcaaaaaaaaatatataaattttattttcggtattgttaattattttgaattttttttttatactgaaacagtaaaaggtgcatcattattacttttttaaaagggtgcattgtagaatcagccaaacttatatatgtatttatgtttgtttagtacagttcatatttatgaaagatatgaaggccacattcctcactctttatctctctaattctttcaatatctgcttgcccaacaatggcagtttctttctttcaaacataaaaccaaaacaagtccacatagaaacacaaaaactcaatggaatgacactccagtggtctttgaagggactaggctaggaagaacaggaggagaaagaagagttagtggatttgctcggtgacttgttagtttgatattagtatattttttgcccctaaagtagcaaagtaatatcttttacactctaagtttagcataatctacaaatcattaattattaagtgatatggtagtcttttgcaagatttgttataaaattataattttcaatcaaataactattttgctgatatagtatcaagtgattatgaaataagttaatcttattttcttttatttttctttaaataataaaagtaactacattatacaaagtgggagggtttcttttatgtaaaaaagctcattgtgtatcctaataaaacttgaaagaaaacctctaatttgtgaatttttgtcttactaatagaacatctataaaataataataaaaaattgtttagtatttaataacttgtgaaaactttttaagttttgacattcgtgtcgtgtttgtgtttactttaatcgtgtcgtgtcataattgtgttgacaaaataacacgaattaatttccgtatattttattaattttttttttaaaaaaatcgtttcattggataatcgtatcatgtcgtatttgttcgtttggcatgctaattaattgtattgtgtcgtatttgtgttatatgacatactatcaatcgttttatgttggtgtgtgaggtttttggcacgtttaataaatatgttgtatttgtatactttaattgtgtcatgtcataaacgtatcaacacaaatacaaaactataacataacttgtcataccacacacgatatatatatattattttattttaagtagacataaaatataagtacttttgtgaaaaaatttaacttattttttttctctatttttattattttctttttaaaaataattttaattacatatgtgggttgatgtagcatcgccacatccgccccgaaaatgccatctcagtcttcttctttggttttatataaccatcttagtcttttgttgacaactatcaagtagaattttatgccagaagaaaactaaccaaaaccaaataaagtgcatatttcaagtagaatttttaacaacgtacaaatccaataaaaattataactaattaggtaagattaaattatcaattgtacataatataattagacaaatcaaagtcaatttaagagtattttatttatatagttagaagtacattaatcatgtagtttttaatctatgtgagatttttacaaaaaaaaaaaaaattaagaaattatatttctcatctacaaatatataaaataatttcgaaaatatatttgaagtttttttaaacacgtctggtagactggaatattaagaactctgttttcagtactgtaaactatttataattttttaaaaaataacaaaaatattattataactataatgaatactgctaagaaaaaaatttaaaaaaatattttggcatgtgattttaaacgtaaaaattgattaagaaattataataagagattataattaatattactcaatacaagtttttttatttttatagatactatactcggtaaaaagtgcgtacaagctaacccaatcaagcttcgagcaagagagtagttcggactcaactactttttggaaggctatgtgggcgttaaaagtacctcccaaagtgaaaaatttgatgtggagagactgcactaattgccttcctacccttgtgtctttgcgaataaaaagagttcaagtttctaatatttgccctgtatgcaacttgaaggaggaaacaattactcactgcttgatttcttgttcatcgatcaaacaagtgtgggaaacgacaggtattggtactactctttcgactgggatgtgttttttagactggtgtgctgagtcttttaaagggccggacaaggaaaaaaggtgtagattggtcactctttgctggacaatttggggtgcacaacaactgctccgaaaattgttgcttttgcagataactaccttggccaatggcatgctgctcaagatcatgagataaatccatcttgggttggacttgtagaaggggatggtgttgagcggtggtgtgcgcctcaacgaaatggtgtcaaggtaaatgtagatgcagcaatgtttggaagggatcgtggctttggagttggtttagttgctaggaatgaccgtggactgctgatagaagcatattccagctgctttaatggtgtcgttcaacccatggtggcagaggcaattggagtaagagaagtacttagctggataaaaattaaatcgtggcagcaggtgattttggagacaaattgtctcaatgtggtagaagctttaaggaattcaattgaaatgatatctgtgtttggtttagtcatacaagaatgtaaaaatatgcttgttggtatggaaaatgtttttgtttgtgttgttaaacgttcagctaatatggtagctcatgcttttgtaagagcttttattttgtattctgggcgtggcttcagtatggggatgtcccaactgatttgttaccatgtttagtaacggaagttgttggttaataaagattattaccattcaaaaaaaaaaaaaatactaaagtaacaatgacacattaataatccaatactcacgttagaatgaaacctaacagtctcattttacagcactctgattttacaacaatgtgataagtagtttgaagactatttctgatgcaaaactcttaaataatattttaaaaaaattacaatgtaaaatatatatagtaaaataatgatatcttattaatctcttacgttgcgttttctgacaaaaaaaagtattaaaagacgaacggaatccttaatgcaatccgtgctccagtgttttggagcctcttctcataataatgataaaaaaaaaaaatgatcactgcacaaggatgatacgaaaaaggtctaaggactaatatgaaataattcaaacaaattaaggaccaaaatgaaaagtttataacaaataaatagaaggagagtttttgctataaaattaggcatggctactagtgaggtgattaatccaacaagaaacatatggaaggtaaatactaatagttgacttttttgggttgaaagttaaaaggtgggggataaaattgacttatttgtaaataacctagggaccaatagggaaatagatgattaatccaaagtgtaaagaaaaattaatggcaaacgtatatgattgatgctaggggtgttcatccaatccaattcgtattattttgctcatagtgcatccgatctgcactaagtgcaaatttcatttttttggatccaatc

SEQ ID NO: 16465 - DNA, 13060 bp, Cannabis sativa
  modified_base (424)..(429): a, c, t, g, unknown or other
tcgtctgattgaaacctttgtctgatgcaaccttcagccaaccacctagcaaccaccctgcaaccatcgtctgatgcaaccaccgtgtaaccacgcaacaactactatgcaaccattgtctgattgtgtaagtgatattttggtaattaatattgcataaaaggtataaatgttgactttaccttataaaagtatttttataaataaaatgtcaatttatattttctatgtaataatttctttattgttatgagtaatagaaaaataaaattatagtaaaataattactcatataattatttttaaaaaatatatattaaaattttaaatttcatatagatttacgattaaattatcaataaacaacatgtcaaaataaaattttccctaaacaaatacaagtaatattattattattattatnnnnnntattatttttttttttgaataattattattattattattaataatttgaaatggtgatttttattattaattaattatttactaatgcttaggcttaaacaacttaaattattttaatttaccatctctctctctcccttccttcttctttgttcaacaggcaacaacaacaacgacgaccaccaacaccaccagcagaagggccagcgaacggcatcgtgcacttgaagcttaggaagatccatttcaattccactttcaccttgccgaatcttaatatctccatttctggtataaccacgattcgactatctatatatttgttttcaaattcattttttttttctcgactaaaattcacgatcatttctgaagtttttctgctcaattcttatccgttctactattttcccgggaaacaaacaggaagtgttttctctggtgttatcgcatcgggaattgtgttttatttactagttgatcagggggatttcaagttatcacatttaactggattgttaggagctggagtttcaccattttgggaatttagggttttctaaaggttttgtggtattatttagggttttgtaattaagaaatggtgccattatcggtttgattatttggttgtggggttgtagctgtgttttggttgcgagaaattttgggatttttttgtaatcccactgcatattttgaggggtggatagggtttatgatgatagatcgagaatggtgcggcttttgggactgactcgcggtgactcgtacgagtcgcctcgggagatcacctcgcgggcaaacccgacgagcgaatccggtgagaacgggtggcttattaggttcttcgattctgcgtttttctgtgagtggattgctgttagctacctctacaagcatgagcattcaggggtacgtgattacctatgtaatcgaatgtacaccctacccttatcgggtgttgaaagctatttatttcaaatatgttacatgatggttcacaagccaagcccctcattggataaatttgtcattgacatttgctcaaaatcgcttaagatagctttgaaggtgcactggtttttgttggctgagttagaggattctgatgacaatgaagggattagtaggatccaagagaagtgtcagattgcggccaccttgatgggggagtggccgacattgatacggcctcaaagtgagtcaagtagccctgggagcaagaaccaggttttgaataaaatattatcttcaaaacaaaggctgttgtcactgacatcttctccaccccctcagaagtctctatctttctcgccttcaggaagtgtggggctagaggatggtagtcagtctcccgacgaaaacaaaatatttaagaaatttatcccaggtccaaaggttcgagatgcattgctatttcggaaatctgtggataaagatgatgatgaatctgagaaggatgggttctttaaaagacttttaagggatagtaagggtgaagatgagggaggttcgaaaattcgagaactttttaggaagtcatctgaaaaggatgatgatgactctgagaaggatggattcttcaaaagacttttaagagatagtaaaggggatgatgaagacttaacatcaagctcagatggtttttttaagaggttgtttcgtgatggaaagaacgattctgaagataaatcagctttgaaatcagctgaggatgaggaaaaagaagggttctttaagaagctctttaaagataaggctgatgataagagggatgtagctgataggtatgaagatgaagaagtgatttactctgaagaaaaaggttcgaaatctactgaagatgatgataaagaaggtttctttcggaaattctttagggataaatttgacgacaggagagatggtaatgataaagctgatgagggaagtgtcaatggggaggaagatgactcttctgaattttcattattcaaaaggttatttagagtgcacccagaagatgctaaaaataacgtggcaaatgaaagcagtaatggtggcttggctgaaagtagtccaggaacagagaatttttttcgcaaattgtttagggatcgcgaccgatcggttgaagattctgagctttttggttcgaagaagcataaagaggtattttactctgtctttttgttttgttttcctggcctgttgctcaggtggcagttggaagtatgatttacctttactggtcattttgaatgtacttactatataatattgttatcatccgagcttgcaagccttctttcttcagttttagtgcttatctacaaatcgtgaatatgtcaaaactccctttgattttgaaccggctatcagaattttcttatggcttgtatcagcttatatcatacttgcagtatgtacaaccagaacatttttaggcattaaatctattcagggttatgaaatataaacctaaaaatgaaagcttttttatacttactgacatcattattatgggtacaaatatatggtaaaaagttgagcattgggttgctaattggattttcaacactaagaactttaatacatctccttcttaatgcttctttgcgattgttacttgtcttagttttctgtgaggatgtttctgtgtgtgtttttcatttatgtcttatataatgtcttagaatgagcagcctctttgtggctttctagactattgcagatgatttcctttcatcttttatttatacaatcttgtttcttataatgtatataaatgtagaaattgtggataccatcttcctgtacaaaactgtaagtttgaagtcacgatttcttgtagataattacttttcttcatgtttgtcaagcggtgatttgcattataaacggaatttgtaattaaaattgtgcagtataatttaatgaaagaatgaatgttcattataggcttattgtagcaccttcatgctaagagcttgcaaccttactacattacaaggttgttggtatgggatatttttacctaagacatgtagccctggtgtaaagttggtgtctttgtaactagaagaaaggagctgatacaatgatgaaaattgagatcaaatctatagttcaggtccaccttgaacaaaatgcaggcattgaatcaaggatgcttcatgctaatcgtcagctactctttattttacattttatctgactaaagggttaataaaatatttaaatttggttttttgcctcatggtaggagccatttttggggctgatggatttcgaatagtcatattatatgtggtttttttgctctttactgattgaagagacttcaatgaactgcaagttgcttgttttttaatgatttaagaagacttaaatgtgcttttaattttgcagaagcgtcctggttcgcctcagcaacagaatgagaaagctaatgccaaacccccgcttcccaatcatactgcgtcccagttccggaaagggacttatcatgaatcattggactttgtgcagtcattatgtgacacttcatatggtttggtggatatatttccagttgaagatcgtaaaaatgctctttgtgaggttgtaaattattttatcaatattattttcatttcatgttacatttatgatgtgcatatacaggtgcttgaatgtcttacgtgttttctcgttcttgtaattgtagtctcttgtagagatcaaccagcatgtaactgaggcccaaaatggtggaggtacttctttttccatttatgattctgggcttggcctgatagattttggagcacaatgcaattgagtatcagttatctgtagctatgtagaagtaaatttccttattttcgtgaaaagattgtcaaatgtattgaggtgttttgtgctgggtttggaaaaggaatctttttgtgatattaggggaggggattcgaacttagtacctcctttttgtgaggagaaatgtgaaaccactatgttatgcctatgaccacaatctttaataatgtgttattttgcactaatttgttatgggttaaactctaaaattaccagtggtgcacatttagttagattgtggcggaggattgcttgccatttaaaggcatataaatatgaacttattttattttatttttttatatgacacaaaaaactaggctaaggactagggatctgccaccaatctatactaaagcaagaaacaaaacctcattgtttctcattattaagaggattatgaacaaatattgccatgcttaataaacttgagtagagatcagtcaagacttttggcctcagtttattttttttttcaattataaaaaaaaataccaccacgctagactgcttaaacttatttgtttatttttaaattcattttcgtctttttgtaatgcagtactactttacttccagtgtggtttactgctggtatatatctttgaatgtttatttattgatttatttttcttcatattatgcatttatagttgctaagctagagtgggcattctaatttagttctttgatcatatattttaggagtttgctttccaatgggaaagggaatgtttcgtgtggttcatatacccgaagatgaagccgtgcttttaaattctagggagaaagcacctttccttatctgtgttgaagtcttgaaaagtgaaattcctaggtattctttcattaacttattacgtgaactgcaagtagcttatttttaattccgtgaaataagtttacttttttgggaaatatttgagttcactaatgaatccattcaaactgatatgtttctcttttctttcccacaatataccaataatgatttagtaacccaaaggatgcatccagttctcaaaagctttctagaggagggattcccttagcaaatggtgatgcgcttctgccaaagccacctccttgggcatatccattatggacagtccaggaggtgtatcgcaatagtaatgataggatgtcaagttctactgcacaagcaattgaccaggctatggctcacatgtcagaggcaaaagtaaagtttgctaatgtggagctgtctgtagagaagcgatcttgcagccattcagaggacatgaaaaaacctaattcatgtgcaagcgtccattgtgatagtgctcatgctattaaaattttgtctaagaattgtcaaggtgaagatgatggagctgatgtatcaaaatcagcccatgattgtgatttggagtgggtaagggtagtgttgacagcagaccctggtgtaagaatggatgacattgaggttcaaggtccaccacgtcggaaggaacaccgtcgcgttccaagtacagtagctattgaggaagtcaaggtgagtacttggatgtttataagttctatctatttgatgctattattacagttgcttgctcccacaagaactaagaattgagcctctcttggacacctacatagcaatggaattaaatataaattcctcttgtttactatttgagaagtgatattctcaataaataggtatttcctttaggaacttgcataggttatgcttgcttttggcatgaccattttcttaactcggtttcttagatgttatacattgttatttgtcatttatctttgttttattggtatgacttacagcttcttccattttattgtttcattaagtgtcataaattaatgttggatgtagaaaagcaagatcaattcagtaattactaactagaaacaatagctaattaatacaagcgccggtcttgctttaaaaaaattaaagagagattagaaacaatagttggtccttacactgtagataagctccaaagaatatgaaattggtgcgctgaatgtgaattctaaaaaatattttgttttgcttaatgttaatatctatcaaccatctttctgagcttcattgatgcctcatgagctaatgttgaggcatatgaggtttttacgatataaaatgcttattttgccttggacttttgtgtaatggaagatctacatggaaaaaaattctgcttttatttctggaaaaagaaattgtcgattcagataaagcttctgtggtattacttatgcttcaaatatctttattcaggctgctgctgcaaaaggagaagcacctcctggactccctttgaaaggggctggtcaggattcatcagatgcacagcctatggtgaagtttataactgctggaatttttttttttcgaggggtgctgacttatttatttatttataagttatacatatgtcaacaggctaatggtgctactcccaaggccagtgatgccttatctggtgaactttgggaggtaaaaaaagaaagaatacgcaaagcgtcagtctatggatcgtcaagtagttgggacctgcgctctgtaagtttacatgctgaaattctttcatttatttattattcttttaactgttgtaatcatgcttttggtagactgcaaattcttacatgtccacattacagttgaaataagaacatttgagagtcacttacagatggttaaattttagttgctggtagctccatatcaatcctagtgttaagtatgctttctgagaatacaacatttacaggttggacaaagagaactgaaaactcatatgttatccagatcttatatttgtagtacactttctagctactgaatttcagaataatatatcctagctatacttaatggctgtatgtaaatgatatatatgtcatgacttgcacctcttattcggatgttcagattgaaaggtctcttgtcactgtcttgtccattcatgctcatgattagattggtgttttctgcaaatatcttttgcttgaaagtgaagcatgattaggtttcttgtttgtacttccatgtaggtaattgtgaagagtggtgatgattgtaggcaggaacacctagctgtgcaacttatttcacacttctatggtgggtatctttactagaaattcttttattccaaatccaattctattcatgtcaccagttctttatttatttaattttgggtagtcatttttcttctttccttttgcctttatcttggataggacctggtcttttttatcttccccagttttgtcttagtgtcttattttgcccctgcaacatttttgggctttaaactaaacatattgtctcatgtccaaaagaaagaaaaaatagaagtctgcagttctgctgaactgcctcatcacttcctttttcatgattagcaatctgttcacataattaatcgtatgttagaactagttgtacatttgattatgctctttcttcctattacaaaatggtattttaccatggtgctagatatatttcaagaagctggtcttccactatggttgcggccttatgaagtcttggttacctcttcctacacagctttaattgaaacaattccagatacggtaactaatcatttttgttttctttaaggaatgtgtaattccttggtttagttagctttattgttctgttactattttcaggcttcgcttcattctatcaaaagtagatatcccaccatcaatagtctacgagatttcttcattgcgaaataccaagaaaattctccaagttttaagcttgcccaggtaactattgaggcccctaaatggtattggtgagttcttatcatttcatttcaggaaaatgatttctgtggaatactgagtcataattcattttcttgttacagaaagctggaacaacttgtagtaaatttgttaaattttctttagaatatattgacaatgaaaatttgattgaattttattcaaagtataattttaatgatgcaagtcattgttattttattatttataattattttattttttgcagagaaattttgtcgaaagtatggctggatattctcttgtgtgctaccttttacaggtatggaacctgtaatgttcttctcttcctcattttttactgtatgtctggtcaggtggtagaacactgtttgcaatgcccatgatacaattttcgatgattattcatttttgtgccctgatgcttatgctaatgcttaagttactaacagatgctgattaatttgctgttgtgcttttttggatatttgtttagttctctgaaatgaattgtagaacatgaaaagttaaacctgtttatcattggggcgtttattcttgtgtaggtaaaagatcgacataatggaaatctgcttatggatgaagaaggtcatattatacatattgattttgggttcatgctctctaattcgcctggcggagtgaattttgagagtgccccattcaaactaactcgtgaacttctggaggtaagacaatgctggttttattccccaacaagatgtctggatattggtgctgactgctgagtggtcttagcatttaaatcaatattctctgccgtggacttatttgattggggattatcccctgctgcagaataatattgagtttccatattaaactgattttattacttttaaactgttaagtctctttgtaatatgtttagctgtttgttttctatcttgtagaatatctgttttcttccccaaacacaattttttttacactgcaaagactgattttatttatttagatggtaataaagtcatagcttgggttatctctgttctttatttttccttaccatcgttttctctagcaagcaaccagcatacaattctttttggctgtgttgtgcctatgatttaacatttttagacttagtttgtatcacattgctaaggccaagtgattggatgcttgctgtgattccaggtgatggattctgatgctgagggagttccaagcgaattttttgattattttaaggtaattgcaaaagtcccttcctttttttctcttcccaggatatgaagttgaaaacctacttgttatgccatttagactcaatgcatacgagtttcactctcaagttttctttctcaaatctaggttttatgcattcaaggcttcctcacatgccgtaagcatgcagaacgaataattcttcttgttgagatgttgcaggtatcacaaactttctcttacatccccaacattatatgcttgatataatttatgaacagaaatctgtgttgttgttagtcaataatgcttggacactgccaatgtatttgagcatggaagttgaacaagcgaaaagggtggaagtgattaataactagtatgatgatgtttgttagctagaatatcaaaatttgacgagggattttggccgttggtttatataataggtagaagattaggattttagccattagtttatttaataggtagaagattaggagttccaagcgaattttgtgaaaaaggaaaataaaaggcctattagagtttggagggtttttttttgttatgaacaatgtaatacacaatatgttataacactactagtcgtgaactttttagtggtgcttaatgaaattatagaaggtattctattgattaaaaacttaacacttttatgttagagtacataatcaacttctctactttatctttcaaaatacctcccaaacctctagtttctttgttttacctcaaacttttacgttacactatacattaactttttttaaaatacatcaccaaaattttacattttttaaattttaatatattttattcatttcaaacatataatattaatatttacacatatttctatataaaataaaattaaaacctcaaacaattaataaaatatgtttagagaaatgaattgtattctataaatgtagagcatgaacagtaaattttaaagaagttttaaaatagagaaatagtttagagcatctgatgtagcgtgtttttagtttagtattctctattttgaagcatctgaggtcttattagttttatctaaactcatttcaaataggaattgttgtagtatacactttaccgtaaaaaaaaaaaagctgaattggctagaaccaatttattgtcaatcccgtgttcctaaaccctttctgctataaaacactaaacaatagataggttttttatttagaatctagctatatatataggcaaaatatcatgcgtaaacatgtatttagcataacggaaataaatatgtattatactgttggttagactaatacttgacatgcccggtgagtatgcggttggtgtgatgttgtatattgttgaaaataaagaaagtcgactccagcctttttgaattttgattgacacaaattgctactgtaaaatgtttgaattaggattctggattcccatgctttaaaggtggtccacgaacaatacagaacctaaggaagcggttccatcttagtttaacagaagaggtatgtaaatcatctttttttgttcatgttattattgctatgatttgtatgatagatttagattttgttttcctatcttcagcaatgtgtgtccttggtgctttcgctgattagcagcagcttggatgcatggcggacacgacagtatgattattatcaaagggttttgaatggaatattgtgagtcctccattgaaaacaagctggctcggtgacactaatatgtcaattgtagttgtatatgcaagtcactgcaatattagtggagtcagttatctgtggatggctgatggtatctatggcctgtttttctctgtttgaggaatttgtaactgtatcggcggaaatattctttggaagtcagcaggctaagtttacttcaacatggttttcatttacattttttccttgtttcttgtgatacggactctgctggctggggggaaatgttcttaggagtcatcatgccactcctaccaatgtcaggccagcaaaaactgtacagatctcaattcaagtgagaggacaaaaaaaaaattctacggctagggatgttcgtttgtgttatacaaaaatggcccaagtataagtgatttttgtaactcttaggtttccatgaaaattggcataatcttcagggtaaagctttgaacaggatccaaatatggaaacctggccatttttcaatttctggtctcagcgttgttgaaacggtatccttcttccaggagtgttgaatcttccatagtgtacgttgtcatagcaagattcttgaatatcaaatatactattgtattttgtaccattgatcccgatttataagcaaaatttgttgatttgaaaatcatcaaatcgagagattgttttttttggcattggaaacttaataccagtttgggttgaccctccaatttggagaaaatttgtaactcagatcaccatgcttgtgctcttagtgtgtattttgttcgtgtttcaatcctccacccctttgaatgttgtcggctttgattcttgttctaaattattttagtgagattaggacttatttgacacatagaattggactggacagaattaggctgaaaattttaactagtcatgtgtcactgtttagcctgggtaactaattccattactattttgggttatcatagatagattattaaaaattaaaataatattaattaaataatagatactcaatttattctaataaaaataatatagtgctataataatatattttctttacattattacaaatatttatattaaaattttaataaaataataattttattgaattaaatgattaggttaaatataatatttttattttttaatatatcataaatacattatttaatataatcatgtcatatatatgtatctaattttaaagtttgtaactgaaaaaataaccacaatcactatttacactttatttgtggacattcaaaattactttttgttgtcaagaagttacgcaataatatttccagtttttattattatgagattatttatgtttttcattatcgattatttgggtcaaaagttattgttattattttttttgatctcttcatcttcttttccctttacttggagtgttgctggaaattttgtataaattattttgctgccttattctctaaggactcaatgattttaaagtaaagcattttattgtgttataaaatgtctaatatatttatttttgtatgataattatgctatgttggtttattgataaatagacgtatgtaattgatcaaagatttgtttgtcttgttcagtttgattcttagacaatgatataaatgctactaaacaaaataagtacctgattttcatttacttactctattttttcttttggatatagagtaacttaacaatgatgtatattttttttatctaactaatttagaataatgaaaatactactattattgacgtaccatgtcaattaaatctgacgatacgtgcattgcaactttcgcctaataaatacacatatatatatatagaacacttcttaatgggtttaacttattcagtgacaacatatttatctaaatagttattaatttatgtgaaaatcatcatctgaagtatatattatgttatgattaaagcataataatcattacttgatttcttatgaatttatgcaaattacttgatgatcagttttttcttcactgttcagttatttctttagagaaatttcatttactattcataaaaaa

SEQ ID NO: 16466 - DNA, 3824 bp, Cannabis sativa
tattgccgctatttttggaccttggggactaatctgtatcaacgtgaactttttagggacttttgccgcaaatttccctatatataattgatgttgaaaaacagaggtcaacagaggaaacgaaccgtatgctaattaatgtatagggttatagtattcattttcccctaccaatatagtagaatttgttttataaccatcatattattaaattagattaagtgggcaattctactcacaataacgtaataagaaatgcatgttatgatggtatatcctctttttttttttagagaaattaaaattttatcagtggggtaattgaaaaaaaaaaaaactacatcttttttatttatactagataaaatatttacatccatttcaaagaaaaatcaataaaatatttacatttgattatatttataggtaatagtaacctttattttaagccatttgaaaattgtttcgtgccaattggacaataattgataagtttaagtttcttaatttttaattatgtaattattataattccatttgaataagtctctcattattcatgagtttgtatttatttcgttttgtctcatcataatcaaactaagtatgatatgtatgctctatggacaatagattttgcgacgggagagatctcatatatagcttattattataaataatttcttgaatattttaatgtttcttttaaaaaaaataatatcttgaatatttgtttagacatgaatatcattcatttatttaaaggagttaatgagttaaatggactaacctaaaatcacccaaatatgaaatacctaaagtgagaaacaaatattatagttgtgaagtaattaaactcatttattttgtgttgttgtaatagaaaagaaacgaagaaaagggaatggagcatagatcaaatgtattttaggtgatattatttcacttttttttaatggaatgctttttttttaaaggggcttaaatgtgattgagaaaaaaaaaaaaaagagctaaaaaagaaaagattttaaagggaaggtgggtgggtccatggtcacctgacaccaaggctgggtgggtgtgtcaaagaccgaaacagccccttttttctttgtattttggccgagacgagagaatctacagccggccaggctgttccccaccctacgaaactcctttaatggcccccattgggctgtgctgtgtttataatctaacttttttttttctatggcaaaaaataaaaccacctttaacttgctgacacgtggtcaacacattttagccattttccacctcacttaccaccagttactacttaataatatattaacgaaattatttcatgaaatgaaaggtaagatggcaattccaattaattagagaattatagaagtgaaaaaggaaaatgcacaagttaaatgagacatattgtggtatggtatgtatggaccacacaactaaaacatctacacatatgtcatgaatgaataatatggaataacgacgctattatgtgtgttgctttcgtttctttatcgtattcatatataccattaaaatcacaggatgtacatttgtctagctaacattattcagccactagttaacgatggaactctgagtgttgacaacagcactatacctataaagattataccataagcagtttcgaaaaccaaaaaaaaaaaaaaatcacgtttccattaatctattgtttaatatatatttctatacacatttcattaataaagtccaacaaacaaaacttatagttaataataactgtaataagatagttaatagaatgcagaaacatttataatttatttatctgttagatttagtgttgtggtagaaaaagaagtgtaaaaataaaactacacaactttggaggtggtctgagaaattgcattatatttattctattcttgcacacttgcttgcaaacaaactaatattactataaatattaaaattataaaagaggaactgttgaaactttgtcgttatggaaaaagaacgagtggttggaattatcaaagccctccgatttttctctctatttttttctcccatactcaatcggcagctgtacaacaaacatattgcatcgtacaaacaaaactacataaaatttgttaaacaaaaaaaaaatacataaaattacgtacaaagacaaaacaaaataaacaggtaataatatcgactgtaccagacaaatattgtaaaagtaacagacctaaatataaataaagaattaaactaaaataaagataaaacccagctagagttcgtgaaatggtcgtcaaattccaatgatcagtttgttgaaatcccattcatcctcccacattcccctttcattaacaattcaaatccctcccagctataaaaataattgcaaaaaaaaaaaatgaactcaaatcaaaaattaaaaaataaaaataaaaaactataaaaagatattggaccacagtcacaccgtgtcctacgatcaattgcacattttaagacgacagacccaccacatttccttgtcgttttttcttttcttcatttcttttttctattcttttttctctttaatttttacttcccaagctttacaattattctaaggtgtgatggagctaggtggggtcctagactcagtgggaggtgtttgaccgtcagatcctttggagggatcatccgacgattgtcgtaaaccgtcgtcagtctctcctcgattcatatcttcaatcattcgaaccacctcttgcattccgggtctctgatctggtacggtagagacacacgacatggctatctgaagaagctgcaccatctcttcctctatattgtggtacctcatcagctcaacgtcgaacacctccgccgtccactcttcccgtacgaccgattggacccaccgggggagatcaatgccctcttcgcctagcgaggcctgattcggagctttgccagttaggagctccagtagcaaaacaccgaaactgtacacgtccgatttgaatgtgactttccgggtctccaatacctccggagcccgataacccgcgacccgattgggcggagttgaggacccgaacacggattgtaaaccgaaatctgatacgcaggcgtcgtggtcttgtcggagaaggatgtttgaagatttgatgttaccgtggatgaccttctccgagagatgaagatgggacaaccctcgagcagcgccaatcgctatcttcatccgactatcccaatccaatggagtccggcccgaacctctacttcctgtcatccattatcaaagtcaaacaagttcagtcagttggctcactagctaaccattaacccgacgaagataaagagaatacaaataaattctttcagttttatttggtaaaaggaatattttttttttctttctttgttcagtattgaaaattgagatgggtaccgttttttattaaaaaaaatatgttttctttctcttttatgagcctgtaataagtgacttttctgaaaagaagcaaaagctttggccagaaaaaggggagcagaatgatgttgatgactcgatctttaatcataagggcggtgtattattttacatctttgggatttttgggaagacacaaaatttgtaatcaactaataaaagttgtagactaaagctaagaatgtttttgcagataatcacatggcttaagtaatttccaccaccagcgttactaataaactatgtttaaacccgagaaatatataaattgaaaggatcagttttcaagactgaaacagcccaagatactctctttcaaaaaaaaaaaaaa

SEQ ID NO: 16467 - DNA, 6954 bp, Cannabis sativa
  modified_base (663)..(685): a, c, t, g, unknown or other
aggacaacacccacatgtttgtcattggcgtctgtttgaagaacatgtttttcgtcagagggaatcttaaaggtggtagattctggatgatttctttcacctttctgactgccatagtttggtcatgtgaccattctgactattctttttgagcatattgttgagtggctttatcagtatagacagtcggggaataaagtttcgcaaataattgatgatgcccaagaattgttgcacttgaacttttgtgagatttttatcggggaatttgagtaattcatgggctatatgtggtctggcttcatattttcctttggataatttcatcccaagtaattctatttgcgtcagtccaataatcattttctttttagataacataataccatgggctttagtgatagaggcaaactgggcaattaatgattgatgagcttttgcatcaggagaaaagagcaaaatattgtcaatatagatgagagtgttttctaatatcgggccatatatcttggtcagagccttttggaaggggcagttttgagctgaaaaagtcggcggtccattggaaatgatgatttggaatgcaaaaggatgttttaggtcagtcatctggtttgatgcttaatcgccaaaatcccgcttttaggtcaaattttgaaaaannnnnnnnnnnnnnnnnnnnnnncaaacaatgaattcttatttggtattgggaatttatcatttgataagaactcttttaggtgcttgtagttgatgagcaacttttgttgtcctcaagcttgctctgatcgattatggacataaaatgcatgacatgcccatggagaggaagttgactctattaaaccctactattgtaactctttgcattcatttgacgctatttgttgattttctggattcatgcctgggtgactagcctttgtagggtttatatcttcattaagcttaaaagggaggcttatgaagaactgttgattttttcatagaggatggtcacatttcttcaggaactctgcatgattattggcacatgagacttcgatgagctctttcttgatttgatgaaatgggtcatggtgcattagaaatagtttggtatggcttcccatggagcaaaatgttgtttgtaaccaagtccattaggaagaatacgcaaacccttcttctttgtgtaaagattaaatccaatatttaagtcttttctgagtaattttgatccaatgactctgtgaataacaaaacaccttgggaggaattgcaactgaatcggtttactgatgagttctgtgcaaaaaatacctccatttgtagcatgaaagtattatttttctatcttccaatattaggaagaatatcagggttcattatcgtgtatgacgctccagtgttaaaaaatcctgccacttttatcggtttggcatattttgttggaagaactttcacagtgatgacatgggatggttgcattgtgtgaatagtgaaaatttgataacattctggagtgttcgaatcactccattgttcaaatccacaaagagattctgagttgaattcatcatatgtgaagaagattgactctgtcatttttcttaagagacatctcagtcgtttgttggatatgtgagataagcttgattgtttttcctttagggcattgttttgcataatgcccctttttgccacacacatagcatcgataagaattttttacgaacgtcgcgcttctttcacaaaatttttattttgcgtcctttgtgctttgagaacttgaacattttggacttgtttttgttcttcaggtttttgcaagaacacgaagatttagaagggcatttgatgactaaacccctattgctacaaactttgtctagttttttggattgcttcatagatttctggagaaatttcttctgggagaacattttttcaagggcatttaagactagttagaaaatttcttcaattgtagcatctattaggctttttcccgatctagagagtagcctgaaagtttctacgccaagtggctctggaatagagtaaaggaagacttgctttagatttggatcatcaatgccacctatttggtagaatcatttagtccttcttttgtaatgcttttccaagtctcttttgtctattgaacaacacttgagcttgaaaactctgctctatgtctttcagttacttgtccgtcttggccataaaactcgacgtagagatggcttagggcatttgcgatagatggggagagttgcaagaaagtcatgtctttattcacctaagcttgtccactaatcttgcaaagtttcagtgactcttgaaacaaaattcaagaggattgtccctgtctgtgcctgcagttttggaatctttctcgccatttagatggggaatgtcatcaagattaaaattttgaaaattagaatatttactcttatgatgatgattggattttgataataggctcaatttgagagtatgcttcttctacatattgagccataaaatgtgggggtacgtcatcttcaatagtatctaaatcttgagactcgtcactagtatctaaatcttgagactcgttactagtatctgaatcttgggaccaagtttcagaagtctcttcttggtcagaggaagaagactgactgtcaaattcttcatctgtttgatggatcatggcagaaataggaatattcacagttggatgggccatgaattgctttggctcttttttcgatagggagggtgctcgtggaggagaattatcaaggctttattttttatttcccttttggttttttgttgttttttttttcatcaagcattcgtctaagtcagagaagtgagtcttcttgtgaatagattgagaaaggtgatgccagagaagtctttggcattgttgagaacaggccatggtactgatagtgtatttgatccaaaaaggattgtatttcctccaaaaaatgttgattgagaccctgtagaatatgattctctttgaaaaaaattacgtttttagagattcatactaggttttaagggctttcatttccttcttttgccaagaataatgacatcataacagaatttgattttatgatggccatgaacttgtcatgcgtctgttgaatcttgtttgtcaactattcaatgatcgtatcttgtgattgttgtttgaccattgtctcttacgggtgatgtgtttttctacccgttttaagacatgattttgggcaatcatattttctgtttgccaatttaatacttcttcggctgcggagaccttttgtagagttccatcagcatttctagttgtaggattttgtatttttggatggtgggaaatggtaccttgctcttctattttttcgaacctcttgagaggagggaaatatacatcataatcaatggaaggactggggtgatcatgtttgcgtgaggaagtaattgaactgatggttgaatagctggtgttggaaatttttctccatgcttcttcatccttttcgcttgtcttttgtaacaaggcaatactatctgtggctgtgaagtttttgaagaatcatctgaatctcatccggtaggttctggtataggctgattgtagctctttggtgcagagtatttgattgtataatcgaattttttggatggttggcctaatagatcgatgtttttgttgccgttttctagcttttacgaacgtcgtgagggctcatcatcttttagaaaacttttgtagttacaaatatccttgtattttatgcccttctgaggattcaaaagcataaattggctttccttgagaatcaaagtacaatatttctccatttgttggttggatgggtgtgatgacatattgggtgcaaaaatagctaggtggttggatgggtgtgatgacatattaggcttctgtcaaaagcaatttcaacagatccatcttcttttgtgcagtaggaaggctcaattgtagtttgaaccataggctgtagcttgtgaagcttttcatagtttgtgacccacaatttgggtaaaagctttgtgagtacatgtcggtatttgtttagaatcgacgaagatgagtaaagtattttgtgtttgaggggttaagatcaagagcatgatcttgaagccgatatgccatctggtaatggagtgtggcgccaagagaagttggatcttaaatccactcttactgtctgtacttctactttaaaagcactagtcagtcgattgtctctgagagatatgttgaaattgggaaacagagtgacgactattgttcctgcatttaaggtagtttcaatagtagctatgcatgctgatatttcctcgttcgagtatcaagaagaccaacacgagcacgagcgctaactggaaggcccttcctgccatgataatttagagcaaggtgaataacactaaagtggatgtgggtataaccatgtgtcatacattgtggagggagttcaggtggaatttcaagagtcacaaattggatttctggtattggtgcaagttggcactggctgaattttgagacttgaatgtattcttttggaattttgaaagatagtttaagtgctttaatgttgctcgtgcaaaatttcataagctttctaagttacttttctattaatcaataattttttattttttcacttaatttttttttgttaaatttagtacaaaatttatccaatttctaaagatatgtgcaccagaaatctatgtagtgacattttttttccagcaaaataaaaaaccacattccattaaaaaatataattttacatatagttgtatataaaaaaaaaaaggtgatatgaattatgcggtgtttttgatttgcaatttatgctctatagtgcattttaaactgcattttttaaactgcattttttatgctctatagtgcagtgcggtttgtgcattgtgagcgatttaaagaacactcctactctcaagtagagattgaatatttttgcaaagaaattcgtattatgttttgtaaaaccataatttgtgttattatgccagccattaatgaaagaagcaactgcattaaaaaacactaaaaaacgaatgcattccaagactacaacgcttactctctggtacacaaaatgtgaataaaagattcacaatctctctctccctctctttcacacggtcacaccccctcaaattcaaaggaaagacagataataaaacacaccatttagggaggaggtcctggtcttactcttgtcttgttgtttttctacttactaagcttcatcccattcatcattcttgtatgatactagagtgtctaccttgtgaatctgcaaaaagacccaacacaacacaaagacccaattaatcaaaattcatatctagttgatgagtgttcaaacaaaccatatatattccaagacttacctttgtatcaaaagaatgcaatttcaccatctggggattagcaatcaatttaggatcactttcaatccaagtgaatggtactgcaacatctgtatttgtatatgctagaacatcaaacacacctaaacacaaacaaaaaaaaaagcaatattgtaagtaaaatttcaccacagctgagtaaagaagtgtttttctctctctttctttctttctttctttcttacaaggctcatcaaggcatggcaagtaagtgatactagaagcaatctgtctcatgattgcttgaatctctctcataatttccttgtcacttttttcccttgacaccctgagaaatcaaaataaccaaacacaaaacaatcttaaataaataaacatggagtaaactaaagaaaaagtttggcttaccctttctcaacgacttcaccatcagtctcaatgctaaaattccacctctctaaaacttcatttgtagacttgctcattattacaagaacaactctttgtaattggccagcttccaaccactctattgaaaatacattccaaactcgaaatatcagtaaccaagatattggaaaagtcgaatgaagaaatggaaaattgatttccttttcctacatattttcttggcttccaaacagtacagagtagactaacctgaaagctgtgcgtttaggttggaaatgaatgatttgacaccctcatcttgggtaagcagcatagggagcccatatttcttcactttgacaaaactctcttcaggataaactccccgattatacagaatgctatatcatcatcaattcaacattagttccattataattatatatatacacatatattaagttacaagaaatgagacaaaagaccctaacctgttagcagcatagcctgagaaaagtgttccaaaagaaaaatccaaagtaaaagaaagaaatcagcaaaatgagatgtgaatatagaacgaaaaaaggcacccacaagaaagaaaaacctaccaaagaactcgctgacgatcgctgcagagcctcgaagggtaattatgtctttagttgtggtctttgcagccattttctgggaaagaaatctcttcttttttcagagagaaaaacaaatggggatttgttgaagaaatgaaaatgggaaatgggttgggttggattttgagtatgattgagaaaaagaaattgaattttgagtgaagcgaaattggagggtgaagaaataaagatcagatttttagcaaaagaagacgagtggaagaacaacggctagtttattttggtgtcttttcgaggccaacggtaatattttaaaatggaccatttgggataggaacaactgggtcccactcagaatttaatatttgttttttaagggattagtggaacatcatcattgacggtcctaatttgatgccacgtaggaaattgaattacgtggctgtttttgttttttttgtttaaaaattaattatggatgatatatgttgtaatttattaataatgatgattc

SEQ ID NO: 16468 - DNA, 2376 bp, Cannabis sativa
atggcaagtccagcataatttccatcctgcaaagcttgtgcaatagttctaccgaacgatgctggcaaataggaaataatgcttgtgaatatcaaaagtgatgtgccattcccgagttttaggtccgagattctctccccaatgtatgttgttagtactgaaccaagtgttaataatgtaacagatgatagaacccactctgtactgaagtcattcacataaggccgaaggaagaacacttgaccaatggcctgccatgaaaaatcacaaaccgattagtgataacacatattttatctagattgtagagtgaaagtggtcgattgcaatgcattttgtcgagtcaaatgaattaattgttgttggttgagatcctaacctgtactacggcaaacccaactgaagcataccgagtatactgaagaattttctttcttcctgcttccccttctctcttctgaagatcctgtagtttaggataaatttgtgcaagaagttggaacacaatttgtgcgttgatgaatggaacaatgccaagtgagcatatcccaagtctaccaataccacctccagaaaaagaatctagagtgcttagtaaactgttctgatccaagtttcctacgaaagcttctctattaaccccgccgagaggtacatatataccaagtcgagagagggccaagtaccctaaaagcatgagaaacttcccgggcaatgggcctttgaagaagtcaccaaaatctatggaactatcctccattgcagctgtcaagatcaaggtatattgatcaactataacagcaaccaaaaaagaagtccactttgaaaaacataaaagggaatttcatcaataaggatcatcaaagcaaacctgccattcctcgggctgagggcttctcattttttgtaccagaagtactctcaaatgtttgtgataccaagccaacaaaaccttcccaagctgtattcaaaccagaagatacatctggattgatacccaagggatcaaaaactgcaccttcagagctgaaaagtcattacaatcagcaaaagagatgaatctcattgtgatattttaccaaccatttgttaataaattttgaagaaatataataaattgaaattttaattcgtgttattcttctgtgaagtactgaaaaaagtgttatttaaacatcgtgcataagatctttattctttattttgttaaaagaaatttggaaagtgaagtcctaatttctaaacaaagaattgttataaactcttcaaagagtaatatgaaaaaggagcttggtataattaaatttgctatataaatcagcaaaagaaaatggaatttgagactttggctggtaagattactaaatgactaaagaaagattatcattgtctgataaaaatgaagaaaatcagtgcttagttattgtgggtgtacacgttgaaaaatttgtagattttaaaaaaggtcaaagaccccaacacccagtggcactttggactcacaacggatcgtgataccatgttagaatttgagataagttgaatgaggttctatctcaaaaccaaatgggaatgagagtagctcatcattcatcatcttcttatataatatgtcaatttatttccacacattaacactaaatctaatattatctatgccattactttgccagtaatcaactattcctaataaaactataaaatgaatcaatcaataatcttcacatcatatgtcatctttctggtattggcatttaacataaacaagcttaaaaaaacatctacatgggtggcaatggcacctctcactacatacctaaccactattcaccacaacctctttcattgacaagtctcttaacaacttgagcaatcatttaatcagttcctaaatcagcacacacagttcaatctaatcttaaccactactcactctcaattactcaaaatccttactttgtcaaacatttcccttctataatcatcaacaggaacatcaaacagcaaaaacaagtaatcttcttcactagggaaaaaaataaaactagaccaaaaagacccaattggagaaaagtaataaaaatccaatcttggagagcataattccataaaaatgggaacaaatgtaaagaataaagagaaaggtgaaaagggtaagcgggaaacctgttggattgaaggccaaagctccatgaattggtgttgtaaggttttctgtgaagattcaagctggcacggcatagtgatgaagttcttagtctgagagagggcttagaacagacattgttattatgagataaggaagagtagcagagtggagaggaagaagaagcttctctaaccgttatcaacataactatctctctctctctctct

SEQ ID NO: 16469 - DNA, 5526 bp, Cannabis sativa
cttaggataacggggtaacttttttgatcacaaacccacttctttgttccttagtttgatcagaaattttactgcttttggtttagaggaaaaattaaaagatgaaaatttctgcaattgggtttggattcagatgggttttgaggaatttttggtttccatgtgatgtaatctttgtttgtgacttgtttagtctcgatcggtgacgatcataatgtagaaattataaagtttgttgcttttttttaattttattttgggggttgattcatttccttttttagatttttttgatcaagttctaactatggttgattttttctgatgtttataccatctgggcatgtcaaaaactttgtagttttgtggtcaattctatgtgaatttggttatggataaccaccgttttggtttttgaatcatggagtttgttcttgcatgtttggttaactttgatcgagttaaactaattattctagattgctgtgatggattttacctgaaaagaagtttcctcacatacaaaaattctttccttttttggtgtcttttgaggggtgtggaatatccaccatggaagaatagtattcttctcttcaaagtttccttgtcttggtatacagagtttcttacttttgatccatattttataccatttttcggttctgggtttccttatttggccaatctccatttgtgtggtctcaattggctgttattccttagattgatcgctgatcaaactcataaactcttttgttttttcatttttttttaaatctttgtttaaataaaacatattccaaaagacccaattcctaggagctcaacagagattgtatctgacatagttcattgtgacacaaaagctggacataatttgcattttttttttctttctttgttaatatcattctttacttgccatgatatattataagcattggtttatttgtaggttttgagacctgaagtttgttgatcagttacatagtttcaaaggtaccttatcctctagtattaaccatataaatcttaggcaagatatgtttaaggatttagagtttgaattgaaactaataataatattgggacattgaaaaagaacaagttagtaatagtaattttcattgtccatgttttttttttcttcataatttccagaaatttagaacacctctctatttttgccaaagtttgggcactgccaaagctagcagtgcccatggatgccacagcgagcggaaccccaactatacaatatcataacattactgatcagccaattaccactatagttgccactcctgtacaaacctttgaaaggcggcaacgccattgctatggggactccacccctggagaattccccttggctgccaatccttccattgttcttcatgttctaaccacatgtaatttggaccctcaagaccttgcaaaactagaggcaagtcctcttacttgtctgcttttttgatggtaaaaacccgagttttaaacatttgaaaatcgacattgtttgtgttgtattgtattgtattgcaggcaacatgttccttttttaggcagcctgcaaactttgctcctgatttcgaattatccttaccggagcttgctgccttggatatttgtcaaaagagagctatatttaagccaatgaacaatgaagaacgtcaagaattgaagcagagatgtgggggttcatggaaactggtgctgaggtttatgctagctggagaagcatgttccaggagggagaaatcacaggcaatagcagggcctggccacagcattgctgtgacatcaaaaggagctgtttactcttttggttctaacagctcaggccagcttggacatggttccactgaagaagagtggcggcctcggccaatcaggttgcttttcacttctttgacatggaaaaggaattagttgagtgacttatgtattatggataattaatggaactctgttgtttgttgcagatcattgcaaggcattcgaattattcaagcaactgctggctctggcaggacaatgctgattagtgatgcaggccgtgtttacgcctttggcaaggactcattcggtgaaacagaattcgggggtcaaggaattaaagttgtgaaaactccacagttggttgagtctttgaaaaacatatttgtggtgcaagctgccattggaaatttcttcacagctgtattgtcaagagaaggcagggtctatactttttcttggggcagtgatggaaaacttggtcaccaaactgagccaactgatgtggaacctcatcctttattgggggccttagaaaatatacctgttgtacaaattgctgctggatattgctaccttcttgctctggcttgtcagcctagtggaatgtaagtcacattgttttcaatcctttacataatcattatagtaaggtttatatgttgttgtatttgcattgactactatgatttgtagctgtaatttggtagtgatctcatacttggaacatacttgacaggtctgtatactctgttgggtgtggcttgggtggaaaactcggacacggttcaaggagtgatgaaaagtacccgcgactaatcgaacaatttcaggttctgaatcttcagcctatggtagttgcagctggtgcttggcatgctgcagtagtgggtcgagatgggcgggtgtgcacttggggttggggccgttatggatgcttgggtcatggggatgaagattgtgcacaagctccaaagattgtggagtcattgagcaagataaaagcagttcatgttgccacaggagattacacaacctttgtggtgtctgaagatggtgatgtgtactctttcggttgtggagaatcagctagtcttggacataataacaacaatgctgttgctgctgctgctgctggagccgccgaaggagaggtctggcctaaacttacatattcctaataatgtgtcatcctctttagaagtcttgaattaacttctgattgttttgaatgaattcatctttgcagggaccaaggcacacaaatgtcttgaccccacaaattgtaacatcactgaaagaaattaatgaacgagtggtgcagatcagcctcaccaactccatatattggaatgctcacacatttgcactcactgaatcaggaaagctctatgcatttggagctggggacaaagggcagctaggaatagagctcgtcggcaaccaaactgaaagagggaatccagaacgtgttgacattgatctcagttagctaagcaaagcaaaatcatgatcatcataatgatcataatgacaatgcttttgtctctactaatttaccatcatcaacccaccactgcatttgctgtttagatttcatgtctatttgtacatacaaaatcaaacaaaagaaagaattgttttttctttttcttttcaaggtttaaggtaagcagggtacataggaggggcctaaaccaagtgttatttaagatggcttgttaatattatctttggggtaaaagaaaaaaaaaattgcttatggttgttaggctcttcatgtagtcaaatagttgatacatttgttaagggttcatttcataatttatttatgttaaactgttcatagttaatctaattagtttgttgtttgataaacttaaattcttgcatcaatctttgtctttgttaactttgttttcacttcacttggtataactgatgtgaaaaacataatgtcccaaaggctggtgtgaagctattcaaggaatggggaccagtgtaggccttggccacatgggtgaatgttcacctgtaaagggcaactgttggaccattgagtctattgtattgatggcatgaacatttgggcaatagagtttaataagcccatgaatgaattccaagtacagttagagtacagggcctaacaaagctacctttttctttgtgttgtttgcaggttttattgtgaaactcaagataatgcagaggaagaaggaggcagagatgtaagtggggcgggattgggacaggcgcggggatgactctgttcctgtcccactttttccccggttccaccggtacctatttaataataataataataaatagaataattagcatttttgttttttgaatttcttacactaccaagttgtgtctcatagtatacgattcgttaaaaatatactttgaaatataacttttacagtaacacagttttgttgtcatattatatttaatcttatcgtgaaataagtcaagtgatagatgatagttgataaatagatgtaaattaaatacctttcacttttttaatgttaatgaatattaaagtaaaactttttttattattatataataacttatatttttatttttagttttagagtaatttgcggcataaatatctaagtttaacttcccgttgcaaataaatacttaaagtttaatttttggcagtaataatacttaagttataattttgaaatttttgttggtacctggttaaataaattgtcacgtgacaatccctgattggtccaagtcattaaatttttattatttaaaaaaatagttcaaatttaccaacaagaaaatgacacgtggatataatggcttaacatttaatggtttggtacctacagagtttcagaaatataacttagctattattaccgtcaaaaattaaacttagatatttatttgtaactgagagttaaacttaagtatttatgccgcaaattattcttagttttaaaatcatttaaagtaaaagaaaatggtgaaaggtatttaatttgaatttattcatcaactattatccacacatttactgcattatttgttttacgattaaattgaataaaattaaattgaataaaatacaataggaagattaagtattattactgagtcgtatgttataggggcataacttggtagtgtaaaaaatttaaggaacaaaaatgttaattattctaaaaaataataatcattttttaaatgggtaaaataattaaaaaaaatttgaatataaaataataaaagtaaaattatataattaaaatatatctttatataaattaatacattaactattcttttaataatgcttatattaaaatgaatgtaattataaatagagaaaattactggaaaaacgattaaggataatgttatccttttttttttttttttgagagagagaaggatgatgttatcctttagagtatatattactttttttagggtaattaattactttatattattttttaatttttttaatatttttttagaaaaaaaaaattatatttttataaatttgtactataaaaataaaatttcctatatcaataagatgggctcgagataggagtatgttaagggttgacttgggccaaggtagatcaggctgtgtttagggtttgtctaggagcctaaaaaaaacttcatttcagaaaatacacaataagttgaaaaatacctcttttattcatcaattaatcaaatttacct

SEQ ID NO: 16470 - DNA, 9829 bp, Cannabis sativa
tggttattttgagttttatcaagtgattctctctatattgtatagagttctacattgacattctatagggatttgatttagctattatccgattctctaattacagttaggcttgtcgtaattagtttataatgtttagttccgagatttagaaattgtgtatattattgccatttgaaacgttataatacgatacctgttagtattgaatcatacgagattttgttggatggaaagatttgaaacgtaagaaactttcacgattctctgattttttgggtcaataaaaaaatttatgtttctttcatgcgaattaatcccatttgtatggtatttgttcctacatatatttttattttagtactgtgtttaagttttgagttttgagttttgagatgattctatatctttggtgttgatgaagtgtttggtgacattgagaaacttctcttcaaataaaatctaatttatggtgtttctaggcaatttgaattgtaattgttttatctactcatagtgacaaaataggagagcaaaataggcaatgcttcattgaatagttagttaccaatgaataacctgtttagagaagttttgaactgaaatggacaatatgtcattgaatagctaccatctaataacctgtttatgaataagtatcatttattcatttgcatctcttgagcattgttgttagtaattgacacatttctgttaaaactaacagaatttttaaaatattttaattagtgacaagaaattctgttatctatggcattgccttttctgttatctatctttgtgtttgattgttgacttccatattgagattcccaaattcaattttctaacgcttttcttttgttttgatctttccttcataggtttatatatttatttatatattcagctttgagttagcgctctcttcttaaagtatcagccgtctcatcgattacagcaaccatgtttggttctactaaccgtaagtatacttgtatttatttgttaataaaagttatttggacttatagcttaaataaattattaagctgtattgattgaaattaagtggtgaagtttttacatttggggtgtggagtctgtggaccgtggggttatttggttttgttgttttttcttcttttcttgatatgctatgctatgagttttatatttattgttttttattctcttttcttttcaaacatgtatgtgaattacagagatggttgctgtcctttctttgtggccaaatgtgcctgttattgctatgttgtagagtttgaaatattctaatgagttgaaattgtataccagcttttgggcagtcatctagtagcccatttggttctccatcagtttttgggcagaacaacaatgccgctaacaatccttttgctcccaaaccttttggtagcacaactccctttggctcccaaacagggagttctgtttttggaggcacttcaacgggtgtttttggtgctgctacgcaatcgtcacccttttcttccaccactgcctttggtgcttcaccttcaccagcttttggaagttccacaccagcttttggagcttcttctacacctgcgtttggtgcttcatcgtcgtcatttggtggtatttactctcaactcaacttattatcttgtcacgccatttatcgaaatttttattccaagctgatcaaggaattggagtttggtgtgggtgatgttgggttgcttcaccgggcatattgattttctttttctcagccgtcatttttttttctgtgctgatttggaaattcttatttggatataatgtttccttaacagaatgtgttattgttaatatatggtatttattcttgacccactgcctatgtcatgtcataagtatgggcttattttttggcagcttatgtgatgcctaggaagacttgtttcctgggttctttgcaatgtgcgtgttgtagatgacctttttttttttaagttgcagagatgtcaagtatctaattaatcttgttccttgatttcctatactgttttaacaggatcttctgtatttggtcaaaagcctgcttttggagcatttgggtccactcctactccaacaagtccttttggaagcacagctcaaccatcacagcctgcatttgggagcagtttatttggttcctccacaccttttggtggttccagtcaacctgcgttcggttctacgagcacccctgcctttggctctagcacacctgcttttggtgctacgagcactcctgcttttggtgctactagtacacctgcttttggtgccactagtagcaccccagcctttggtgctactagttcaccagccttcggcgctacaagcacccaagcgtttggtgctacaagttccccagcatttggtgcgacatctactccagcttttggtagcactgggtctacatttggcgtttcaagtacgcctttgtttggctctgggggtgcctttggtgcttcaagcactcctgcctttggtgcctcgagcactcctgcatttggtgcctcaagcactccagcctttggtgcttcaaccactcctgcctttggggcttctagtggtcagtccttcagctttgcatcctcacctgcttttggccaatcaacttctgcctttggcagcagcccttttggtgcgtcttcttctccttttggtgcccagagttcaacctttggtgagtaggctttgatgtctcggccagttatgccttttctttgttctagattcctacttatataataaatatattttggattatggtatttactagtgttatgtgatacaggatcccagtcaaccacaccaacatttgggagcactagctttgggcagcaaccagcctttggtggtcagcaagtggggagtagagttgcaccttatacaccaacacctgaaccagattctggcggtagtggtaccaatgcaactgttgggaaattagagtcaatatcagctatggctgtttacaaggataaaagccatgaagaattgagatgggaagactatcagaagggagataaaggtattatctaatatttattacagcatttccagaacattaaattttgctactctcttcatggaattgatgaaattttttatttaatataatttcaggtggacctctttctgctgcctctcagcctcctgtgatgaactttagcactcctgcttcacaaccaagctctttgactccttcaccatttggccaatcatcttcaagtctgttttctacctcaacttctaccaacatgtttggtcaaaaggctccttcagcctttaatagtacaggttttacaacctcatctaacacattcagctcatcaccaaaccttttcacctcaacttcggcagcaccttctgcgtttggaacaacaacatcgtctctatttgcacccaattcatctccatctttgttttcatcaagctcatctgcttttacaccatcagcgtttggtgctcaaggtcaagcatcagctccacaatttaattctggcctttttaattctactccacctggtcaaacgaacactgcttttggacagtctacctcctcttttggccagaatacaactcccgcttttccacagacaaatatatttaataatcagtccagtgcgtttcctaatgccttctcaagcacacctgcaccctcaacaaacactttgggtttcgggcaaacagctgtaagtctttgtgctcctaaacaagcatgtgctctttggataaattataaatttaatatttcaactgctgcaagcttgcttataacagcatgttcaaactcttgtctgcgctgtagctttgacaattctttcccatttttacaccccataaaatatttcagctgtaagctggttcagctttgataatgctgagggaatttataaatgtgaaataaatctttcattgttgatgatgaagctgtggtataatttctacattattgtattgggaatgtttgtggtctcagtttttttaaaacaattgagttctgtgtcaatgcatatctttcgaactgttaatttggtttttaaagagctgacttgttttgatttataaattatcatgacatggttccccttttgtttcatttttttaaactttttttttgtgtttgtgcctgcagccatctttctcttcggcttttacaatgaatcagccatctcaacaagttggttcaggagggtttggtgcctttcctatgatgcagccatgtaagttatgtatatattttttattttacagttctgaataaattttataatactgctgacttttatctgtttttgttgcagccaatgcaaacactggaatcttgggtaataactctgcaaatttgtaagttcatatatattcctctttatcttctactcaccattacatcttaataggatttgaaatttttatttgtgtcacgtcccgattcctttaagacagtaatgctcgttgtctatgtgatagttagtagatattcctagaaattttttcactttgccaaagtatatatatttcttgtgtggctttgtctactctagttctgtaccctttgtttgagaatctttaaatttgtaatttacaagcttcggcccttaataaatgttggtccctaaattctgtgaaagggaaaatttatatattgttttgaaagaataaatcatattggttcctgtgtattcttttttaacaggtctgcccctcaaagctcccccattcttcaaccggcaccttctaatcccttcggaacactccctgcattgccacaaatgtcaattggaaatggaggaacctcaccatcagttcaatatggaatatctagcatgcctgtaagcaacaataaattatagtttatttcgtgttctgaaattcaagtccttctagttgtttgttggatctgtttgagtttgaattcctatgtggaggctgttgccgaaaacttatttgtgatgactcaaagacactgcttatggattttttcctgttataggtactagacaaacctgctcctgttaggatatcgtcgttactgactactcgacacttatcacaaaggcgtatcaggctgcctactcgaaaatatcatccaaaaactgatggtgtaaaggtgcaatgctttttttttaatctaaacttcttctgaattggattgtttagtgtttatgatctcttttgttaaaggcgtttgttctgtttcctgcaggttgcatttttcagtgatgatgaagaaaccgtcagcacaccaaaagcagatgctttatttcttccaagagataaccccagagcacttgttattcgtcctgctgagcagtggcctttgaagtctagtgctgagaaatcatttgcaagaaaggatacatccccagtacacgagaatggtaaattattttgtttcgtacactatttctgttagctagtagaaactggtttgtgatgtgagcagatacttacccttgttccatctactgaacataatgtgttttgttttttttttttctcggcttttaaatgtttctttgttttttgcatgttggttccgtttgcactcttgctttctttgccttagtcttatgattgtatcaacattacataccttagaattagtcgagcgattgtcaatattgtgttctttcgtttttatttttaaagaataaatttccctgccaagaaaatttggttaatttttcatgactcaccctaaatatattgttcgttcagggaaattatctgaggaagcttatcatgcacccaactccaactttgagaacaataatagtatgtgttttggctttgtactcgaaaaaatatcgtattggtttagtagctacatttctagtgtagttggcattgatttataattaaatgtatatattctcctgataaacttaatttctgaaatattgaaatggaaaccaattgtttgttaatttattttcatcgttacagaagatcccgtggaaaatggtccttctgctccggagaaagccaaagtgaagagcctgaaacagaatggagtgcacgatgagcattctactcacaagggggattcttataagacccttagcgggcacagagctggtgaggctgctattgtgtacgagcacggtgcagatattgaggctcaaatgccaaagctcaggcgctctgattactacaccgagccacgaatccaagaacttgctgccaaggaaagggccgaaccaggattctgctgccgtgtcaaggactttgttgttggacgacacggtttcggtagcatcaaatttttgggcgaaacagatgtgaggcggcttgatctcgagtccttagttcagtttaacaatcgagaagtgattgtttatatggacgagagcaagaaacctcctgtgggtcaaggtcttaataagcctgctgaggttacgctccttaacatcaagtgctttgacaaaaagaccgggcgtcaatatactgaaggcccaaggattgagaaatacaaagagatgctgaagaggaaggcggaggatcaaggcgctgagtttctttcgtacgatcctataaaaggagagtggaagtttcgggtgagtcacttcagtgtatacaagttgatggaggaagacgaagatggcatttatgtgcacggtaccaacctctgaatgttaataggcagagtccgagtttgctttgcttagatgtttcggagatttcagtcggtgtgtttttttgtgcttgtggattgaaagtattgtgttggctgaggatggatgattgctttataatatgtatagaatttacgggtatgggtacccggttcagccatagcagtagcaatgtatagcattgttttgttgtgttttttggtttttggcccattgtttgggttgttacttgttgtagtaggtggtgggattcaatttcaagttaagggctcatgatgttgttaacctgaaaggaaatgaaatgatgttgtatctgtcaaatttttgtttgaaatgtgtcccactaatgttaaatttgattatttttacttattaagtttatgtcaattagtttatagtattgaaatgtcaattcatacgactatctaagttttctttcttctatcttgttcattgtcaattcactatttcaaaatataaaatttaaattaaaaactaaatagagcatcatatgtcatagtctggtattttcctctaaatattggtagacagtgtttggttcaaataaatatatacatagaaagagagagagagagaaaccagtcaaggcgattgcacgtgtgtggatgattaattactacataactacaaatcatgatatataattaagtttcttaatttaattaattcctcatctttttttcttctcaatctagaagactagaactacctaacaaaattaaatacttaaatctttatctatagatacatcgaaaattaaaataatattaatggtcaaacaaacgtacgtgtgatcgatccatgtataataaataataactacaaaagatccatggatgaactcaacaagatttcatgtctaatattttgagaatccaataacctcatcatcatcatcataaattcaaatatataaataagtttttttttattaactatttatatatatatatatataaatctattttgtgttgttcatcatactaccaagtttgaaactttttatctgaatttttctaattggctataagtcggatgtttattttacaatatcttttagtaaagaaaattaggtttcggtatttttcatcatgtttgattgtgtaccttcaaagtttataatacatattctttaatttttggcacagtaaattattattaccccgttaacttgtgttattatttttttattagcatataatttttttttttataattttctttatttttaaataatatataaatgtaggtcgcgatttatatatatcccaatacttaaaattgaaagtgatttgtttcttagtattgaaacattgtcttttctctaataaacatatataaacgctcttgttacacacatatatgtttatagtaaattaataatagaaacttcattttgtgaataattattttattattaattcccaataacttacttttaatttctagaatattaattacgtgtaattaagaagctaagtagataagtttatttaatgttaagtgtagtttgaataggaggcaaaatttcaaagtccaacccttattacaaggaaaaggatgatgtattatttatacaaatatatatttatttaaatttatttataatatcatttttttagtgaaagacaacaatgtatgaggctggggtgtcatttataaaagaaagattattaggaaaaagacacttttttttttctttgtatatatatattttttttgtgtaaaatatgattaattatttgtgatgaggttttcaatgactttattagtaataagaaagctagttgattagttatcacaaatggacagattattatctaggagaaaccaaaagaaaattaggtttaagaaaaggttagaaggtaattaactttaaatggaagattatttgactaattaactttattataatttgttttctttcaaaagaaagaaaaaaaaaactttagtataatttgtagctatttatatgatatggaaatgtagtctttgtttgtttctgattattttgactgatcaaaagtactttaaattttctttttctctcttttaaatcttgaaagttaattcagaaaaaagtttctttttattaattaaataattactattgttatatgttagtactcagctgtaaaattaatactttggggaaagagtttgaaaaattggtctaaaattaggtaagctttgtttataattatatatagttttattgttgcattggaactcttgctttttacttaaaaaaattatatatacgaaaaatttacaaaaaattagaaaagaaaaagttacaaaatattttcatatggaattttttaatttttacactttaaattattttatttacaaaaattcatctacggtagaaacaatacattattttttttttgattgttttatagttgtattatagttattattagattgttttttttttgttttataatttatttatagatttataattattgaggttaatttcttattattatttttttcttatttcagttagcatgatccaattttaaaaaaatattaacacttataaaatagttggtgaatgttataaattgtgtaactaataataataatatttaacacaatatttttgcactaatattaccctctaaaatgtcctaccaaataattatgcatgcaaagaaaattgatcctctcaccaaaaaaaatcttatattatatacatatatatagatgtaacaattttattgaacaaataataataggatgtaattttttatgataattaattaattaacaagtttttgcatgtatatagttccaattaataattaataaaaacgactataatgtactcatttcatgtaatacacacaaatcattttctattatattaatattaactaatttattcttaattatatataatttactactcaatattattatttacgaattaattaaaatcatgttgatctttatatatctgctgaatagtttgttacagtatccaaaaattaatttcctgtagttacaaatttataattgatcttaaataaatataacatacacgatataaaaaaaaaattaaactaaaaaactttcatgccgaaatagataaaccatatgtggcttacagtactacatatataatatta

SEQ ID NO: 16471 - DNA, 8645 bp, Cannabis sativa
  modified_base (7794)..(7798): a, c, t, g, unknown or other
agaaaaatgggtaacttcctcttttgtgacacccctggtttacggggattaagacacagaggtttttaatgaaagaaatgtaaaaggtttaatgttccacgtgatgatcaaagaactcactccacgccaaaatcaaaaccatacattttggaaacaaaaaaataaaataaaaattcagactttctctctctctctctgcaccaaaatcagaaacggtgatataccaattaccatatatatataaatataaatatatacataaaaatcaaaactttgcatgtaagcaccatagacaagtgtcgtttcactgaaccaaaaccttagctaggtgtgacccaaccactgctacactacttgaatttaacaccacaccacaccacacttagaaagaaaagaaagctagccttaactggctttgctatctccttctctctctttctctttttcttgattgtgatgattctttacactatactcttcttcttcttctttttcaccacgtggtctttttctttgtaacgcttcatctttgtgttatttttggcttgatgggttgctcttgttcttctcaatttgtgtaaagtttgactctttttgggtaactatggcttcttctgttcttagattcaggaagttatgttttgttgagccagttttggggtttcaatcttcttctggtgctacaacaacaacggcccaaaaagatgaaaacggtgtcgttttaaatgatgatgagaagaagaggaggagtaataataacaagaagaagaagaagcaaccaaaggaatggaggtgtatagataattgttgttggttaattgggtatatgtgtaccacttggtggcttctgttgtttctcttccattgtttgccacctacaatgactggttttcaggtacctgaatcaccaggggagaggctcaaaagagagggcttgacacctcttcatcctgttgttttggtccctggtattgtcactggtggccttgagctttgggaaggtagaccttgttctgagggactttttaggaagagactttggggtggcagtttcactgaaatcttcaagaggtttgcccttttatagttacaatttagtactggaaatttaacttaaatttttgtacaaattttagttgataatgagtgtatattggtagttttagtataatgagttacaatttagaatgaaagtatgaaactttaatggggtggtagtattatagtctttggactcttttttggttacaattaggcctgaatttttgacccttttgcattttggggtggaaattatagttgaggaaagaactttcactgaaatcttcaaaaagtttggattttttttctttatacaaattttacttgaagatgattgtatattggtagttttactagaacgagttacaatttagaatgaaagtatgaaactttaatctagtgtgatacaaatgttgatttgactgaaagtaacagtttgtaaagacttaatttttgaacccttttgtggaatgtgttggaaattttataggcctttgtgttggttggagcacttatctctacacaacgaaacagggcttgacccgcccgggattcgagttcgagcagttccaggacttgttgcagctgattattttgctcctggttactttgtttgggcagttcttattgagaatttagccaaaattggttatgaaggaaaaaacatgtacatggctgcctatgattggagattatctttccaaaatacagaggttagtatataaatctgttcttatctttcttaatacataagattgtttaattaaattagtgaatttcaattatacagattagagatcaagctttaagtagattgaagagtaaaattgaactcatgtatgtaaccaatggctataagaaagtggtagtagtccctcattctatgggggtcatttatttccttcatttcatgaaatgggttgaatcaccttcccctatgggaggtggtggtggcccgaattggtgtgctaagcacattaaagcggtcatgaatatcggtccggcttttcttggagttcctaaggctgtaagtaacatcttttctgccgagggaaaagatgttgcttttctcagggctattgccccggggcttttggattctgacatgctcggtcttcaaacgctcgagcatctcatgcgagtttctcgaacttgggattccaccatttccttattgccaaaaggtggagatactatttggggtaatttagattggtctcctgaggaaggacttagttgtgatttggataagagaaaactctcttcaagtgacactactaatttcaatcacagtgatggagatatcggttttcgaattaaagatcccattaagtatggaagagtaatctctttcggaaaggcagcttcacagattccttcttctcatcttcctcctcctgatttgaaggtacatactaattgatcattctttatagggattttttatagttaccaaaaaaaatgaaatttttatttacaaaaggttacattttactatgttgttttcgtgactaactattttagtaaaactctcttctttataagcatgattctaaaaaatttagtggcaggaacttctcggaatgcgatcttcttccgggcttaatttatcgtgtagcggtgaggtttggacggaatatgatgaagtaagcagagaaaacatcataaaagtagccgaaaacaaggcctatacagctcaaaacacctttgatttactgcgatttgtggccccgaaattgatgcaacgggctgaggctcacttctctcatggaatagctgataatctagatgatcctaaatactcacattacaagtattggtcaaatccacttgaaaccaagtaagtttacatatatagctatcgagcataaaccgttttttttggtagctgctaagtgtaatataaacctcacaaatcactcatacacgagcaatgtgggacagaacacacaaattaattaattttttttcgatacgattttgaactcaatatttacaggctacctaatgctcctgatatggagatatactctctctatggtgttggaatccctacagaaagatcatacatatacaaaatgtctccttctagcaaatgcaagagtattccatttcgaatagatagctcggtgaatggccaaggagacaacagttgcctaaagagcggtgtatactttgtggatggtgatgagagtgtcccggttttgagtgcaggcttcatgtgtgcaaaagggtggcgaggaaagacgagatttaacccgtcgggtagtgctacttacctaagagagtaccgacacaaagctccatcgagcctgctgcagggaaggggtttggagagcggtgcacatgtcgatattatgggaaatgttgctttgattgaagatgttttgagggttgctgctggggcgagcggccgagatattggaggggaccggatttattccgatatcatgaaaatgtctgagagaataaatcttcagttgtgattagatcatgagaataaaaaaggtataaagcatttcaatctagctaagcaatttttttgttggttttaatttgtaattttctatatatgcaacaaattaccaatgtgatgttagattggctcaactaagaatgaattttatagcttacttttttgcatttgaagattaatttcttttcccaaaattgtgattacaaatcctgtaatttctaacttccaacatatagatggaatggtctgctcaattttgacatgtgggctctggattgggccgtcttattggttaatcattaaatttgcgggcttaagccacaataaataataataatattaagtagtggggtggacaatatttaattaaattaaattaatttaatttaatattatattataattatattggattcaatgttaaaagttagagtctagttgggttggatcattattttttaaatctaattattaattgtattggattaaatgtccaatcttaatattaagtatctatttcatcactaagttttttagtgctgtaaatgtgagtcggattttttgacacggtacaaaattggtacaagtaaaatttgatatgaaaaaaatacgtgcttagacatgatacaacgacataaaaaaaatatggactaaattagttcaaaaacatgataaattaaaaagtaataataataaataaattatttatcaattcaaatgataataatatttaaatataataattataattacttccaaaaaaaatatttaaatataataattataattatttttatgtgattgtgtaactttttaataaaaaatataaaagtaattaaaattataatatatatatattttagtcatttagcttattaattgtaataaaaatataaaaatatggagtataaatttgagcctgtataaaaaaataagttgttctttttaggaaaaacaaactgaactaaataaaatacgacacgaatttgagcatggaacaaaattactggacttactggtcgtgttgggcctaccctacaaaattatggaatttttacaaaaatactatattttggataaaaatttacaattttattgccatacggaatttttacaaaaatactatttttttaatataaaacatgtaaaacaataaaacagaacaattaaatcaacaacggaacaactaaaaaataatcgtgaaacaatagtgaaaatttaatacagtatacagtataaaaatacatagtatttttgaaaaaaattctgttccacattaaaaaaaaataaaatttttaatatataatataaaaattcttaaaattattgtacaattcgacacaacccatatttttttatagctgagcagcacgactcgaaaccgtagtcaaaaagtcatgcacgtatttatagttatgctaagtataacacatttatgtttttcttattttttaattttttgttgtgcatttttattggctgacgaatgagaattaatatttaaaacataattatatatcttattttacctttgtcccttactcctccgtttgagtatgttatataatgaaagctgtaaaacgttttgtcccaatatatattataaaattaacaatatactcaactttacaacaatccaaactaccccaatgtatttaatatttaaatctatatatatcgtttcttctactcaactttgattatgttttaataaaatagtcaattttaaaaagaaacttgttcaaaaaaaaaacaaaaataaataaataaaaagaagaaaaatgaaaatggctatataaccccatccccaaatcaaaaataataattgtgagaactcatactcatcacgtgtagtactggttaggggtacatatttttcttatagagatttaatggtggggatttcctgtttacatagagaacaaggtgggaaaatgaagatcatttttcgttcttgaattaacgttaaatagggcggagacatggatgacacttcctgttcgacggacccgttaatattttagctatctttttaataatattttatattttatagtttatatttgtatttttttatataaatttttaaattgtgttttggattatatttagtatatcgaataattaataattgtaaaatattttatttgtatgtaatttaatattttatagatttaattttttaatataaactttagttttatattagaagattctctgcgatggatattcctttccttcattcctcatgctaaatatgcagagatatagattaaaatctttaaccagaataaaaattatttcccgccgtgtattattcatagtattattatgtgtatatatattgtgatttatttatacaattatatatatatattgatttagattgataattatagtcttaaaattcctctaatttcgtgattcataccctagctaataaaattcaaaccattaatttaagaataaattaattaattaactattatattacatataattatcttctaataatatatttaaaatatagagttatgttaaggcatctctttcatgtattattttagccctatatatactggataagattactttcaattattactaattaatataacagtaattaattaattaaaacactgtgttatacatgaatttataggccgaagaacaaagtcacaaaaagttaattatgatcttaattagggttttcacctaactaattaaactacgttgtttggtcttcatgcatatggattcaccaataattaatattgtcaattatattatagttcagatcaaatcaaataaagaaagcaaaacatgatctaacttaaatatttaattcattaattgaaacaaattattttctttcaaattggacttaattaagcttctataaatatacgtaacatgaaataattcaagacctaactagctcataataatctcattgcatgatcttctttgttgtatagattatcatacatatatataccaagtttttctataatattatattattaatatttttctatatatataataattaagaaattaaatatatggaaggaagcaatattggaggaagtttggaaacttcatcgagtccaataattattaggagtagaagaaatctaatcactgttctcagcattgatgggggtgggattagaggaattatcccagcaatcattctcacttttttagaaaaacaattacaggttccaataatatttatatatattatatatatcatgcatattttactatcaatatatatataaaattattttatattattttcgtaattatttttcacatataattttaaaaaatttaaaaatatttgggggtcaccgcccctcggccccctctagctctgtcaattcactagctataattttaaaaatacactacaagaaatttgtgctggcaaaaatttggtattgcgctggtaaaatagaatttacttctgatgtgttggcaaaagaggttggcaaatcaacgttggtattagaactttcgccagtacaaaataaaaaaagttggcaaaaatgactattcccagcgcgtaaatgagctggtaaaagttagattttagccactgcaaatatacgttggtaaaattttgatctttttgccagcgcactttgcgaaatgtattggtaaaaattacttttaccagcgctgtatcgaattgtgctgataaaagtgacatttattgtagtgatacttatactattttcagttgaatttttattttcttttacatttgtatatgatcaatgtaatattacatcaaaaaattctaaaaaaaaaattagaatatcaaaataaagatttaaacagtttgttccctgcgtataaatattgaaaaaaaatcatgcttataacaaattgtatttgaacttgattatgcattcaaataattattcagaatttctaacaatttgtgtgttatatatatactcatttgttatattcttttttggaacaaaataattgataacaattaattaataaaaacattaatattatatagttaatattacagaggcttgagggtgatgagaatgcaagaattggtgattattttgatgtgattagtggaacaagcacaggaggtcttattactgccatgttaactgcccctaaccataataatcgtcctctgtttgcttctcaagatattaaagatttctatctcaatgagtcccctaaaatcttcccacaaaaaaggtcgtgatcattataaacacacacatatatatatnnnnntatatatatataaatattaaaaataaaatattaatttctatatatatatatatataaaaatagttatagtagagacattctaactaataggaatataaacttaatttttttatatatgatggtctacaatagttatatagcattctacttgttcttatttatttattttttgaataatatacattactaaaattaaaatttaaaatagaatgagaatcagttagctcctaattagttagaaataagttagagggtagttaattagtcttcttgctgaccgtcttagtttgttaggcttttctactcttttcatcattgtatataagcaccacttgtaatcaattttcagtgaagcaaaatttttttttttttttttcactctctctttgtctatctttcaacatggtatcagagctccctcgtcctttctccacggagaatcccttcaaatcctgatttagttcaattgtctcacaacaatggtcattttttcaaaatcgtctatgattaccttttcatacactgtcgatcaaacttgatgaaaatgatttcttgccgcggagacatcaagttttagcttcaatcaaagttagctgactccaaaagtttctcgattcagatcgtgctccaccaaagttaatacaacaaaagatgaagctacaaatcgtgttagtgctgagtatgaagattaggaacaacaagataacatccttgtttcgtggctactctcgtcaatatttgagaaaactataaatcgcctattggatcagacactacaacttagatatggagttatttgagtgagtattatacagctcatatgtaacgtccccgcttcaagcctcca

SEQ ID NO: 16472 - DNA, 7377 bp, Cannabis sativa
  modified_base (4308)..(4320): a, c, t, g, unknown or other
ctgtattttgttctttgcctagacatgtaacagcatatccaccctcctaaagatgcacttaaagggaacccatgcaccactagaaacatgataaaactttcgaaccagccaaaagcagcaagaaataaacttaaaatataaaagagaacacatagattatgtcagttactaggtacaagatatgcactttttatttgatgcaaggatatgacatataatctttataggaatcaatcatgaatgcttacttcaccaggaaaattgttgttacctcaaattctgtaagccccaccataaacaatagaaatacttttcaatgaagtttgatgaaacaactttttttgccactgcattttcaaatatgccatatttgaactttttagtatctggcttgcagttattaaacacacttgtagcatttgcccaactcatgcgcttgtttccatttaaggaatcacaatctaaataatacaaatcacaactcccaatgccttcctttcgacaaaaggatttccagcaagaggtataccgatcaaccgatagcaaataccacgctgcccctagaacctgcagattcattaaagtaattcgcattcttagacaaatggatagaataaaatctcttataggtaaacaatgacagacaaagaatgaacactgaaaacagccaaagagaaagagggaaaaaaggaattgcatacatgactagccaacatgtacaacagcagattatatgcagcgcctgcccaggcggtcttagtgaccactccggttgctttgattatttgtgagcttaatggaaaaatcagatataaccgcggaacatattgaagcagaacaattagtgcgagggcattgttgttatgatcagttcgagcacttcttgttgctggtataataaaccatatgacaatctacacaatgtattaaaaaatttaggacaaaataacagtatagatcaacgttattcgccaaatacagcaaaaatttcatctaccgaatttgaggcatagcactttagcatttcccccaccccctatctattcattaaaaaaaattgaaaaagttctgcaattgtaaaaatttccaagaaaacaaatgaagaggaaaaggtccatatgcagttaagcatcattattagcaagtacccactaatctccctcaccttaaacaaagtcctatttaaacagaaaaggaatttctaattacacatttttaagaaaatctgcagaaagaaaaaccagaaaatggaactctaaaaagtacctgaggcagaggcaatgtagcaatgaggtctataaagaaatcagatctcaggtacctacgagcaatcttcttcgggtccatcacaagctcacccctcccaaacactcgagtgttaggagcaacataagccgttcggaactttataatcacgtgcaataaataaaatatgtccgcaagagtcctaaagcaagttgcaacaatccgtaaattaaagtctgttttcacacatgctgagttttcattccctcccaccacaggcaagtaaaaatacagtgggtcaacaaaaagtgccactaaacacgaaacaatgaaaacccggttccattgcaacatgatctcaccacctgggtcaagaattctgttgcgccaaggctcgtgatcttctggaaatactttagacctacctattttgaaagtatcagaaagtttaattttacccccaagaactccaccattggattccagtaatgaagatgatggaaccttatatgtagatgatgacctatcaagccactgaggaccatgatgaccccacacagattccttttgctgattcccatccgaacgaaacctgaaatccgaaaggggaagaaaaattgttggaacatttccctatgaattgtagtggacctcaaggaagttgtctttcaacagaaactgaagttttaacttttaagcacaagaaaaggaagtcattcccactatcccaaatgacaatgtataacatgaaaatgttcaacaatcctaataaatcataagaaaagatgtttattctatgttgtttttgcttccaatagtactagggagcacttcaatttcaccaataagccggcatcagagcttctattctattcaactaaagaaacttaagtcatctctattcccctctttttatattcccaatcttaatcaaagtccatttgtttaatacagatagacttttctatatattttcagaaaccaaacaaagcattaaacaactatcaacgacaagttcaacatattgtgaaaaacccatctcaatcaaaaaccaaacaaacaattaatgaattaaacattaagctttctaaggtctcaatcaaaaaatttcaatttctcatgggtcccagtattactaattaaaaaacttcacacaagtcaattccctaaaattctttcataaatacacttaacaaatccccccaaacatgtaagatccaatttcattgagctagctcaatcagttctctctctgaatcaacaaaaaacaacaaaatcaaatactttcataaacttcatcccaaaccaaaaataatcaataaaattattaaaccaagtgtacctgacaagcttttccttcttgaactccatacccagaaagaagaagaagaaagctgaaatctacgagctttcaaaaccctaacatggccaaacaaatagccctctctctctctctctctagaatgacgaatctgatgaattgaagagctctgagtagaaaagttgagaaatggttgaaaagagtgggaaaggaaagagagtcgaaactgttaaggacttgtttggtagttaggggtagttataggcatttcaacgcgttagaaaaagcaataaaccaaacactgtcttaagcgagtcaaaagatagttttgacacagtggtgaaaagcaaagcgagttgagtatctatttaatgccacgtaggacgtgcctatctattattattggctatttttgtctctttttagtccacttggaaatgttttctgttttttttatatgtaaaattaataaaataaaaaaattatatttatcatttaacaaaaattatagaatattttaatgtatattctttgatttgtgatctcttcaatattaaattaattaatttagttgccaatttggaaaataatttgttggtttaactttagggtaaaaagtgagttttagtcactcaattggttggtaaatgtttatatataatgtttaaaaaataaacatgatttttcaatattataaccactatttttgattgctttaaattcttcttaaattattataattaccaaattgtgcctttcaaaattaagaggaataatttgatagtgataatagttcgaggtgtacaatttattaatttaatgacccgtgttaatttttgaataagttgtgttaatttttttaacagatggacacaatttaatagtaataataatttattcttcaaaaaaaaaaatagtaataataatttaaagacaattaaaaacaacttgacaaatttgaaggatattatcaaataataataatagtttacaccacaaaaatcctacttttctatatacacttaaaaaaaataattatgtgaattttttttatatttattaaataattgacgttaattctcattattttgcgaacatattttttttggatataatgttaggatttttcttttataatattaatattttattgtctaatttttctttcagacattttttttatactaattgtaattttaacgttgtgacctatacattagctttttttttattactggcacctcgaaagaaagccaagaaaaagactacaaagaaagcaaaacacccgcaaagactacaggagagaaaaccaaaagaaaacgagaaaaacatcccaaacaaaggaagattaaacaaactaagcccatagaagggcaaggagaaattaaacaaaacaagaactaagcaaaccaaattaaacgaaaataaacgagggccgatgagcgagcacggtcatccgctcaaccattgagcagggaaccgtcaaaattggacagatcaatacacccaaactgctgtgaattaactgtccattttgccacacagagggcagcatcattaagtctttttgggatccaagtggcctcccaaaggctcgaaaactgagtaaacatcttgaatttcaacactacatcttttcaatagataataagatgaaataaatccttctacctaatgtataacatttttaccttttttatctttatcttttcaaagttacctcaataataataataataatnnnnnnnnnnnnnataataataataataacaatattgctctccttggtaagcaaagttggagactcctctgcaatgaaaataatcttgttagtcagatattcaaagaaagatattagcctaatggaacctaccttactgctgaacttggaagcaacctgagcttcatttgaagaagcatctttgaagctcaaactctcctcaaatctgagtctcgttggtcaattggctctattactgatgtgaatattttgcttgatctttgattaccaggaaataataatggatacatacaatctcagcacccctctcttgttggccaaagatatcttctctcgttacagatggtgaaaggagttgggacctttaaattcttgctgatctctttaatgatcgagactgtggccttattcagcagttgccaatccattcccatgatgaaagggaccatatttactggtttatgcactgtcaaaattggttatgaattgttgcagcagcttagcgaatctaaccatcaagacaataattctgggttttggagggagctgtggcaccttaaaattcctccaaaagttaaagattttctctggagatgttgttctgaatgtctccctactagagttcgtttaaagcttaggcacatggacattgatgtaacctgtacgatgtgcaacctgctgccagaaacaagtcttcacttatttgtcgattgcacatttcccaagattgttagaggaaatcttttggtgcatcttgtgctagtgtggaagggacctttgctggctagtttgataaagcagtcaacaatgggcaaagcgacaataaggaagctgctgtgatgctctgctggagcattagagaagccgtaatgatttcatctttaaaaaatcccccttaacgattgataaagtggtctcatttgctaaactcactttggatcaatggatttctgctcaacactcaccttgcaatttctctcctaacaatcacactgtcagagagaaagatgagcagtggactaaaccaagtttaaatacgatcaaagttaatgtagatggtgccatctgcagtcaatcaaatagctatggattcagatgcattgttctagatcatgaaggaaattttattgaggcattccagtcagctaaaccaggtgctgttaatcctgaatttgctgaggcagtagaccctaagttggataaaatctcgtgggtggtcaaatatgatggtggaaactggctgtgtcaacgtggtgcatgctatcaagagcaaagttcgtatgtattctccatacggcattgtaatccacgaatcaaaactcattttatcataattgtttaatgtttcagttcattttgttaagcgatctgcgaataaagtggctcacttcttagctagggactcttattctaaagttgattgcatattagtaatgaatatgttcttgctaatttattagtcttacttttgaaggacctttaattaatggaagcttctatttctgttcaaaaaaaaaaaaggttttatttgaaaaaaaaaatagaaacctaaatctaaggactttggctatacatagaaataaaagagagcttaacatacaagcaattcatttcaccagaaaattggtctctctctatatatatatatagctcgcttgtctctctttctcttcctcttatctttgcccaactcaaagaaagaaaatcaactattagtgtttgagtattagcccgcacttgtcaaggtgatattcaagttattgaggaaggttgtgcaaagttcaaatttaatctcagagaaaaaagaaccaagttctacacttgtttgaaaccttgctatagaaaagattcaaagattagagtgttggaatagaacgagacataatatttcgctgcatcccaatatgagaaatctaaacttttctataatcaacatatataattagaaaataagttccatcagaacaatggtcatatcacagtgatagtctagcaagtgaattggcttgtggatctctctgtcatatttggtagagatagcatctgaagtagtggaattttgtgtattttccatttgaaatatgatgaaatgtgtttgtagaaactgaagaagttgcattaaaaggagcaataggctttggaggtgcaaagaaattgtcaatgtttgtcatggtggggaacgccttttaggagataaagagttttgttatgtcatatttcgagtattaatatggtcacaacatgtgtcacaacacgtgtcacaacacgtgtacaagagctggaaaatgaagcagctcagatattgaagaattaaatgcgttatttatattaccttaaaaaatactagtcatggttatgaattgaaatctttctttacgtgactaaagataagtcaaaataatagttgtcactagtagactaacgagatcaataacaaccatctcgggaacaacagagtatagcaaaaaacaagacaatgtactttattggtcgaacaagacagtataaaggagttcaacctaaagagcataaacgatacaaattgaggagtttacttgaaagcttatataagaattatttaaaatttcatcatgaatgatcaagtattaacaattatttttatcgaaatagtaaaaatctcacatttctaatagtggtacccatttgtgaaatgtggcccagacctatcttaaaatattttttccactagtcgcaataaattcgtactactaagatgtgaatatgaagattgatttcacgttaaattttgttaaaatagtcccttaattcaaaaactaaaaatattttagggttaattttaacaagtttttttttttaattttgcactcgttagtattcacttaaaagcttacattacacatttcaaaaaatcgtgaaatttcacagggagaaagccaagactgatgtccatcactttttaaatggacactttgagagaaaacttagttctcaagcactaacaattaggggtgttcactaagtatccgatccaatccaatcggcacgatccaatccaatccaatccgcgaaatgcggatatccgcacttg

SEQ ID NO: 16473 - DNA, 3366 bp, Cannabis sativa
ctaagtgtaatttcctcttgaaatttctaaatttttttaaaaaataatgtgtttttttcaaaaatattatgtaaattttatactgtgtactgtattaaattttcacgcagttgtttttttagttattccactgttgttttaattgttttggtttgtttggttattgtacgtttgttttataaaaaaaaagtatttttatataaaaaaaaaaatccatatgacaattaaattgtaaatttttgcccaaaattcaataattttataaaatttctatttgtattttaaaaaattatatatattattgggttggcatgacaagttttagtaaatgtcaactatagaaatacaaaactattttctccctctcatctcacttgcaccttataacaaacactacttcttgtggtaacttccattaatgatgctcaacttttttttttttgaatgtaattcatcttatctaaacttgaacttcagctaccaaacaaggtagcaactcagttgggatatcccccaagctgaaaacacagtaaggatataaactaaaagtttgggcaaacgcatgaggtactgaattcgctgattgctttacaaaataaatagaaacatttctcatagtagcaagcaaatcctagtcaaagtaggaattcttacaaataattttacaactagggattaatgtttgtaaattagtatcacattgcattaacaaggctaaattatccactaatcagatgctttatataggattacacatgggtgaatgtaaatacaagacttatgggcctatcttaaagtataaggtacggaagagtccttaatcctcgagtagtttttcaagagttgaaaaaggttgataacataccgttgcatgagggattttgggtgtacaaacttaataatacgctcctcagaattgtcattgatatcagaaattggcgtacacacatacttgtgatccctacaatttcatactggatgtactagtggtgccttttaacgtttcacatctcgtattgtgtcaccaacaaaaaatgtaatacaagagtcaatattttgtttttgatgcgtggataatttctctagttgttaaccttagggctccctttcaaggacgtcctttataagatttcaagtggacatctgttgaggtaacacataatcgttatcgaatgttattttttaaaaattgcctttagattttatagttggggtaataagtgtatagtcctagccccactatgtttaggtttagccctaataatgcatgtggaatgtggatagcaaaatagttcaaaacatatttcaaagtggtctaataaaataacaaaattgtactgctcgcatcacaactgaataagaaattacttggattatagattagcattgatattaaatattagtagtgtccaatactattatgtgattgtattttacaaataattaacgattatttataataaatataaaataaaaaatataaaactcgatatttaattataaaaataataatataaaaaattttgcgaaattctatttattctattgatcttaccttgattgagagctagcatgataataggtggagcccaaagggcttgtggggtcatgcgcctctcttaagtttcttagttctgttttttcatactattaaaatgatatatttttcccctcatataattttatttttgtcccaaaaatccatacatattttaatttttctcctttaaaggtgcttttaaagtctttaagtaatgtttgtttacaatttcttacacaatctgttaatcgagccatgaattatctccccataaaaattcagtgttatattgattgtatgtttaatgaaaggaatgctcctattgaatttatttctattttattgagtgatttgctctgatttaataaaatgaagtttattaaaaaagaaaaaaaaaagtggtagctagctctccacaaattactaacctaataaaaataaatcatttaacctaaaaaagcctacaacaattgttagagttcatatatcatttttatcaataaaatcccatattcttgaaaattttaaatatttttttttggtaagaatatacttaatcatttgagggccaaaattagtgtccactttcccaaaaaaaaaagaatattttaatattattcacatgatcttatcgtcaaacaaccaattaatcatgaatgaaaaagaaaaaaaaaaaataatcatgaatgatgtgaggaacatattttaacattagagtgtatgatttcattatcactatgcatccatctttgattgaaaaaaaattgttatacacgtgttgtatgacacattttaggttttttcacgttttgttcttcctccatacatacctatttattttaattaacattagccaccataaacattaatcatgattatgtaaggtgggtctcaataagaattgtataacaatttatataattgaaatttgatttgtataaattcaattagaggcttcaattttttagactaaggtttctctagccctttattcttactcccttggttttggttgacacttctgctttacgtctggctgcggaagaatgtggttgtttgcggcgatggcttttaggcagggacggacccaattgttttaatgtgggggctagtaaaaatattactttttaaaaaaattaatttttttttaatttgataattatagactaaaatagtaaaaaagccctcacaaaattaaataaatctagtaaaaatgattataatatatgtataaatattttttaataatgaaaagcccccacaaagaaaaatttctgggtccgtcactgcttttagggtagatgcgtggtaatggtttggcattggtttttctatattatttgttgtattcctttgctttgtttgccttttttttttggtagtttttgtaagtttcattttgtttcttaactcgattgatgaaatagtatttttctccagagaaacatattagtgtgttatcatgttgtctttaagacattggctttgtgtcatttttagttaatctattcaaagtttacactagggttgttagacaaattggagtatcaagatataagtttcatgatttatatctttatagtttggttagtaatgttgtgcctccgttataggatgatgttatttttgattcatgacttcattatcgtaatattagcttattgttgtttggtagttttttttttatgagatatgtatgacttttttaagctttatctcacttgttgaactatctcttcttttagcatttgaattattaagacagttaaagttaatggtgtttggttctttctgttagagttagttagtgtccaacttttctaatt

SEQ ID NO: 16474 - DNA, 11517 bp, Cannabis sativa
  modified_base (4836)..(4846): a, c, t, g, unknown or other
  modified_base (5109)..(5115): a, c, t, g, unknown or other
  modified_base (10912)..(10923): a, c, t, g, unknown or other
acaagataatatgctttctatatataatacccaaagaaaatataacattaataataaaaaagtagtattatggaaatgggcccatcagaccattaaaaataacaaagtctaacagcccattaccaaataacttagtacttaattaagttaacgagcctattgagtagttattaatgaggtatgcttgtttcaatagcggcattttaattagcagcagcgatgatttacttttcattactttgaagttcactttttcttaatattttttctttgtgtttagtttatatatgcttagcagctatgcttttgctagaatgatttataaactgtatgttcttaattttgtcatttgaaatacacaaatgatgttaaggttagttttctttcagatttctgggtgcctgtaaagtttaatcgatcaagaatctcataaatattaaggtctaaacagttcaaccattagacaagaaccaagctataacttttatgtattgaaaggatactgacataaagctcttcaccatttttagatacagagctgaaaataacattagtaaacgtaggactaaaggcacaacaatatgaagtcaaaataaaagcataatgattaaaatagtgacaaatactataaccaaaaagatacataccattatacattacaacttacaacatatttagcttcatacaatcatttcaaaacaaaaagaatgcattatttgtgagctaaagcagagaaaatccatcaaaatgttggttactagaaaagctagccatgattttgctcacctctatgagattgaaatagtcaaagaatagttttaataatagaaattttgcagtcatatatagtttcagtctttcatgcattcagactagctagataaatgggatatttaatttatcaaataagaagaataagatcaatattctgtacaaagtaaaccaataaaacaacatgattttagtgcattgcttaaggttaagcattgttcttaagaaatagttgttgacattaaatttaatgatagtgtaacaccaaatttaatgtgttgattagagatgcttacttcacaaaaagcagcaaatactaaccttagaataatatataagcaaaagcatagtgaaaaaaggctataaaatcttctctcctgctaaattgttatgtgcaatataaaaatatgagagaataaacaccttctattagagttaatctcacattgttcatgtgtgaaaataaaaacgatatataagatgaatgagctactcttttcaaattttaacatggtatcagagtcgcttgtgatccgttgtgagcctaaaatatcgcaggtccaaaaagacgagccataaaaagagtcgcttgtgatctgtagtgagcccaaagtgtcggcggttcaaaaagacaagtcaaactaaaaacttctgttgtctcccagccaatgtgtgtcaattttcagtgttgcggtctttgatctattttaaattcacaaattttccaacgtgtacacctacaaatttcttaatatttaaccttgttggattctttcaaatgtcacatttggtcatgtggactcttaaaaatcgttcgttgtacccacacttttctctaattactaattgattttgaaatggaatctcatgtatcttaaccactttcatcccaaattctaataccttagtagcagaacgttctagaatgggtggccgcctccccagctgagattgggagtgatctaatgtctcaaaagcgtattacccctgataaccaaaacctactcacttgaagtagaccattccacctagtggcgaacccagaatttaaagtgagaggggacataattttttttgcaaggcatgggggcaaaagtaaactttaaaaagaaaaaaaataattctctttatagtaattgaatcattaacatctaccctatatataatctagtttaacgattacactaaagctaatgttatgtctataaatatcatttttttttacaaatatatgtcgtaactaactaaattacatgtacatttttttcggccgatttattttcaaggggagcgactaccccgccttgcctacatgtgggtccgcccctgactccaccgtcatcacatatttttctaccttaattttgagttcttgaaagaaaataatgaaattgctaaactcaattatataaaggaaaagttcatgatttattacttaaaaaataattattacaataatttatatacaataaaatatatttatactttatagtagcttaattcctctatatgagaactcccacaaaaagaataagacatcaagaacttaaacattgtcattcttcttatattttcttttttcaaactctaaggtgttgtttggttgggatgaataaaaatataaaaataagaatgagaataaaaataaaaataagagtggaatagaataaaattcaaaatacataaaaaaaattataaaaaaatcattaattttttttctcatgttatattagaattgtctttctttccatttcaaaataaaattctcattccacgaaaatagtaaaataaatgacattctaatactttaaaatacaatcaaataaaaaaataaaataaattttttttcatttccattctatttcatttcattacctctaaaagtattgaatgtgattcaatataaacactcttactatgaatataaacgatcaaattagcataaacagtgacaaacaggacgatgaccttcttttttacaaatacctcctttcacattacaagacaactttttacattcggtgttgcatttagagcgttttgaatatgaatgaggacataagtctgtacgccatgtgctatggcaacatgaaacaggtttacgatcatcttttcctaaagtaccattaagacctacaaaaattaaaaatatatggttgagtattagtgacaaatatacatattcaatcgtatatatatatataagttgatattacataatttattaacattttataaaaaaaaaatgagaccaaccaaaagaaaaaatgagaattccaagaagaagaataaaagaaagaacttcaatcttggccattttttttttatagttttctccttttttttttctataattttttacacatttttatatccaattgaaaaattaattaattaaaatttctattttctttttcttcaactttggtaaaattagtgatatgtatataagttttgttacgagatattgtattttaggaaaatatataagggtgattatggttttctagatatagtttgttttatttatttattttgaaataatacatcttgttgattcggatgagttttaggaagtcaactaagctattttgggcgctattttgtaatttttatactttgtaaaaaaaaatggacacattatatacttagtaattttgaacgaaaatgataagaaattgagtggaaaatttatcatggcatcaagagcataaagagattctaaggacgaactagagtgttttctaaaatagtatttctaaaattaattaattagtataataattttataaaaggaattaatttttagcaaaataattatgtatggtcgatcaaaagttacactatacattcataaaactactattatggtcatttatgagaccatcatgcatggtctcgtagagtaaaatgagtgtagttattttgcaaattttactatttcaaattgttaacttggcaaagaaaagaaaagaaaagagatgaggacaagaaggtggatatgacatttcatctcggatcaagtgatggcgcaattacgtgatgagaattatgatgaatgcatgggttaaccttgctaaaagcctggaagggatgattttgaagccaaaaatagaggaaaaacttgagggttggattgttttgcattcgatgttgttggtgtcatggttgaccaacaccattgaattgtcgatttgttctaaacttggagaagaatatcatgttgatgcaaaactcctgtggaacaatctcaaaagcaggttttgtgtgataagtgtatgtgttggaactttcactaaattttacaaaatctttgtatgagaagtgaagtgtatgagtgtattgagtcccacatgggataggattaatactttattagaagtgtatataatatacaattttgacatgtgggttgggccaccaaacggtattcagttttgtgcgcatgagtgagaactcacacattgtgcatgtcattttatattttggaaaaaatttatttattaaattattattttttaattaattaatttagtttttaaatgtgtttaattaattattaagtagagataatttcttatctgtaatttcaacaacgtttacatgattcctacgatcagaaaaaatgattttcttcttgttacttcattctgtacgttcctatataatgcattgaaaccaacgggagaaatatatcatctttctctaaaaaaattatatacagttttatacgattatattactaatatattacgcacgagcagtagttgtggtatagttcttccaaataaaaaggtctccgtaaacgtcattgttggaaagttgtccactccgggttcaatcttcagtatagctagccctcccctggaaactctcctggaaaggagttccagctggctagttgtctctcatggaatggtaaattcggatagtcgactccaacagactatatcctatccgaaagcagcatcaacaagtatccttggtccgtgagtccaaaaactcatatatgttctcggaggctctgacatttaagctggcgtggagactttgctcaaagaggannnnnnnnnnntagttatttctaactaacttaacaatttcgtttcttggagccactgactttagaatcttaatcctaaacctataaatacccattgacttcgttattttttgataaattaagaactcaaatatacgagattaagaactcagagagaagagattaagaactcagagagaagagattaagagcttgagagataaaagattgagaggtagagagagaggtgcagagaaaagagagagattgagtttggattttgtaagaagaatctnnnnnnnatgaagaagattcttgggtgtaagtgtgagagttgaaacacttagtgaggactcaacagagaatcttgtcttgactgtattgtacctattcttactcaatcaataaagaaaatttttggtggtgttccagaattggagtagagccatagatcacatcaatctatagggctagaaccagtatatatcatggtgttaatttctttaatctctgcacttactgttttctggttttcattagtttgtttgcctctgtctttatccgattgtttttttttttgatttgttaatcttgtcattactaattgtgtgattgtttaaagttttgacattttgattttgcaccattagtcgtaattttttcacagtagtattttattggatgtggtatttcgacggttctttatcctacaatagagctccaatacagttttttgctaggctattttatcttggggacgacgaggcaatcatagtctgcttgcacagttttgaacagtgtcgcgaacgtcttaaagagagcgacatagtccacgactcaacccaaacttttattcggtatactcgatccttttattttcataagcaataattttcaatagtatgtgatctaaaatattatgggagaatacaagcaagaaaaaaaaaaagaattaatgacatggaggagagttgtcttcatccactgaaaaactcttttttgtaattataatttccaatttataataaaaaggaatatatatctaggtacaaaatggcttgttgtactgttaaatttatgggaaatttcattttctatacttagaaaatcttaaaaaaatttccctaaatacatacttaataagtaagaattgccacatgcatgcatgtgtgagtgggacatattgtgacccatgatcatctattcttcgactctccttaattagttttggagagttttacaacatataattaagagttggcttgggagtggcctagcttctttgaaaaacttcggaattggcttagattaaagagaccaataaaactcattttgatatattctatgctggatatttgagaaaatatataaaactttaaagttaagctaaaactagtacaggagaaaaagttattttgataaaattatcctcaaaaatacaaaggagttgtaattgttttggaggggagttccctttatgtttgcatttagctcggtttgattaatagaaattttattttaaaaaaacatatagtcaatctgatcatcaagtaagttataacattgtacaatgcatgcatgcatgtcaattcatcttctctgttggcaaactagagacgacggtgacctggtcccgaccttactagcatcgaaggtgtactaatcaatgaattcctaaagcctactttcttttttgacaaaatcaaccaagcttaaccggtcacgacatgttgttgatattgatcgagtttcggtaacttaaaaaaaaaattctcttttaacttttgtttttttagctttggtactcatgactccatacatattttattgaaaattgtaaaattttaacatatttataaaaatatagaaaataattaatttataatagatattcacctcgtgtgaaataaaatctaacttcgtcactaataataatgataataataataataataatataaaaatttaaatcaaaatattgtaccattagactccgaattataaagaggaattaactaattacctcattcttttatttattttttaaaacatgtgattcatctatctcactaataaaattaatcagatctcaataatacctaatattatgaatattgcaaatgatcaaactaacaaaaacagtgacaaacaggacgaccttcacttttacaaaaacctcctttctcattacatgacagcttatggcattcggcattgcaattagaaggatctgagtatgaatgaggacataagtcgggacgccatgtgcttttacaacatgagagaagcttatgaggatcttcacctagagtaccattgaaccctctaccttcacactccaaaccttgataaataaaagaaaacaaaaatgtatagtgtgagtaataatataaaacacatatatattaagattttttcaagaaaaaataaaatattgagacgaaccaaaggaaaaaatgagaactcccacaagaagaacaagagatagaacttgaaatttggccattctttctataattttcttgctttttcttttagattcctattatttattttaggtctatgaaaatatgctaactacctactcattcttatatacagctgaagaaatgaaattatttaattaaatttttgtgttttgttttttaaatttgccaaaattagttatgtatttaagttcccatatgatcaattgaacttgatatatatcaactttgtatacatagaattaagactatacgtatatagtactagttaacaaagaagttttttacattttattggagtaaaatatatatatgtaagttttatatggtattacatgggtacattttccttctataattttcaatttgcttttgataaaaggaatatccaatctttatgatccaatttagtatctacatacaatatacaacattcaattctcatattcctattatatgtatacttgtttttactttttatggaaacatgcatagcaaaacccaaacctaagctaatttagattgtatatattgtaattaactgagaattttatttttatttttaattataaatatatatatatatctatatatatgaaagaacaaagcaagctacagctattcaatttccatgtatatactcatttttattctttagaaaaaatagtaattattatatagctgagaatttgttatatgcatccttactatattatatatgtatataaaaagaaaggaaaaaagcaagctaattagattatacatttaagtaattatataactgagaatttgtttttcaattttatacatatgcaagaaagaaagaagctagctgcaatacaaccattcaatttccatatgtgtacttgtttttatttctttcaaaatatgcttagtttggacattcttttattgtggtctgaattaaaagaatattctttttagattctttattttattttatttttgacttaattttttaatttgaatttgggctgaagttttaggctcttttttgggctgaagtttgggctttaagattctaaaaatattaatttttatattttggtttcaaattgccacttttttttttttgtaaggaaacttgtgcttcattagagaaaatggggagagtacaaagcaaacaagttacatggatggaaggtaaatgaccatttcacaccaactcattatctagtcctaatcataatttggcaactttatgtgccaactgattagaacccctgtacacatggacaatactaaggctaggactgaaagataacaaatttttgatactaagtaaaatatcatccagtggactatcattccagttacaagaattaagtttgtcaacaatagttttacagtccgtttatcctttctgtgtcttctctttttcttatttttaaattttcaaatatgtattatttccattttaaagatttttttttgagctatttttgaaaacaaaaaaaaatgtcctaaacctcttaataagtgacacataagtaaaagggaaaaatctctatcaaatagacgaattttgagtctataccttcatgtttataggccttttggttctactcaatgccacttaatagttggtcgatggaagttggataacatctcaaaaaaaacaacataataactagattcacctcattattagtttgaggcagaaattcgatgatagttttgatgcttgacaatggtgtgcatggggtttgtagatgttcattgatgccagtaaggggttgtggtttctttgagctagggttcgaggtgcatgtttgtcgtggctatgagttaggagtaatgggtttcatcagggtttgatgtgggtatttgttaggggtgtttattggactatatccaatattttttagtttatccagatcagatctaattatatattcgatgttagattttactatatgatccgatccgatctaattaattttagtcatccattcgatccaaaatttattgaatattggattggatcgtaactatctattagatgtattttatgtgtatctattggtttgatttaggtttttctaatattttagacctagtattttttagatcggattcctccaatattcaggcccggccctgggcataggcgggcgaagcctgtgcctagagcccacctagtccaggggcccaaaaaaaaatatttctcttttgaaattatacaatttttttactgattttaaaaaataccacattttttctaaataagagcccaaaataatttttttgatggcccactaaatttcagggccggccctgccaatattttagatctagtatttattggattggatagtttcgaagaaaaagcttgtcctcttatcatgaattgtgtgaagcgtgtctcttattcagtcttgcttaatgagagccctcttaacatataactaaacttgatcttaccaacgctcatttataataatcggtcataatttttttttgaaagcaataaataaattcattgaaaatataataacgttatacaagctaattatgatcatgttcatcaaataaatactatacatgtcatgattattacgatatttttatatatccaacaaaaacctggatcatcatatctagccaaacaagttgttcatccatccgaagagcatgcacaactaattcatgagcaacacagattaggaacactcttgaaaatctagatgacaaacttgtaaaaactttaaacaataatgatcttaaaatcattatcgtggggaaacttcattgaaaaataaatcacagttgtaaaatcttggtaatagattgcaatctaatgtcagcgtcctgcaatttgttttaaaaacttgttatcctttctctgaaagcttgaagggacattaatattttaactacacataaacaaactatacattagtaggatgaaacataaaaataataaataaataaaaattattgtaaatttattcttttaaataaccaaataagcatcaatagacaaaaattatagaaattacaaacaatagttaccataaataaaatatttccaaccggaaaaaactaaaaagaaaatgtaaaaataacttatcttgttaaatacaattagtgtctgtagtagatccacaagcattcaatcaatcgtttaaataacttttataattctaataacatcaataatttataagtcaaataatttgataacttaaaattgtaattaataataaaagtaataaaataataactaactaatgtaacattatacaaaacatactttagattaagtaatttaaaataaatatcatgttatatagtaaacaaataaatattaaaataatattttaaagactaattaattgacacaaatataaacaataacaactgaattcactatataaaagaaaaaagtgtaacatatataataaaataatacatacattataagttcaataaaaaacttgataaaataaaataaatattaatttttaaaaaataataaaaaattccaagatgtggagattaatttttactaaaaatgtaaaataactgtcatcataataactatttgtttactatttcaaaaactaaataattaataataataataatnnnnnnnnnnnnaataataataataataactgcttggtactaacaattggaagatggtttgtagtaaccgcatggagaagttgttcattggatccatatatagtatttaatgttgagatcattgagatcaaaagtttgatattaaattaatcactaacaataatatcatgtttgtccttaatttatatggcaataaacaaaatatatataataagcaattaacatatatatattaatctgttaccagattttcatggccatgaatgaccgaaagatcttccgagtaaaaccacagcaaccgactccatctcaaaccactcaaaccacgcttctcccataattatttataaacaataaattaaataattactgcactatattatatatatatatatatatattactaagtacttattaattttgtaattatcgagtaataactaataaagatcttcaattcaaatgagtagttatattataacaaattcttatttttttgtttttttttttttaaaaaaaaaaaagatagacgaatatgtttttaaaatctgatatatattgtccttaacaatataggattatgtatatatcttttttccaatagga

SEQ ID NO: 16475 - DNA, 8085 bp, Cannabis sativa
tatatatatatatattttaaagtactatggaggtaaatttcatatacataaacaattaattagaagtactgttttactgagaagagattatagtatacataataattagctgtatgaggttctcacaatacgtgtatgcgtagttcataattaattagccgtttttcaaaatattaattaattaataacttaaaaattatgagattttttaaaaaaaaaaggaaattatatatgagattttaatacattactcattatgtatatatgtggatatatatatggtgcttgtatacatataaaaatcattagtactatagtactggaatatatttatattaagttttattaattaattaattagtcttgttgattatatattgaacacaaaaagaaaattaagaaaaagcatgtagaataattaaataattaatgtttgaaaaacgattataaaagtctaatctagctattataaacaaaccttataattataccagttccaaattaaggagttagcaaaaccattcgaatgatcaagtcagtattaatatgatctgacctactcaatattctatagttataaacactctttgacataatcttatatgtagcatcatgcatgatcattagaataaagattaccacatggcacattgtcattggtattatatctttcaacaaagattttccttgctatataaataaataaatatacgaaaggcatatatacatttaaaatagataattaattcgacattatcttacctcatttgatcttttgtataagtaatatattattcacatataactaattacatacccctatgttaatgctatatacccctatagtatacatgtctcgtatttagacacacaagagtaatattcaagcattttttagatgctttaatataggtataggatttaagaaagatggagttttcaaattttgtataattaattaataaaggaacacagtaatgttgtattagtttatctatattaaacacatggagtagtactggagattccaatggggggatagattttcctagctaaggaatatgtaatatatctattaatttaagattatatattaattaatgtacgtctttcaaagggtacatatatattaattaattaattttattaataaaattgatacgaaatgtccgactttaactattatgcaggccatttgaggctgcaaagcatatcgcagtaggttgagatcatcagtatatattgaattcaagtagttaagacaaaccacattcttttcatttgttgtcttaattagcaacacaaaatgacaatgtgacattaaactctggcattttgctcaaaagaagtgaacatggtgagctgtagatgatgaataacaaaatcatacctcatatatatatataagatatccccttgtcactttttatttatttaattaatttttagtagtttaattttaagatatactactatggtgtgtgaaagttggaagtcattttgggagagtagtccagttgtgaagaagctctcttattcccctgactccctaaaaaagtcattttttggggtcatgtctttttcacttcgttttaagtcctaaaatttctgaggtgattccatgtcatatactgcaattcacagttggaatccacatatatatgatcagaacatgactttcttggcaataacctctctctttttttcatgataatattattactttctcagtcacctaacacaactatatagtattcattagttttagtggctaataatcttatagcttttcacattatacaagatgggtatgttgctttccgctattatatatcttattaatttgaacataattgtacaattaacatatataatataagataactctcatgaatgacattataaactatatactctgatccgattttatgaatgatccaatgaaaaagacaattaagataaaatcccactttcccctttttaacttttggagaattaataaatatcattatacacactgctacaattattacacattagttaattattactttgttgccatgaactataatcccccaaatgattggggctcttttggggttgagtagaatgggcctttttttcaataaggaaaaaggctatagagtgaattaattcccccaaatcattcattattacttttattaataatttaatatatatgtgatatatatctatattgaacacaaattttcttttcaaataatataaaataaactttcaaatctatcaagaacttcgcgattgatacttgtctatcccttagaggctgaagctccattcacgttctttctctctttcggccatttaggactcaatattatataaataaatttatatatatacacacatatattgattacaaatgatttctctcttactattcatgagacccttctaattgcttgcacatggatattgatgatatcttgagccccacgtcgttgatcttgtatagaagggcatattccccttatcatgagatatttatttatcttattttgcctccctatttttcatctccaatggtttttctttttttaaatattattccatatgtacataatataaatatataaaaatgttagttgaaatgcacattacaaaagacacaatctgaacaagtatcctatctactacttaggcggccatgcatatgtaacaaaaatatattccacaaaacattgtgagtacccattcaaaaatattatgcttatacaacaaaaatgcatctaattaatttcaaatcccatgtatatattgagaaaacacagtagtggaattaatacgcaaaaaataaaaattgccttattaattaaaaattatatcacaatatctatattaaaaaatcattcatcatcatttgggataccatattatatacaatcaaatatttaatgcaattattaatttgaaccttttaatgatcagatatattgtgaactataataattgcttaactttattaattagacaactgatataacatttgattgtcacataaaatgaagttttacacaatctattattaatttgaccattgatggaaaatttgattgtcacataaatgaagcaatcaatccaatcttaattattattagaccatatattgatataacatttgcctttcaatataaaatgaagcaatttacagtcccatccatagaaaattttatagttactaaacgaagttacaatctattagaccattgatagatttcacataattgaaattttcaatttgcaaattagacaattgatatagacattaattataatgtcacatataaattaagctctcttcaaattagctataattgcaatattagtggggtcatcaaatcttcaaggagcttcttttttgtcctgagattgtttgaaatcagaatcttaatctaattgggttaaatcggatctttgtgatgatgatcaagtcatctgaaactgaactaactcttatacatctcttattattattattagttttttgtgtcaattaataaatatatgattttcgtaaatgatcatttggtggttatgttatacatagaatttagagtcattcagcaataagatttgattagtcatagattgggcgggtaggagatttgtgtgggagaaaaccagccaccattaattttgattaattaaaatatgaccaagaataaaaataccttagctctgactagtataaactttaatatattaagccaaaatttcattttcctttttatttttttttcttcatgattttgtaaaaatgaaaatgaaaaccatcccctctatttatatatcaacaaccaaattatattcgcagtgtatcttgagaagatttttagatggaggggaaatttgacaagatgacagaagctacacagttggcatatatttttaatatataaggataaaaacttatatttatctgtaaaaaaaaaaattaatatcttttatattttaaactaaatcaatcattaatatgttttttttatttgaaggtgacttaattatttaattattctatgctgtgtcaaagccatgacgggtaactactactggttaattcccctatataaggaagactcttctgtcaaaccttttcattcaacaagcaacagttttctctctctctttttctctcaactctttcttctctctcttctcttgatttattctctctgtgaccatatatatcaaaactcatcatcctttaatttaagaaaaagactttctcagcaaatattcgagtcccatctcagaattaaacaaacaaagatatatagttgatatatataatatgggtatagagattgagcaaccttcagttggtttatcaaaggtggcgaattctgacactcatggagaagactcgccctattttgctggctggaaagcatatgatgaaaatccttatcatgaaatcactaacccatcaggtgtcatacagatgggattagctgagaatcaagtaagtacacacatacataataatctgtatatatatatatataatcaaattaaacacacttcattagtgattattaattaataaatataaatgctaattttcttttcttcttttatatgcaacaggtttcatttgatttgctagagaagtacttagaagagaactcagaagcctgcagctggggaaaaggagtgtcgagttttagagaaaatgctttgtttcaagattaccatggccttttatctttcagacaagcaatggcaagtttcatggagaaaattagaggaggaagagctaaatttgaccccagtagaattgtcctcactgccggcgcaaccgcagccaatgagctattgacattcattttagccgatccaggcgatgctttgctcattccaaccccatactatccagggtaaaatatttttatcaattatttcatgcaaaagcataacatgaatagttattatgtattattatacatgcatattttgacgtaataactaatgaaaattttgtttatatttgtgtacagatttgatagagatttaaggtggagaactggagtgaaaattgtaccaatacactgcaatagctcaaacaatttccaaattacccctgaggctttagaggctgcatataatgaagctgagtccatgaacgttaaagtgaaaggtgttctcatcactaacccttccaaccctttgggagccaccatccaacgctcagtacttggggagattctcgatttcgtcacacgaaaaaacatccatctcgtatctgacgaaatctactcgggatcggtattctcttcctcggaattcgtgagcattgccgagattttggaggaacaaaactacaaaaactctgaacgagttcacattgtttacagtctctccaaggacctgggacttcctgggtttcgtgtcgggacgatatactcgtacaacgataaagtggtgacaacggcaaggagaatgtcgagcttcacgttgatatcttctcagactcaacatctcttggctactatgctttcagacgagaaattcaccgataattacataaagactaacagggcaaggctgcaaaagagatacgagatgataatttcagggctgaagaaatcggggatcgaatgtttaaaagggaatgcgggtttgttttgctggatgaacttgagtccgcttttggaaaaacctacgagagaaggtgagttgaaactctgggattcaattctcggcgagatgaaactcaatatctcgccgggatcttcatgccattgctccgaaccgggatggttcagggtgtgtttcgctaacatgagcgagcacacacttgaagtggctttgaaaagaatacacagttttgtggaccaaagagatcgaaagactacaacaacaaattattaattaatttctggtggtctctctctagtacaaagtaaaatctcttctctcttttgatcttcaagatcagtacactatttttttttagtattgtcacttaaatttttactttttattatgatcttgcaattcttaacccaatgaatttcaagatttattaggggtttttatttttctcatgatcatatgtaatagtagttgtaaatcatgatttatataatatgtaatgatatttttgcttgctttgcttttagcgaaggaagttctcatcatttcacataaattaaatcaatatgtatattttaattcctgtaattcttattacaaatacattaaaaatttataatgtttttacccctcaaattaacatatttccacaaattctactctaaataaataagtaaattaaatgagaaaatatatcattgagtgaactcgtgagtgtacatttatcattactgataatctatatgtaatatatataacatatatttaaatgtcagaaattgtaaccatatatatgccataatcgtagctcacattcgtatataatacgcgttttttctctgtcttttgtacaaaattaggaataatgcgaacattaattaatactatataataatattcgaacatatattagtataatcgttccttttaattaatgtacagaaatggatttaattaatctctacacactagtactaaacgaaatctgtaatataatagtaataaaaatgtttaaaaattgcatgcacactatgcaataattaaatttctagttacaaataattaagcagccaccctagtactacatataattgtctttaatatataataatataatactaaaaatacacacatattacggatgcgcgttccaaataaacgcttttaaaataaaatgagaaataaataattagtatctccatccaatttgcgtatttgactcagtcactgctcatctaattcaattagaaaatgaaaacatgatgcttattgattatcttacgagtacattaacacacatatatatataataaattaaaataattaagtatactcaataattaatcaacttgaaaagatcgagtacgtacttgtatatatagtaatttaaaaatatagatccaaagtggggactggaagaagtatatatgtactttagaaaaaaaaaaacccaaatatataaatatatattaattattatataaattaaagtatgatcatattcgtcaacagttcatggtccaagccattagacttcatggctttggttggaatatcaaaccaaaaaacttctcctaaccctttttattgtgacaaaacttctcctaacccctttgacatttggggattggaagtaatatattaattacgttttttttttttgggcgtgtcatggtcatattaacctggcttgattgagatgtattaattagataagattttgcattaatatgaactttgtttataggaaggcttgcttgccacgctttacaccaaatattggtccaccacgtgaccacctgatacacgccaggctcgatcggctaataatagtctatattgctttgattatattaagtttataattacatgtataattaattaataaaccctctctatttcatgctaattaataaaaactttaaaactttaacatatattcaatgaaaaagctggctttcgatctcttgattattttttgtgttttcttatatgagtttgatgaatattaaacttccataaaaggattgcatatcaactaggggattgtctatgcattataacatcatatgcagctagatatagcgatagataactagctagctaccagtgtaatgatttttataaagatatgctatatatatatatgtatgaatgtgtaatattaatatatatatatatatgtactttgcgaagtggacactttattattatatgtggagcttccattatagttttttataagttcaatttgactttccaatatcctttctatatatataactttaataaataaaatattgcaaataataggttattggtttgttaagtatggattcaatcgcttttatcatctttcaaccatttgcctacataattttgtatttttcttatatataaaaaatgggttaacgtcgagattataaagcattattataagttcaataa

SEQ ID NO: 16476 - DNA, 2444 bp, Cannabis sativa
acctgatcatgcagcttaacacaaaataaaaatgtttaggtgaatggtgaaaaataaccaataatattctatattgcttgttacacgatcacaccaagttgtacacattaacgaaatcgattattggtcaagattttagaagttgaacagtgtataagaagtacaatcaatttctataagcacaatcaaaacatgcatgaataaataaatagcaccatagtattaaataaaaactcacagaggaacatggtgattgagtttccagaaaacagcatatttccagtgggaatgatcacaaaggctcatcagaaactgcctcaaagtttgatgagtccccattcgctaacttttgaggtcacaaactcacaaattcgtagttattaacaaaattcaaagcccaaattgcaaacacaaaaccttctctaactgcccctatatgagcctctcccagcttgtttgatccttagtcctgctctccgtttaatcggtggccccttagaacaaagcaacaaaaacatcatggttgaaacctctctccttagtctactatgagtacactgctcaacctaacaagtctttgtaatatgttcaaaagagctatcaaatgccacgagcttcatatcctggaccaaatgaagtaaaatttccatcaactttctaggaacagcaactcagaataatcagactactttcctttatccccgcgaaacgatgattctccttgaaaatgcaaattcaaatcacaaagctcccacaactttcgaaatctcgtagctgcttcgataaaaaaaaaacaacataaaacaaaccaaaacttagcttactcgcacgtaaaaatcagtcaacgaagaaaaatcaaaggaagcttaatttttatttcattttctcggcaaccaaacagaaactctaaaaatatacatttagaacaatcaaaattcaacagtaaagtaagctccaaactatccacaccttttttgctaaaacacaaacacacatacgaaaacaaactaataacaatatctgattttctcggcaaccaaacagaaaacctacagtcaaaaagtcaataacaagctttagaaaaagctccacacataccttcactgaaagaagaaaacacttggtttttatgaacactgctcctcgtgatcgaattcgttggcctccatctccgagctgcggagaaatgagaaaatcagttcggttgagatgagagggagtgagtagtgagagaaatgtggcctttttcgctctccaaagtccaaaataagcgcacaaaacggcttttctctgagaaccatatatatatatatatatacacacccgccctcaccctttcatacgaccaatttattactattacttttttaattaaatataaataaacaataaatatttatagttagcagcgagtaatgcctttccacattccattcttcttcggaatccaaaatcctacaaagtcagatttcataactcccgtatatgcactacgattccggtcccaccactaattttatatttttaacctttttcataaaacaattataattttttcacaaaaattttttattttattttacttttttaggtgcccaaaaaatcttcctcttaaaatatataattaaatcttaaataaaaattaaaaagagatgtgttctaaaactttagtcatactaatctcttttttctttctttttttatgtgtgtaatgatgtttcaaaatgcctaatactaaaatcaaaataataaactgttttcaagaaattaaaatattaaatatttaaactaaatgtataaatccatgtgacatcacataattttcttctctaaataaataggatttattttttgaattatgattattgtagagtttggactgttaaatttttatttgagcttacattaatttttagtggaaattgcattgtatattcattttactttatttgattttatttttacctttatttttcatattcttaaaaatatacctacttttatgaacgatgtcctattatatcccttaaattaatataatattatattatttaatataataaataatatgtagatttaatataataatatgttattatgtgaataatatatattaagtgttttgtaaataaattgtgtaacatatgattcatttaacttaaaattataacttacactttgtaacatggagaggagttacaaagttaattgtttttgtaacttcttttggttaatcatatttttgtgtaataaaagatatgctacacaaattgatgataggattcaaatattatgaaatataattgttacaattatataatgctcattatagaagagaaatgagatggcgtgtttgaattctaagtgtgatcaccaaaacactatattaaggagtctaatgtgctcatttagatgagaagttttctatatataaaaaaaaaaaa

SEQ ID NO: 16477 - DNA, 4006 bp, Cannabis sativa
agatttctttttggtaactataataggtaacgaagtcatatatcataaacactttctctattttattgtttagaaaaacatattaatagaaaaatatatttttaaatatgtgcaacaaatttaaaaaaaataataatgatcaaaatactttttttagatatgtaaacaataatgatagaaaaatatttttttaagtatgtgaataagttttgaaatattaacaaagatattatttttagagatgtttaaatttgaattgcaatgtttttgaaaaaataaaaaatattaaaaaaaatattatttttaaatatcatacactttttctatttttttcaaaactgtaatatttttaattttataacacttttcattgtttttgaaatatcttacattttttatattttttaaataataataataaaaatttatttttgataaaaaaattataaaagaaagacatttttgtttaatatatgcaatggattgaaatttaaaatgcaatattaaaaaagaaagctttatatatatagacacataaaacataacatcaaaaatataagatttatatgcatattgagtttaaattttaattgtaatgttttaaaataacaacaacactttttttatgtaaccacatctaatataactacgcaatgtatgtacagtacgcgtatacttagatatacattgataatttttattttcattttatgtatttttagttatatttttttaataaatgagcaagcttatatatattcacatcaaactcaattacaacaaaaggttaagccgaaacaatttattacaagatattatgagcattcccacccaatctttatctattctattgaagctttgtattgattttttctttttgattttttttggtaattataatatttaagaaagtcacgtattataaatattttttctattttattgtgttttcaaaaaaaaatattaatcaaaaaatatatttttaaatacatgcagtcagtttaaacaaataataataaaaaaatgtttggaatatatgtaacaaacaataataaaaaaaaaatatttgtttaaatatgtccactgagttttaaaaaaaataataaaaaaagatataattttttaaatttatgtaaataaatttaaatttaaattataatattttattaaaaaattactttttatttaccacatataatattagagataagagaaacgtaaatatagactcatcatataatttctggttcggaattctttttcatatgttgaccgcgattcgtttctgttaggaaatatacatgtaatattaagatgagaacacagacaattgtataattgaaataatcaaaataacatgtatatttcttgctacgttgacacaaaagaatattttagagactactactaaatattcacgctaattttagtagaaaaagtaattaaattatttatttttctttttcaacttctaatttttggtgatactttttcaatattaccccataatcattaattattttcgaacaatttcaactgctgatcgttttttcttaactttttgtgcgcctatgccactacatattaggaatctatagtaatttattttttttcttccatttccaactctggtatataaagtatatgtgtatttaaatcataggtagtagtggtcaaaatttatcactattgtattaatcattctactttttagtctacgttaatgtaaataccaagtcaaaacgcataattgaaaaggttgagtttggtaataaagtgggtctacgataattaattaatcgccggctgccgattaattaaggtttggtaacattgttaaaattatagcatattttgaaaagggataaagtctactattattaataatactccatgattggtacgaaactaacattaattcgtaagttgttgatgatgtgatcgtaaatttgtattaaacgagcattgctattagctactagtggtgtctaagtaccctcaagacgtgttaccttacgattcactagcaatactcccaaaaagctattagactaatagcaatattaacacgtagaatagtgtttaacaccacttttacattttagcatttttcttattaaagtgaggtgtttgtatgctcactgtaattttgcttatcattattaatttgaaaattattattttgaacaatcttacgtgttccaactgttattggttgttgtttttgtttataaataacagttaagactttaatatattactcagctgagtctattttggtgaaaaattaacatcaaaccatatatataacctgaaactatttccttttcctatctgtaaaacccttctattgtctatccttaacttgtggcatgaatttttaatctaatctctaatttcaaaaaaaaaatatatcgaaaattggaagcaaatgtattattaattatgtttcattttacaggacatacactacaacaaaaaatgacattttatcctcatttttaatgatactttatcccgattattgttaaaataaaaatcaagatatatatcctctacaaaaatcgggataaaaaattatattttatcccaatttttatgacttggatttaaaggttttttctatttttagaggaatttgcggcgaaatatacttgtgtttattatctcatttttcgcactatgacgtggcagcacatgctggtgacacgtagaccttattccctacatctggctggagagatgtttcgagcaaagctcagcatacacctacacgaataatgtcttcccaaccgagcagtagagaatccgggcagcgtatcaacacttagtaattccaagacttgcatcgtgaagcgcaaaaacaatccctataagcctggaatcgtatcacagaaatatgacaagctgtccaaatcccacaatctatgtattttaaatatgtgatgtatgttcttaccaactatagacattgtaagcaaaagagaaacctctcctcaagtatttagccctataaatagtgatccattctcactggtagagaggtcgaaagaattactttaaagaaatctaagagagcatactcagagatttcattgtgagagcttcacaagaggaaacactatattctttgttcttgagttaatacaaatcaaggggagtaggctattaccaaactagcggggccgaacctctttaaaaccttgtgttcattattgcttattaattcatacttcacattaattacattttctatcgcttacaatttgactcattgtcgttgactaaaagcgaggttaatattttggtgctttcattgagagaattaatccaagtttgctctttgctttaagtgtgatcagacacacaagatggtggtacaaactcgcagaggcgtggtcgatcaggtggatccactggtggcagatcctgcactacaaactccatggaatgcaagggtcccaccagtcaccaatcctgagtaaccaaacacgcacctacctactgcgggtcaaggtgtgacatctcctttggctggaatcacacccggtgtgcaagagactggaaacacaagtttatcagccgaactgggtactcccaatactggaatcccttcagcaacaaatgttcagacgaccattggagatgacactgagatccaaaacctccgtaatgctcttggtctcatgcaaggtcatactaatattttgcatcataatcaggaagagcttcgtgctgcagtgaaccttgcgttcgaagagcaaaggcgccagttcgtcgaatggagggatagagagatggaaacgttgaaggctcaataggcagccatcgatgatcgaacaagagaggccaccgtactggtattgcgggcctaccaagttgctaaccagcaacctgcgtccagcattttactaggcaactcgaaagaaattcgtgcgggcactctgcccaaactctgaacggtcagccgtccaatccccgatcacaggttccacctgtgggccaa

SEQ ID NO: 16478 - DNA, 6499 bp, Cannabis sativa
tttaagaataaaatattaaggttttttaagtatagaaaatcaaatttccctatgaaaaaagcttttgacagggttgagtgaccttttctcaaaaacatcctcgctcacatgggtttcccctccaggtttacttctctaatcatgagttgtctttccactgccatctaccgtttatcccttaatggtaatttgtctaacaattttttctcttcccgtggaatccgtcaaggagaccctttatccccatatctctttcttcttgtggctgagggactctcaactgccattagaatcaaggagatgactaatgatttctctggaatcaaaatttgccggggagctcctcccatgtcccacctcttgttcgctgatgacagtatgttgttcacccctgtcactgctcagtcaagtactgccataaatgacttcctccgtatctatcatcaggcaactggtcatttagtcaatctgtaaaaatcctccatccttttctcacccaacactcctctggactcccaaaatctgttcagaaattcactacatctcactaacgagggttttattagcaaatacctgggggttccacactgtgttggcagggttagaaactctactttccattaccttatccaaaatgtttcttccaagatgaatgtctggcatggaaatttttttctagggctggtaaggaaacacttattaaagccgtaattcaggctatcccctcttttgccatgtcttgttttaagctccctacatccatttgtcgggctattcaacgtctaatttctaaattttggtggggctcgacttcaagtggtaataaaatccactagaagaaattgtctgctatctccatttcaaaattttttggtggtcttggatttagatctcttgtccatcataatcaagcgcttcttaccaagcaagcttggagaatttggtctaatccagattcctttcttcattcaattcttaaagccagatatttcaaaaactcaaatttcttgtctgcacgcccccaacagttacaacatctcttcacttagagaagcattctcgggggtcgtcaactccttaaaaagggtcttgtctggaaaattagtagtggcaatgatatccctatttctacttcaaactggataccaaacataactcacccaactcttcttcatcccattgatccttctctttccactgtgtcttttttcataaacccaaacaatacctggaatatgggaaaactacggcattatctcccacattaccaagcaaagtcagttctacaaatttctcttgacccaaatcccgtgacagcctcatttggggatatcaccagtctggcattcttactgttaactctgcttatcaccttgcttcctcatcctccaatgtcaattcaccatcctcatctaattccaatgcctttaagcacttgtggaaaactctatggaaccttcccatcccaccaaaaatcaaacactttacttggaaagctttcaatcacattctcccttgtgctcttaacctgttccataagaaagtcctcactgatccatattgtcacttctgtggaggcacaatggaatctgtaacccatgcacttatagattgcaacagagtatgtttggaagcattcaaaatttaaggatttcttcacattcatagaggccaggacattaaagaatactatctccaaggcctcgccattttagctaaagaggatcttcctctgttcattagcttaatatggcatatttggaatactcgaaactcagtgctgtttaataagtcttataatactgacagtgtagaagagtttgatatgcattatttgtaggaatatcaggcggctcaaagaattaatggaacagattctccctcggcaaacacaagacagcagaaatctcaatccaactctacatcacagcacactatccctactgataatactgctttgtttgtggatgcaacgctggatcaatctagtagtgttactggtttatgcttcgttttcaagcaaggctctcaccaagtcttagcttctgcatcaattcgtaaaccaggagcccctactcctatttttgctgaaggccaagctttattggagggtctctcttgggatctctccctccagttgcagcctgatctcattttcactgactatcttaaccttgtttcgaaagttaatggcgagtggaatgataactttgccctatcaagtcttgtctcaaagatcagacaatccttctccaacttccctgcagcttccttgcatcatttacctcgacaattcaatgctgaagctcatcacctagccaaggaagcgctcaggcagagagagaggatagttaaggggaacactcggtgtttctttttcgtggctgctgtttgtattgttctatccttgcagctcttcttaaaaaaaaaaattatatttgagaattaatatcttgattatatcttgaccctattattatgctactcgaatatttaatatgtgtaaagtgaataccatctcagatatttcactaatcggatcaataattagttgtgctttcttgtctaacttctaagttttattgtggtgattatctgatttaattatggtgtcctttgttctcccacaacaaatacaatccttcgagattatatttatgttttttcatatgatcattttggaaagatactttggacttctccttttgtttatgctctattagtttgaaatttatttatttaggttacacttttatttataaaaatgtatgttgattcatcgtataaataaattaaatttatgtaatttattttaaaataaggtttataacttaagcgtatgattgtcatgattttaatatgtgaatatcattaaataatttataatttgatgtgcggctaaattaaaaataataaataaataaataattattgtttttacaattattaataaaaagatattggtctctattttttacatcccatcatattttatcttttttcattcgtgaatccctattgtcaagaaacttaggtttcagaaaaaattttgatgcaaaaattaaaaaatcatatcattctaaagtcaattttatgactccagtatattaacatacttcatggtccttctagtactagtacgaagttactaactcgactctttttattattttcagcctaaggtttatttttttaactatttcacccctgcgaacctactttttaactacttcacggtccttcaggagttttaacttctgagcctatatgttccctttttccacccctccaccaccgcgaactagcctaacctcagtggcttacttcttttatatgacccatcccatttacttctttatgaaaaagcaattacttttcattttttaacaaatgaaaaaaaaaaaaaaaatagagtatattattcttgtttgtcagcactactgcactacttactaacttgacattgcaaattaacgtgtcttgcttcaggaacttgttagtggatatataattgcttttaccctaaagcaaaagcattataatttcctttatgcttaaggaattaaagctccaatttgcaactaaatattatccaagtaaacctttttatctttaaactaaaagggttatgttgtgccactaactctaaaattaaaattaaatatacatgattatgtgtgacaaatatataattatgagtatgaaaactagcactcttactaaaattgatttctaacaataaagtttggctccgtgactcaaacaaatttgttgatttgtatttggtagtatttatgcacgtgactatggtttagatatttgattctcctattgatcgtcttccaaaaaaaaaaatgttcaaataagtaggattagtacgtgactttgaattcaatggaaaacaaaactgagcatcttagactggccatgtatatcttaacttgacaatatataaagagtactaaaataaaataagacacacacatggtcattgggttactaaacaaccaagaagacaacaaaactttgcatatattattactggcaaatatcagtccccacaaaagtatttaatcatatttttaataataaagaaataattaaataaaataaatgatcatgcccttctttgtacacttcttataactttgtgacctcaggatttgatctgcctatatggccagcacattgagtgtttgatttgatacaatgcagataaggcataaagagacaatacccaaaataaaaatatagttatctttcccattcagtaatgtagttatatagttaaaatagatttggaagaacaaaacttcatgtctatagaaaaacaagacactcctcaaattcagccttagcccccaaaaaagggttccagattaaactcaagtagtcaactccttaattttcactctaccctttctgtttaagcaatttattcttattttatttctcaataatttgttgatcatctctctgcatatatcaatgggaatccaaagtaaattcttgtacacaagtacagaaactagcccaactccaagtatttgcagcatagaagagagcatgatgagcttttatagtgccccaactagtcccacatcggaattttattcaaccactgagtcaaccacaccaataagtacaactacatatacaacttattatgaagactgtgccaacttcaacctcgaagactttgaattcgatacaagtcaccgtttccttcatctcaacgattttgaaccaaagattccgtcgccggactatggcgatccatggcgtggagattcacttccatcgtccatgtcttttgctgatgagctcttttgtgatggtaaagttgtgcctttagctcctactcctccattaaaacttccaccgcgactttcagcccaaagtaatggtaaagtggttagacccgtctcgccgagaactccacgttcggttcttaataaggtggccttttcacgccagtgcttgtggaatgatgattttgatcccttcatggttgcaattgagaacgttagagggaaaaatcacaagcgtgctcggtcgatgtccccatcatcaagggcccagcctggtgaatctgtgtctttgggttggcccataatggacaatggtttagactcaaacgagcttaggcaacccaatcggtcagtttctttgagatgggcaagcccacgagagaaagccagagaagaagaagaagaagaagaagaagaacagaaaagccataaggaacaacaactgtatggattggtttcggagagcaaaagttggaaagttgtagctgagcccaaaggagttgctatggcgagacgcgtaagaaagcccgctgatcctatttcagcaccagcccaaattaagaggcaaaagaaattgtggtttcctttaaagggtccatccaatagaaaagtgagcgatgaagagaacaaggtaaaagatcaaaatgtagggttgttgtctaaggcaacctttttgagtagattaataagttttaaatccattaacaaaactcagcacaatcaggatgaaaaggcaatgacccaagctagcaagatgagcattgtacaatacaagcctaggctgtcctcactttgcttgggatatggatcaaagtatttggactaaagacagccaaatttctaggaacttgaatgtaaacatatcgtgacattgtgtagattttattcaattgtgcaaaatagtgtttttattttcatgattttaggaaagaaaaaggtcatgtaatggtggtgtagtgtgagtgtttttattgtttgaaatgaatatatagcggctccataatctagtcttatttgtggataataagacttggaaatggcccaaatttctctgtagtttttagcgattcattcgaatcattccatgtttgaattgtttttctataactgtgaagatttctaaatcaaccaaattacacttttccaaatcaaaaaaaaaaaaaaaaaaaaaccaaattacactttctgtgtttaagttatctttttttttttttctttcctttcccgaatacattaaattaaggaaatataccaaaaagaaggatggacaattatgccacgttcaaactctcccataaagaaataagcatcctattaatgagttaagattattattgtggactaatataaatatagatttaatactatacacaattattaattaggtgcctaatgttaagatttataaaacacttaaatcataaatatgtctttgctaaaataaagaagaaaaagatgataaaagataaacagaagcactaacctgaagtcattgttggagattgcggagaaaattttgatcttccaagaatacactattttcttaggtattttttctgatgaaggagagaatacataaacctaagtgtttcttggggaccactaattatttatagactcatcttagaatgagttttgggtatttataatttggcccctcaacaaattataaattaacttatggtatc

SEQ ID NO: 16479 - DNA, 2814 bp, Cannabis sativa
ttttttgaaatccaaaaatttgaactattatcaaaataaaaatatcaaataataacaaatttatctttaaaaaaatagattcatctctatcttaaaaaactagtggttatttgttaagatgaagatatgtagttataactttccccaaataaattaattgatgataatatctgaatagggttaattttgtaattgaataattagggaaagagtacatggtaaataatttaattgcctaaattaattaatacataatggcgtattaaggggcattgtttaagcacaactacaaataaaacttaattattaattaactaaataaatttggtgacctttaatttgaactggtcagctactttgagattttatagacttgttaatagagcacttggccactatttttactactaaaaaaaatatgtgaatgctttttttttttttatagaatttttaatttatttatgagtatttttggaaactacaaataagggaacacgctttacacattcaagaaacaaaaaaagatttaatatgctaatttcattcaatttagtaatttattaattaatcatatttttgatagggaaatattcttaattgattaaatgaattcactaatttagaactaatgtttgacacactccttttatacacttacaataaacactataatgtgtaattaattaaatgagtgtttccatattcatcaaaacaattggttttaaagggatttttttttatttttacactttaaaatagtttttgtttttatatttttatgaaaatctacataggaacttctatagcaactaacagatcaacttaaatgacaactaaaatctacataacaatccacatagaaactaccgagtaacctcaactataaatttgaaaagaaaattaaaaaatattatatgtagtaattctcctaattttaattaatttatatcagatattgatgagttggcatcagttgagaataaatattgtaatgtacataccaatagtgtcgattatataattgatgttgttaaaaaaacttggatgtactatacacgactacatgtttatcatcgttggttgtaaagtgttgcaacaaatcagtgatgcaatgacgtcaagcctatgaagccctttatagaaccctctaccttgacattgttcccctttcactagaaaattctatattatttcctcttgcaaatctaaagcattcggttgcaaattttgtaagagaaaatgttcttcgttggcgcaaatttcttcaattttgactctcttagaacgaactagttgctaaatttattattttcttcccattttttgactcctagaaccaatttttgtgtgctattgattctctcttttttttctcatcatttcataattttgatagataatttaacagttaatggttgaatttttatttactatcatatgatctcttacatcgatgtaatatatatcggttataaacttacgctaatttaattacatatcaacacttatgctcgctttatagctgtatttgtgtacattattttcatgtttcttacaaaattacatttgaaacatctacttattactctctaacacttaatatatattatatcttataatgatattgtcttattatgctaattttatccaaacgttatgatatcatcaaatcaaaatttattaccattcttaatacaaaaaacatgaatccacatttttaagcaataaaatagaagtactctattattataaaacaaagtatacaacatattctagcatcatatatttatatataattatatatatatagatatgtatatgtctatatgtataattagtttaagtttgaataaactttcgttaagatgataaaaaagcacttgagttggtagaaaatgttacgaagggaatatctcaaatatgtcatgtacatgtgtttttgtttttgcatttattgtcttttagcttcaaaattcaaatgataacttatatatataatctcttctagttctatatatctttatacatttgtcactatagtgtatgtatttaatagcagtataagtacttaaaatttaaatttaaagttatattaatttaataatttttttaataacataaataactaatattaataaaagtgtaatttttaacaaagttcgtcggtgtaaattctaatagtgtcttcaaaaagaaaaaaaaaataaaacctaaattctaaattattagatcttaataggaacatttagtatgagttattattttcaatattcttttaataaattttaattaacaaaacttgacaaaattacaatttatattattgaaaatttacactgcttaaaaaattatttattttatgccgattacaaatataaaacttagagtaatttgcgatataaatgcttaagtttaatttaaaagagttatatttttaaaactctatgagtatctggtcgttaaatgtcaagtcattatctacgtgttattttttattgttatatttaaattaatttttttaaaaaaaacctaaaaattcatgatctaatgaacgaatcatggattattatgtggcaatttacttaatatttaataaccaagtacttagttccaaaaatataatttaagtattatattaccgctaaaaattaaacttaagtatttatttacaaccgaaaattaaacttaaatatttatcccgcaactctaaaacttataatatttatgctacaattatcatatatttaataatcaattgattgatgaaaaaaaaagcatatatatttaatatatggtttgtttttctctattgat

SEQ ID NO: 16480 - DNA, 2524 bp, Cannabis sativa
cgtgacaagaagttaaattctattcatatcacaaatagattttgatatggcattaaatgaaactaaataaaattaaatatataaagcccaaaatattataatataaatgaaaataaaataataataataaacaaagcacaaatagattttgatatgacgttttcaagatgatggtgttgccacagtgatgtcgctccctttagagtgttttgttctgtgcttcctttgtgagtcttattttgtcttttaggtctttttagagtcttgttcaagtgattttcgataccctgtttggttcatttgctttctttgtctctgtttgttgatcttgtttgtattgtgctagtgtctctgcattggtgggctatggcatccaatagtatcaatactaaagacatagaagatcgatgaagagatattcaattggatgaagaagagactgaagagaccttttacgaggaaaatgcagaagaaaaagaagagttgtccattgacaccagatggtgcctagtaagtcgacttctcactagcaatatttttgattttcaagtttttcaaaatatgttggttgacctatggaagcccaacagagatatgtatgtcaagcaactcgatcaaaatcgattcttattctaattttatcacgaaatagacatttaacgtgttattacaggtagcccatggacttatgatcaaaagaaaattattgtaacacgtttaaaggatggtgacaatcctagaacttcgagtctcaatactcttgatctttaggttcaaatacatgatttaaaatctggttttatgactgtgacagttacaaaggatgctggtaattatgtggccacttttcttgaatctgaccctaacatttttgtgggagttaggcaggattgtaggagttaggcgggaatatcttcgagtacgagtaacgttatcccttgagcatccattgaaaaggaaaaggaagttttgaaagcgtgatggtgactatttctacgctacattcaggtatgaaaatgtcccagtattttgtttcatttgcagtgttataagtcactcagataggttctgtccccgactctttgatactccagcaagcatgattataaaaccatatgctttggggatgaaagctactcctcgatgccattagaactttgtcaattcaccatatgcccgttcaggcaaggcctttgacaactcatggcctattatgaataccaataatcatggagcaaattttgctaagaataaatctactacatttatgggtatatcttctcctgatattgctcaatcaagtttgaagaataaaggggttgtggtctatgagaatcaataagatgatgaaaagttgactcaagctgaattaaaaaggaaacgttttgttatagaaaacgataatgggcctcctactaacaatatggtctaaactgatgctggttcaaaaaatgtgaatgtggtgggtcctggtgcttaggcccaccaatcattatgagtaccatcaattgaaattgttgtgggcctggaaacccatgggcttgtcgattccttgagaatattgttgttcaaaagaagcctaattttatttcttgtgtgaccttatgtaaaaaagatgttgtggaaagacttagagttggactaggctttgaaggaagtttttatgttgaagccaaggtcataaaggtggtttggctcttttatggaggatcaaggaggaagtccgtcagttaggatactctcataatcatattgatgttgaaattagtattccaaatactgttgtttggtgcctgactggtttttactaggagccaaatcaaagccttcgtttcaagacttagaagtttatccattctctatctcttgattcttagcttccttggtgtatcataggcgatattaataacattagaagctaaactaagaagaaagggggcagaccctatcctttgtcactaattgtcggcatctaggaggtcttagacagttgcaggttgattgatttagagttccgtggttacccttacacctaagaacaatgtaagggcactgctaagagtgtgaaaatttggttggaccctatcctttggcttgattctttctcctaagctactctcactaatggtgatttctcttcctcaaaccacactcccatttttcttgaaccaaaacctccattgttggctagtaatgtttaccatttttgttatgagaattgttggagcagagaacctctttgtggtcaaattgtcaaagattactgagattctaatggccatcttaccctcaatgaaaagcttaagatctgtagtacacatctggaagcatggggtcgtgagctaactatcaattttaagaagcgtctctcctacagtaagaaagttttatctcgtttaaaaagtcaagccgatcataattctacacgatattttatggtggagcagaacaactattttgaaatccttgcccaacaagagcaagagctttattggaaacaaaaatccaaacaacattggctcca

SEQ ID NO: 16481 - DNA, 4847 bp, Cannabis sativa
  modified_base (4769)..(4772): a, c, t, g, unknown or other
gaaagcagtggaattaacaatccatttggccaacttttactccttccataaatggacttataacatataggcaaaataagaaccctcccattcctgtacactttccttccctgtgtcatgtacctcttctaactttctgccctcatcacatggcctatgtaactatgcagaaactaaaaaattctgaagacaatgataaaacaatgatgcagcagggggagattaaaaaaagtatagacaaggccagagcaccagtaattcccagacaacatcagattcagccgttcataaaacaagaactggatataataatttccttaaactaaaataaagaataagccctacatttttgatacaaaatagatatcatacctgaaatagacaatgaactaggccgtgaaggagaggaaacagtcggaggtggggaaggatagaatgattctgatgtcttgccctttttaactgaggatcgagtgatgctgtacatccataaagatagactgtaaatacaaagcaggaagaaaataaaagatcaaattaacttggatactcactaaatcttctttgttggaggaatgcaagtattgggatcaacaattccctttcctttgttccttcttttctctgctattaaagcatcctcaaaaagctcctcagttggggttattgtactcctccttttctcagaggtctgtctatgaacattgactgaacatggctcgagagccttggaaataatcggaggtgaggagagatagaccatatctgatgtgttctcctttcggacggtggattgagtgatgctatacatccaacaagatacactataaatacaaagcaggaaaagaataaaagattaaagtaacttggatacttactaaatcttctttgtagcgggagtgcaagtattgggatcaacaatttcctttcctttcttccttcttttctctgctattaaagcatcctcaaaaagctcctcaattggggttattgtactcttccttttctcagaggtctgtctatgaatgttaactgaacatggatcgagaggcttggaaacaatcggaggtgaggaaagatagaccaattctgatgtgttctcctttcggacggtggattgagtgatgctgcacatccatcaagatacactataaatacaaagcaggaagaaactagaaaatcaaagtaacttggaaacgtactcaatattctttgttgcgggagtgcaagtattgggatcaagaatttcctttcctttcttccttcttttctctgctattaaagcatcctcaataagctcctcacttggggttattgtactcttccttttctcagaggtctgtctatgaacgttaactgaacatggctcgagaggcttggaaacaatcggaggtgaggagaggtagaccaattctgacgtgttctccttttggacggtggattgaatgatgctgtacatccatcaatatacactataaatacaaagcagaaagaaaataaaacatcaaagtaacttgggaacctactcaatcttctttgttgcgggcgaacaagtattggggtcaacaatttcctttcctttcttccttcttttctctgctattaaagcatcctcaaaaagctcctcagttggggttattgtatccttcctttcctcagaggtcggtctatgaacatcaactgagcatgggtcaagagcctcggaaacaattggaggtggagaaagatagactgattctgatgtgttcttctttgggactacagattgagcaacgctgcacatgcatcaagatatactataaatacaaaacagaaagcaaataaaaagatccaagtaagttagatactaactcaatcttctttgatgcaagtgtacaagtattgggatcaatattttcctttcctatgttcctccttttccctgctgttataacgtccccaaagagctcctcagttgggggtattttactcttccgtttcgcagtggtctgtccaggacctttaactgaacatgggtcgagaacctcagtattacctctacctgtaattcagaacatggaattcaacccttagtttttgattacataaataagtaaataacttatggcagtgcttccatcacagtacaaaattatacaccaccaaagctcgagtatacacatcaaatgtagcaaatccatactaaccccaatatcgaaaaactgaaattagccggtttaaaccataaaaattgagaactcaattaactatttagaacctaattaacttcagttcagaaagactaatatgtaaatccatgaaggctgtgttaaacagccagagaaccagtaattcagaaaacagacataagattcattcaaacagtcaatagaacaaaggttataattcatcgaattatctaaaaatcaaaagccagaacaaaccctagattttgaagctgaattgaacatctactatactggaagaagaagaaaaagaagacaataccagaagcagagaacaacatgggaggtcgcaaaggaggggaagcaacctgcggagggcgaagagagacattttgtgacgcgtcggtgttcttggcagagttgccatcgttattggtggtaagaagcttgttgacggtagaagaggaaaaaaggggcttctggggtttgagacgtagagaggaaaacgatggagagcgagaagattgtgtgttagcggtgtttttggtgtttgtacaatcgaagagtggctttcgaactctaactcttcttcttcgctcaccttccattttttttttctagtgcttactttccatatttcagtgaaccagacacagctcctcactcaaattatatatattattataatatgtaaaagtagaatgacagagaagaaatgtgtgtggattgtggacggggaacaattattaatttttttttttttttttttggaaaggcgggaaattctggtattttgttgggtaagttaagtaagagagtcgggtttcttctctcttcttctttttttcgagttggttcgttcagcggatgagagagagagtgagtcagtgagatgagatcaattcaattcaaaagttcaactgagcctgaaccactgttcatttttacgttccgagagggtatccacggccatattacaaggaaatgggctaattgggctgggaagagtaatgcccaattgaccccgcaatgacacaaaaattaagggaaatttgacttagtaaaaattacattaaatggattttataaaaaaacttacaaatactatatggctttactactcttttatggtattttatatgtcatattttttttggagaaaattatattgtatacttaatttactttatttgttataatttttactttcatttttatatttttaaagatgtactcacttttataaatgatgtgtctattagatccttaggttaatgtaaattatatgttagacttaagtagagagtgatgatatattgaacaactcactcataaaagtgggtatattttaataaaatttaatatgatgatatattttattaatgaatacaaaaaagaactatttatcaacttatctctattttttgaaacttaatatctaaaactcatattttaagtttgtattttcagtccaactttaaaggttaaatttgtaatttcaaaattaaattcaaactgtgtaatcatttttcttaatttatttttatatattttttaaaataaaaatagaagttgttttttccactttttgtatttaggggtaggcatccgatccaacccaacctttttcttctcatccgatccaatccattcagtaattgggtttagaaattcatcatctgatccatctaattaaaccttaaaatccaatccaattactaattggattggatcagttttttaattggatatctaattaaacacctaattttcaatattaacttaaaaatatgaagaaaaatacataaaaactaagtatcaccctttatttaagtttaatacttcataaacttaccatcgttacaagtgtaatgtacccaaaagttttaaataattaaaacaacaacatttctaagtaataaaatagaacaaaacatcatgaaaataaatacacaaaacaaccaaatattacaaatttaacacacaaaaaaatcaaataaaaatataattaatatatttttcaatatttttattatataaataattttttaacatatataaatgtaattggattagatcggtttttaattgaattttgagattgacatccaataactgatccaatccaattagaatctaacttttagcattcaatctaatccaattgtaattggatatccaattttttataattggattggatcgattctgttcaattggattggattggatgatgcccacccctagctgtatgtaatgagttcccctatttctcttccactgtttttctttttctcctataactgatggtagactcttcgcattctcattttagggtttctttatctcacttgttcttcttctctacatttctattcatcttctataatcggcacatcactcttcttattgttattattttttcttctttttcttagtgggttgttgattatttttttttttcttattctttgtatggcgtcgacttgttttttcagaggtcatcgataccatttcattttggattgtattgtgattatgtgttgctttaaggtttgttaatagtttaggtggatagttggttttgttgggttttgtgccctnnnnaaaacccatttcaatataataagatttactaattaataaagattagaaatcacattttatgttgcattgttcaca

SEQ ID NO: 16482 - DNA, 7141 bp, Cannabis sativa
ctctctagctttcattatcctttttataaatatgtgtagtgtaaattttctttttaatacccttgtttatttattaacctataaactttaggtcgaaaatttattaaataagtgattttaatgtatgtataagtattgccaaaccaagtcatatcttatttcaaagtttgctagggacatcactatatttgtctttggattgttttttgtgagatcttgttctgtggttactatagttttcaaaggaccataaccaagtttgatactcaacattgggaaatcattaaatctctcaacatgttgaaagcaaggatcccaaagggagctcctagatctctctttcttctattatgcctaaaaaaaacactcaaaatatactgaagagaaaagccaatgccgataaaagcctcatccccactcccaaccccacgaatacaaaagtctttctctttgaaacacattttaatcaccagacatacaccttagacaagtgcaatgaaaaccaaacccttgggacaggaaagtttgacgagcatcgcgatccatactagcatctatgtagcatatccgaagctcttcacctgcaaaagaaaagaaatccacaattagatatccttagaaatatagatttacaaagtacgctaatcaaatgagtcaatagatagataggtgttgatgaattcttagtacgatattagctatttctagtgtgaaccacagtggtgagcagcaaactgcttcactaaacaaagagcttcatagagttattcacacgaaagatagcataatgtcgctatttgtatttctattcagtcactctactaattatttgataataaaactgtttttttttcctttttttgttcactcaaattcaccaacagttaaggggatgttaaggagaaagcataagcgactgtcaggacaaactttcaattcgaaggaaaaagagcatttgaaaaaggaaaataaactaatacacatgaggcaaaccttcctccacatcacgcagagccatcaatttcgcatctgcactctctatccatatgatgtgggtgttgggatctgtagtgaaaataccagacaattcgaataagagactatgacaggttttcagaaagaactcaggaccagttttgcttccttgtagcatatagttaatctcggaaattatggataccaaatgttttttttccccaaggaaagtctattaacaatttattattaatttgtagcaaaagtgtataaacaaattgattacatatacttcataataatcaaaaattgcccctctaccatattagttccgaaaatttgaatgaaccccaaacaaattgattacatatgcttcttttgcttttgttatttgttttttctttcttagacacaataatataaacaaaatttttggctcaataatcagaaacaggaagaaacaaatgcagcctttacttattacattaaaaggcaagaacttagttacttaccgcagtcgtgattatagaacgaaggaagcatataaacggcatttcctacagcaccttcagcttctacagaggctgcagcagcttggagaagatcttcataaagtcctccagcacactcaattcgaaacgcattaattcgaatccgtgccagaattccagtgtaccattgcttggttaaaacttgaaacgttaaaggaaagtgatttctaaaacagtgatacataacaatgaagctaaaaagtaaaagggcaaaaaatcacattaaacttcagccattgagaggatacatgccatcttttcatcaggaaattttgccacttcaaaagcactcttcagcatatcaaagccttcttccatctgaaattcatgacttaaaattacgataggcacaaaaaagtaatgtaaatcatggttgaagagatataaatatgtcactgacctctgaaatcatccgaggagacaacatagcaggctgaagtatgtcgagaaggtcagcagatgtggctcctgataggaccatacatgcaaaccgctttactaggagtggatattttaaaccatgagacctttacaatgagactagttaaatattaaaacaacaagaaaatatgagtttgtttttcacacaaataacaaagaagaagatttcattaccggcaatagtcattaaaatctacccaatctgctttgccctcgacaccaaggaaagactgaaaaaaaattaaacaaagtttgaaataaagctgattgtgtgactaaatgtgaagacccataatccatttcagaagctctggtgaaaaattaagcagacctcattctttacaaatcaaaagtcatttgtggaaagatctgaacttggagaaagaaaaccactaactaaatacattcatgacttaatgataccaaaatggaagtactgtacagaagcacaaatataactaattggaagagaaaaatttgaattcaactcatacgtaacttagtatatttaagcaggtattcaataatattctgtgaaacaaaacatcaaacacgtggtgggcagtaccttagcttgttcttcgcacttctcactgcaaaaagcaacacttggagatcgatcaactgcagaatttttaacctttttgagacagaaataacagacactttggatggtagagagagaagggtaagagacgaggggtttagccgtgtgtaagagctctccggcgctaattctcctagtagcgaaaactcctcggccggatgactccgtgagctggacctggaccggcggcggtgctgcttggactggaatctcattgtcaggttgggcctcgtcggaggtggagaatgacgatcctagaggtgcatttttctgaaaacgctgcgttttaaaccgcgaaagacagcaacggctgtggcggagcaaggtccagtttgacatttttaagtcaacacctttgagtttgactattcgattcccagaaactaaagaggatttccttcctgtcaaactttctcggggcgggtccgccccgaccccttagaaacccgactgtttatttatttttaagcttatgtattatagtatagatggtatatgaaatttaagtagatccccttcataggatcattctattagactttcaacagattttgtcatttaaaaacaaaattaatctaatttattttcatgatcgcatacgttctagctattttagaccataaatttttaaaaaaattataaatagtttacagtatcaaaaaattctgaagctcgacataaccaaagcctacaataaagttggatggcgattcattgaagaagttatgcttaaacttggctatgatgagagatgggttaagaaaattatggggtgtgtgattatggtgaactactcaattctgttgaatggtgaagctaggggcaatattattccgagacgtgggcttagacaagataacccattgtctcattctttttttttttttttaaattttgtactgaagttttttctagtttgattcagtagaggactaatgggaacattaatggcttaaagtttggaaggaatggtctatcgatttctcattttttttttttcagatgacaacttgattttctaggatgcaaatgaaaatgattgccaatgcttcaagacggtcttactcaaatatatggaagcctcatgccaacttattaatttcaacaaatcagagttgtcctttgggaaagttgttcccatggaaagaagaagggcagttgttcccatggaaagaagaagggctttagctgatatccttagggttagaattgtggacaaccatggcttttacttggggttaccgtcctttgtggagagaagaaagaaagatatctttgactacattaagaacaaagtgtggaataaattaagaggatggaaagggtctttattctcagcagcagggaaagaaactttaatcaaagtcgtagctaaagtgatttccacttactacatgatgattcaaatttgttcaaattgtaccagatgtggtgggagtgctattgaggataatgttcatgctattttgaagtgttctgcgacattagcaacctaaaaaaagagtggattttggaacaaattgaaggaccggggctcaaacgacccaatggagttccttgaattcatgagatcgtctttgtctctgaaggagtttggcttgtttgatgttatttcttggcatttatggaattgcagaaataaatggattcatggggaatccctcccgaggcagatatgactattgagtagtgtttgagttttcttggtgattttcttgctttgtcttcaaagagccacaagttaaaggatccgaaggcgtcccaaagatggagatcacctgaattcaacaagctaaaattaaatgttgatgtcggtgtttgtacaagcttgtagtcaagcagtgttggtacagttgttagggaccatcttggcagggttctttggcaaagatggagtattggtagcaacttttatctcctttggcagcggagcttgctgcgattagatcgagactacaattggtggcatagcccaagttgcaggacgtctttattgtgtctcattgtctggttgctattcaacttatttattctaattctaagggttgtagagatgttgatagtatcctgttggatattgataaactgaggtctgttttgattggttgtagtcttagtttcgagcgtagagatgcgaacttttttgctcattgtatcgctaagtatgctttagagtctaaagtgtctgcttgttggaccggggtgcttccctgtgttgctagtcctttagctgttcaggacttgccttcctctctgtgagggtccttgttgttgttggtctgggcttcttttccttcaaaaaaaaaattagatttaaacaattacttaccactcgtataagaaaaatggtcgtgtgtgcaacaaaatatgtaaatcttatttttgattttgtaaactacttaaaaaattttaaaaatttataaatagtcttaagtaactattacgtagacgatcataaaaaaaaattgactaaaaaattcttttgtatgctaaaaaatataggggttctactgaaatacccctttaggagagtgtactatagacttaccatatagtatataggttatttttttaaaaaaataataaactaacttccttttttttatttgttattttttgttcttttaggtaaaatgaatatgtatattaccacttaaacatcatttacatcaaaacaacacaatttcaatcatggcatgaacgtattacagttttccaaactattcaatatctactttagatactttcttaggcataacacttctaagtatattctttacatcatattgtatcccttttacaattgtctctgttgtgtgtacttttaaattccatatagcctcattgcaatgccacacttgataaactagtacaacaagtgccatagcaaagacatgccttcgaaacctgctatctttttccttcctcatccatctcaatagacctgctactgtattagcagcagagttccattccagctaacctttaatctcttccaaacaataagaactcagatggcaattaaagaataaatgttcatttacctcttaatgtgattcacatagtggacactcttcatctcagatgatattgaatctaaaaaatcttcctttaagtctcaatatatccaatattgcaagctaaagtataaatctatgtttgagaagtgaaagcttgttccacacctctccttgacaataaactcattgttttggagaataaagagcttgataaccatctgtaatttgatttggctttgtaaaatctatagcagagggtaagttgttaaatttgtctttgatttttaccacttgcctccagtactaactgatatttgatgatcctttgtgtgttctctaatctctatctcctatatatactgcattcacccatttgacccataatgtatcttggttcaattcaattgtccatacatacttttatattgctgcttcattccattcttgaatccttctaaatcccattcttctttccttctttagattacacatgtcatccctagatactaaaccaggaccatttgtttcagctagacatttctataaaaaaactcttataacctgaattcactcgctgcaacacttttcttagaagtatcatgatttgtgactaatatgagtgcgtataaaaaaaagatcgagttcactaaagtggccctccccacatatgacaaattttttgaactacaaactcttattcgaatcaccatctttttcagtaagaattcacattaagttgttgtcaacctttttgagattgctgttgctaaattctaagatttcaatgacactttatacatcatgctcactcatttgacaacaataaatggataacttggcttcactgggtagaagacccgaggtatgagagaagattttcaaccctaaagcatactgtatattgagataaattctccatgaaaaaaaaataataaaacatcacctttaaaacacaaataattcaagttcagtgtctcacaccactcataggacttgaaatcttctttggagtctaatttcatcataacttgggataagtattccattctaaggacaaaaagaagaggagacatcaggtcaccttgtctcgaacccctttttgcctcaaagaacctgtgcatagtcccattaaaaatgagattgaattttggagttcttacaaatagcataatcaactggataatatgttcggggaactcaaaatcaattgacatctcttcaatgaagtctcattctaatgtgtcatacactttcttcaagcctagctttatcatacaatttggctttgtgttgttccttccataatggtgcaccaaatcttaacaaaccattatattatagaccttcgacaaacctactttgatttttaaaaatgaaatccagaagcaccatttctcaatctggaacaaataagcttggttgcaattttgtaaatgagctattggtcaaagatataaaattgagtcaggacaattacctttcataatcaaagacatcagtgtgttgggttttgtatcctaaataaaaccctttacaatctgattagt

SEQ ID NO: 16483 - DNA, 10782 bp, Cannabis sativa
  modified_base (4741)..(4749): a, c, t, g, unknown or other
accttaaattatttgttatttagttcattactttttctttagctttgtaacataaggagttgaatttagagggattgtttatgttcttcaaaattttgtaactttggcctttgcatggcagcaactttgagttggttgtcgtttatttcaacagcctttgaaaacgacaacattatcaagagtttaagcaacgacatgttttgtactcttaaacgacaacagattataaaattcttttgaggaataatcactctgttgaagtgaacttcattagtgaaatttattttaaatatggaaaaatgttttgttttaagtttttatttaactatctaattataaaacaacattagtccttatactttgttttaagataactatttgaatctataagctgagttagttggaagaagctttgtgaacacaaaaattcaagtggtttggaatttagagacttaagaaattacaaccttgctttactagaaaagtaagcttggaggttgttaactgatgaatcgtccctagtttgcaaagtctatagagctaaatacttctcaaatggttctttcctcacagctaccatcctagaaacaaaagatctcattattgcaggagctagaattcgtattggtaatgacctacatataatgattacaatagatccttggctgccagatttaaatcagccctttgtatgttcttcaattggtaataaagtggctagcctaatgcatgtgaataatcatagttgggatgttgaaattgtctcagatttattcaacaccaaggatcgtgctctcatattgaggataccacttagcagctcaaatgttaatgactgttggacttagaatagagaggcttcaggatactactctgttaaaagtgcttatagagttctgcagtagaatgatggagatgatctgctccatggttattttcgaaagaagagttaaagtgcctccgaaggtacttcacttcggttggagagctattacagggtgcttacctacaaagattcaacttcaaacaaagcacatatatgtcaatcttttatgccctatacgccatacacttgatgagttgatcattcatgtcttagtactttatcccttcgctcgctcatgttggcataggtttgttgttagcattgttactgcaacatatggagattttaaagattggttcattgatgttactcaaggaggtactaccactgttattgcagaagttttaatgatttgttatggaaggaaagaacaaaacagcagctgatatgtagttcatgcagtaagatcacatcttaaccaatggtgttatgctcaacaaaatcgattggaaactctctttgttcaaggtgttatgatcacatttcagtagtttggaagattttacagtcaaaatttaagcatggagggttaaatacaaataaaaaacaattgagagggtttagcagcaaaaaaactcaaaaagttggtttgtaaaatccttaattttgaagtttttacaaaaatactagattttcggtaaaaatttataattttactatcacaagaaattttttataaaaatgctttctttttataaaacaactataaaacaacaaaataaaaaaattaaaaataacagtgaaataactaaaaaactaccataaaacaatattgaaaacttaacacaatacatagtataaaaaatatatagtatttttgaaaataaaattctacataagaataataagaaaaagtaaatagtgccacatgtgttttcgatatagtggacttccttggcccaacattttcaaaatgggcctatgaaagcccaattagcacaccattttggactttggattgaagaaacaaatacaaattgtattaaggaaaaatataaattaggtttttttttatagagaagtcgaccagagaaacgaagaagaagaagaagaagatgggaaagcaaccagtgaggctgaaagcggtggtgtacgctctttctccgtttcagcagaaagtgatgccgggtctttggaacgatctgccttctaagatccaccacaaggtctccgagaattggctcaacgctaccctcctcctcacccctctcgtcggagtctacacgtacctttctttctttctcttttctattttctttaattcttattcaaaatctgcattagccccttttgattagacgaaaaatttgtgattttggaaattgcaagtaatttaatctcaaattgatctcgacaaccagttttagggtttctgatatgaaaatgatatttgagtctctattttgttgtttcattgttaaatattgcatctttttctgcatagtgtttgttttatatgcttagtttttgtcttaaacaaaatggttctgatttctgatttggtatgcatagttaaattttatagttgatgatgtcaaaccatagaaagagaggttattattaactaagggtaggatctagttttagaaatccaatcggaaaattttgccaaactaaccattgaaatagtaaaatttgcaaaataacctcacttaatttactttactctatgcgaccatcgtttatggtcacaccgtgtaactcatggttgtgaataaaaatgttcataaaagctatttttacaaaacattcaatcaaatctctaagtataaacgtgttggagcaatttgaaattgaaatgcccaaggaaaaaacaacattaatgtattgttgagctatagatattagggtggatatatgtgtagttttattaaggtactaaataataattgtactctctcaaaatttatgtatgcaggtatgttcagcagtatcaagagaaggagaagttatctcacaggcactgaagtttcggatgaagaactgaaccttctccccccttttctttcatgtgcaaataataaccattgcaattgcaattgcagttcagttcagttgctcaaacatatcttattttgtcacttagttttgtttatgaatttaagttttattggctgttcagcatatggatataagatgttgatttgagtttggtatggccaacaaatatattctttgaatgtcctattcttattgattgattaatataactatctgtggtgttctttaatgattgtcatggcataataagatagatagtgaaggatcaaatctagaatataatccataagtgtaaccatctgaaaagattggttagtttgtcattaaatgcagtttcaaggtgttatgatcaattgttatgtttggtgcgagggacctgaggttggcaccagttccttataccagagtataagcacatgttatgggccaggtatgagttgccagaagaattttatacttatttggttgtgacactcttcaatgttttgaactctagtagttaattctcatcttagccaacagaatatttgttctttcctcttcaacacctaaacccatgttcctgaatgttataaataatcctggtacatgcttattagctttgtctccaggtttattgcattagtttcaagttccatcttcagtaggagaacaaatttaaagctagtgatcaaagccttttcaattttgttagaatatattaaataaaaagggtaattgagtcattgtattgagggtgggtttgtgagtgagaatagaaactattcatataggtatgtaagtgaaagattgggtatgcgatgtattgagcaaatcactctttgcatcagaggggctaagggctcccatactttgtataattggcacaattcctactgttttggataccattcttgttgctgtttgtgtgtgttttgctactggttttgagtaattaagttagattgtttgttatttagattcattcacctggctttgctcttttccttacgaaaaattacaagcgaaagccatggaggacaccgacccggcttgccatttttctttagctttgtaacataagaagagggattctacagcctttgaaaacgacaacattatcaagagtttaagcatagacttgttttgtaggcttaaaagacaacaaattgtaaaacttttgaggacatgtgttggaggaatttaatttaaatgtgggaaaatgttgtctttgttttaatttttaatttatttattatcttttaactctgaataaataccttgagttaagtttttattaaccatcttcttctccacataagataactcaagatcaacatgtatagtaaattgtccaaattagagttatgtaacaaactataataaataaatcatattgaattagtaattttaggagattttaatacaataaccatattagaagaaactccatcctcacatttcgaacttgtctactttaatctagatatcataaagatgggcaaaaaataatagtaaagaaagatattgttttattttgaggagttttatttgcactctataaaatgataaatagaccttattattaaaaaaaaaataaacttaaataatttttaaaaattactcttaattttttttttaaaatttttttttcacaatattttatgttaatttcaatacctattttgatattattttcatatttttttgtatatatatatatttttttttctaagaaaatttaatataatttttatcttaatttttttgtcataatatttacaatataatttatttttatttgattggtatattttttaagaatataaattgaaaaaaaaaaattaaaaaatttagtacaattaaaaatataannnnnnnnnaaaataaaaattattaaaataaaaaaaattttgggggtgtaaataaaatttctcttcatttttacatatgtaaagggtatatttactaggacaattgaaatgcaaatagtcttagaaatttatgtagtaggcaccttaaaaggttgttctggtagaatctcttcggcatccataacaaatttttagtctaattttttttcttcatgtatgtcgtagataattaggaccacttgtaaatttttgtaaaattctgaataatttacagtgaaaaaaattatgtttaaacaattacttactacaagtataagaaaaaacagtcatatatacaataaaatatgtaaatctttttttggtattgtaaactactctaatttttttgaaaatttatacgtagtcttaaataactataacgtacacgatgacgaaaaaaataaataaataaaaattcttctgtataccgaaatagatagtaatttaccaaaataccccttttaagagggtagtgtagacttacctcagggaatgtttgttatgggagggagtgttaaggtaggtgagaatatgaattctatcttatgtttggtgtaatttttttaagtgggaatataatgggtcccacaaagttttaggagtaatatcaactcttctctacactaaaatttcacattaccctctatcttaactccacccacaaatttctaagaaattcaataattaaaagttaaaacaaacaaacacccccttaggccaattccaaggagacggcaaattatatatgctaaggattttttctccaaagacacaccattttgagattagtgctacaatgcaccacatatatatcgtgcactacagacacaatattttttttaattaatatttatatatttatattataacatgtatttataaaattaaaaatttaattttgaaaaattctacaatatacctttctaaaaatgatgtattgatgtactcatatttgattctacaatagacttttttagtctaagtttttatagttgtgtatattataattatttaagacattctccaaacagtatacatgtacactgatgtattcttacctatttcgacattcgagagacttttttagtctattttttttcaggcctgcaaaatttcaacaaatttaaaaaaatttaacacgctgaaaataaagttcaaactgtctgttgcatgcgtgactcttttatttggagaagtgcattgtaaagcacctttaaatttattgtatctaaatttaaatgtgaataccataattttatttttattttattaaaaattaatagaataataaagaatattttttagtgttgtggttggagtagaaatagtttttgacactaaatttaatgatagtgtaagaccaaatttaatgtgctccttagagatgcttttaatctttacattacattaacaaaattgtggcaaagaggagtgctaccgccaacatcctattacaaactctgtgtccgaaaatacatactagaattttttttttcacgacggtgttcgttatgcttacaacatcatccctgtaagttttttaaaaatttcgaatagtttacaataccgaaaatacgtttgaggtttttgaacacgcgtggtaaatttaaacatcaggaactctattttcggcattgtaaactattcagaatttttccaaaatttacagaaataatgctgtaactatatcgaatattgctatgaaagaaattttaaaaaaatattccgatgtgtgatttcaggcgaggatattgtaatagaaagttgtaattaaaacctacaaattacttacttgagaagaaaatacttaatcatttctttcttaattcttactatttaccattaccattacctaggtaatataatatcccaatataccattttgctaacgtcaccaactcacaaacatcccattacttatcaatcatcttctctctccttcccttatgaacttaaaacctctttctttatttcagaaactttttgaagcagaggaaagcttcaatggctgaaaaagaaggagacttgaacacggatatcaatgtttcatctaataataaagttgctgatattgtttggatttggattattgaagctctggcaagctttaaagaagtgaacttttcacttctaaatggtaaaatatatataaagtttgctcttttattgttattaacttcttcattttatcaattttgtaatttttttttggttttgtttcagatttagtgaaagcagctcctgaaattccagatgatgatttgggtaaaaatgcaaaagagatggttgcttttagaagcttagagactttgtttgaaagagttatgactccttctcatgatcaatctcaacattccaaactcagtacttttgatttctcactaagttgtgaaaatgttctaactcagattctcaatgaggtaacatatattatatctatgtgtgtatgtatatatataaattttgccaatggtctgtctttttgcttttctttttctttttttttttaatttggtaaattacatccatttttaaggaaaaatgagaaaataaatttagttaaagattttaaaattgattagaaaaaataaagaaatttctatatgaaccaaaaaaacataaaactatggcttactaagcaatgtaagtaaataaatcacttaatcaagtacaaatatatatataagagactataataaacagagcaaaggctcggaattttttccaagaaaaaccataaacatgactgagaaagaagagttctataaattttaagttatgtgatttattttgagttgattgttaaaacaaaaacaagaatctgaaatttaaagcttatggaaaggtgtacatgttcccatttttgtgaataaaaaactggaaaaaataagactattagatcaaaaaacactattagctactgagaatttagagaaagaaagcaattaaaaactgatttgtataatagcagtttaggaaggaggaaaataaataatgtcatacatcacaaagttgaatcatacatattaatgaaatgtttttgtttttatcacagagttcagaatcattacagttgtcaaaatgggatatacaaccttttcttaatcataaaagagcttcaatggaaaaatgtactttggtgcaggtatgtagatatatatttcttgattagctttttttttttatgaaaatatcttatatatttctctgatttgaaacagttcaaagaagccatttttaatgatagtactactactactactcatccatatgctgaaattttgaaagaaaagggtgtattagaatctatttataaagatgttgaatatgccaatttgaacaaaaagtcaaagttgtatgatgatgatgatgatgatgatgaggtgatgaaaattgagaagaaaaaaactatgttggatgagattagtattccttgtaatgtggtgactattggtagaaaagaaaatgatgcattgattcatatgtctttggagaatactaaggagttgataatagaaagagaagacaatgaaaaagatcatcatcaagttgaatccaacaatgaagctaatgatgttgatgatcattctccaatcaagtctgtgattcattatcattggtaaattaattactttgttgtttgaatttttctatttaacaataataataaggtagaattattatgtggcaatttcagcagcaacatgacaagtagtagtactcctcatcaacataggagaaaaaggcttcactggacaaatgaagagttacacaaactaaaggtattaacttttgatcactatattaattgttatgttgtgaaattataattaataattcatatacttatatcttattatataggagggtgtgaagatttattctggtaaaagaaagattccatggagaaaaatattggaatctaataatgtttttaaaaaagttcgtactgctgttgatcttaaagataaatggaagaatatttgcaaagccacaacagaatccaacaaatgaaaactatacatatatatatatgtaatgttgcaatggacttttgttttagtttgaaaatttgagttgactttgttgtatgtgttattcaaagtcatctaattttgattttggccctgatgatgtcttttgatgtaagaaaccaattaagatcagtagtgatgttgtaattttgtaaatgatgatatgattaatggtatgtatgttcttagaaatgtattaattctattaattttcttcttaattagataaacaccaaccaatgatctcaattctcaattatgatttactcattagtataggaaattacacttttcaaatatacaatgttaaataaataatatttcaaaatattttttaaaaaaaggtttgattaagcatttagtggtaaaagaattcaagtttccactcattcaatcttaatgagattagtttatatgtagtaattaatgttcatctgaataatttgtgtaacaatttccttgtttattgaagtattattagttttcattaataatacaaattggattatgatgtatgaatattattattagccttaagagttatgcatatgcttacttaaatttagagcagtccatggttaaaaaatatccaaaataaattttaatagccactgcagtcatgggagctactactgttgcagtattatggcaagctcttgagagtttatatcgagcttactctcgtgccaaaatggatgaacttaggactcagatccaaacagcgaggaaaggaggttcaataatggcagaatgtctaagacaaaagaaaaattaagctgacattctagtccttgctggtgacccttatccagaagctcacttagtagaaaatgttctttaaaatgtggatagtgaatatgtgcctatttttgttcagattgaagtcaagcctaagactacatggcagaaacttgaagacattcttcttagctttgacaacaaaattaaaagactacaaatcctcactaacaccagcaaagtggtgaactctatcactgcacctcaagccaatatgataggcaaaactcccatttcaagtcatggtggtggttgaagtagaggttcattcaataaaaattactctacaagtcatgatgtggtctttttacctcaaattatggtgatctagtgacaaaactggttgagagagatttagtggtggtgcaaaaccaacatgttaagtttgtggtaaatatggccactctactgctatatgctataacaagtatgatggaaattatatgggtatcgatctaggggcaaatcatactccgttcaagaacaacctaaatgctttcatagccacaccaaaaattgttgacagtgatgcttggtttgctgatagtggagccagcaaccacatcatttttgatactagagcaatgaaccagaagcagaagtatggaggtagaaaaactgccacaattagtaatggtgacaaactatccattgctcacataagtagtagttatcttcacactaacactaatcaatccttattgttaagtgacattttacatgtgtcacaaattcctaaaacttgataagtgtgtccaaactcacagttgataatcctatactaattgaattttatcccactctctgtttgattggtgacaaagcaacaagaagagtgttgctaagaggggtgcttaaagatggtctctaccagttactaccaagccacaaatctacttccacaattttctttctagattccaataacaaaccaattgtgttgttttctggtttaacttctcctaagagtgttatacaacctagagctaacgagtctttaatttctaagttatatgtttggcataaaaggttaggtcacccatctaccaaagccttgagtcatgttcttaaatcctttcaaaatcgtgcaaaaggtgtcttggatctggttcacatagatttgtggggaccagctacaattgcattgtaacgtccccgcttcaagcctcca

SEQ ID NO: 16484 - DNA, 4764 bp, Cannabis sativa
agaatgtataattaaatgtaaataaattattttgtattatatagtataataaaattatataatgtatacaaaattataaatttctcatatcttttcttctaatttttatttatttatttttttaatgtcaatatgtataaagtgttggactccaatataaacacttaaagttaaacttaaattgagtttaattaattcaaattttttgtcaagttgtattttttaagtagtttgtttgtgcttgtggcttgttataaaacatgctatgccctaattttgtatacataacactaaggtggcatttggttgaaagaaatgaaaacatatataaaaataaaaatgaaataaaataaaatttaaaatgtataaaaaaatcattagttttttttaatgttatattaacatgattttttattctattttaaaatagaatagtcattccactaaaatagtgtaaaggacattccattagaatgatattctaatactttaaaatgtaaccaaataaataaataaaataaaaatgatttctttttcattctattccatttcattactcattttcattccattctatttcatttaacaaaaatgataaatgaacatttttgttatcttgtagtagtacaaactacaaataatagaaaaatgaaactttaatataaggaggagacaaagtctattatttaccttggtgatcaagttttatatacaactttgaaataagtactttctttctctctcttattaacataatcctacttgagttcccacttgcatttaccttaatataatactatgtcaaccatgtgtataattagatctaacatctacttcaaatctaaagagcttgtttaccaactaattaaaatcaaaatatgtctctcttgccccaaaattttctttacaatcccatatggatttcaatctttctgatcatcatcactatatcatttttcaggaacaaattcaaagccacccaaagaaacaacatacctccaggaccatggaaactgcccataataggaaacttacaccaattgataggtccattaccccatcaattattatcaaaattggcaaacaaatatggtcccattatgcatcttcaactaggagaagtatcagccataataatctcttcccccgaatcagccaaacaagtccttaaaaccaacgacctcagcttcgcaaaccggccaaacggggttgcagccgaaatcatgtcatatggtaatttaggcataggcttcacaccttatagtgactattggagacagatgaggaaaatttgtgtattggaattattaagtggtaaaagagtgatgtcgtttagatcaataagagaagaagaggtacgaaattttgttgactttttgacaactggggttggtgttggagtaaatctaagtgagaagttgttcactttgtcaaacgacatcgtagctagagcagcttttggtaagaagtgtaaagatcaagacgagttgatgtcgtttgtgaatgaggtgagaaaagtttctggtggatttgatattcctgatgtgtttccttcacttaagttttttcttgggtttgtgactgggatggtacctgctttgaaaaagattcatgggaaacttgataagaatcttgacaacattgtaaatgatcacaaagctaaagctaattttagcaatagtaatgatcatgaggatgaagaagacataattgatttacttctcaagcttggaaaatctggtgagattgactttgatattacaactactcacatcaaagctgttgccatggtaagtaacattattaggatattattttatagtagggtaaatattattttagatatgtgttttacaaaagttataaattagatccctgttaaataataaaatagactttgtatttttaaaattgtacaaataagaccttgaattgatttttttgttaaaataaaacttaataataatttgatttagagttgttatgataaaactagttacattttctgtatctgttcgtattagaaattgtcttaaagttagttatattaaaaagtaaaattattgaaaattgagctcaaagtcctatttttaccattttaaaaaatataggattcattttatcatttaacaaaacagagagtccaatttataacttttgtaaaacaaagagtctaaaataatatttactagtattattaaattaatatacagcgtcttcatttttcttttctttcttcaaaaattagactgttttactttagtttcttgttattttgtaaaatagttttgttttgctaattctcaagaaaatagtattattttcattttgtagtgaattatctaaagaagattattttttaaacttaattaaatgaaagaaatatataaatattgttgcattaaactagtaaagcaaagaactctaaaaattcatattgattttggtcttaaaagcctacatgatcaagttcaatcattatatcttaaagctcacaataatgtatttttcaggatatattttcagcagggagtgaaacttcagccacaacaatagaatgggcaataacagagttgttaagaaacccaagagtgatgaaaaaggcacaagaagaggttagaaaagtttttcaaggtaaaagcaaagtagaagagaaagatatagagaaactaacttatttaaaattagtcattaaagaaactctaaggattcaccctccagtacctttaatcccaagagagtcaagagaagagcgtgaaatcaatggttacaaaatacccaataaaaccaaaatactcataaatacatgggcaattggtagagacactagtcattggggtgaagatgttgagtcatttagaccagagagatttgaaagtagtacaaaatccaatattgattttaaagggaatagctttgaattggtcccatttggaggaggtagaagaatttgtcctgggatttcttttggtgtggctgtggttgagcttgttctttctcaattgatttatcattttgattgggagtatcatggagaagatgttattgatgatgctgttgagtcttttggtattacttgtagaagaaagaatgacttggttttgattcccactattccattatttctctaaagaaaatggcacttatcatcaactagctatgtttattttgaccctaaacaaaaaggggctctttcgattttagataattttgggaaccacaagactcatatgatcatatcacatcaatttttagttggatagtaatgtctatttttagtttttatgtatgtgatgtaatatttttttttttggagggtaagattttaatgatataaaatgtacatcattttcatctaagtgctacgtagtgtctattgaatgacatctaaccattcttcacctaattttgttattatatatttattcattcaaaaattaggcagaaaatataaaacaggaactgtgcaaatatagtgcacgagttttaaacaatttatagcatctaaattatgtaactttacccacacgtaaaaataaataaatatcttgcaattctgtactgagtgttaattatattaaggtgtagcattgggtagtaattaactcacttttaagtgaatgatataaaattagagggtaaaaaaaatgcccaagaaattgttggtattaaatggtagacaccaactgatataacttctttataacaccatgatgcacactgacattggtttctctatctcatcatattcatgcataaatgctttcaagtgcccataattattgagataaagacactcagaaaatatatttaagactcctctctacatttcaaataaataaatatatccttaaaaattaaacatagcctgtgaagattgaaagagagagattacaagactaaaccaagataagctgtaacagaaaacagaaaactaactctctaatctctctaaaattatgttttggtcaaaatagacagaaagattttgcaaataaaaaaaaaacgaaaatacatgtcaaatttaaaataatactataaaaacaattaaataagtttaaattaatttctttttgtcataatatcataaacaatactatcaatttctatccccgttatctagttcgttgaaggatcataaatattatattatattacaatgtgatgacaattctaataatattaattgacattattagaatttttcaaaaaaaaataatataataacaaaaaaatgttactaattacctttctctaaaccacacagcacacaagtccttgtataatttacctaaccattttaataatctgatagtacaccatcttttattattataatcttattatcactatgctgatcatagaaactttttgaaaaaatacattgatttttctttttcctaattgaaaaattataccatatattaattttcacattaacagaaggtagtagcattgctgacgtcagcagcagcgggaggaatggcgaaatgccagagcctccccacggctctaaccctgtacttcccacacaggaactcctccgcaaacatcttctccactctcctattcacgtcgtgaacgaacacgtgcgtcagcccagccctcactctcgcacgtgccataaccgccgctgagtaaatcgccgccattctccccggcgccttcgcaaaataacctctcggcgcgtcgatcattatcaaatcccactccctatcgtacacctcgctaggcagctcagtcagcgccaatctgcaccggcta

SEQ ID NO: 16485 - DNA, 4187 bp, Cannabis sativa
cattagtgcttcccatttcaatctcaccattcaattgttcaatttttcaattagttgaagaagaattacaacacataatttaattatatacaaaacttgcattgatgagtagttattccgagagccttacaaacctcacttctgcagtttactaatgcccgacaagaaacacttcgagttaacaaagttcaagaattacaactgaaatttaagggagtaaagcacagttaagaaattacaagacatctctgtgtggacagtaccttgaaattatctggggttgatgtgtagtccagcacaccaatggtcattaggccagaaaactcaagatttggacatcaaacttgcatgatatgcaagctccacacatccagagcgctctaaatcagattttgctgcagtgatttagaagaagtaagacatcattttacacaaatacttgaccagagagaaagtgtatgcagtcaaaataataacacacgcttggatgcattgccaattagatatgcaaataacagagaaaaccctgctcctcaggatgtactttaatcatgtctagaaaagagtgactgaaattatcaattggtttaatttttggagctacgccatatcattcaatttagggtgaaaacaagatacatgccatgaaaaactacactaactcattacagccagagaagaatagccaaatgtgaatctgaacaagagagatgggaatctacttggcatcttctactgcaagaaaatacttctaagagaccagaaataattacaagtggcacagctaatttgcaaaatacattgatcaagtgaattcacacacttctctccctacacacagagaatttctcccaagacttgcaacaaaacgaccaaattgatttggcaatctacattaaatattgagtgcactaagaaatcctagaaaacattgagtcaaatgtggtcagctaagcatgccatactagctggatgccattagaagatacataaaatggtcttgcatttagataaatcataaatcaccccaagtactaaactaaacagagatttgttctaaagcccaaaagaattcggttaatgaggatatgaaatccataagtaaaagttttcctaagcaatcatcaatccactattttccaaaggcaatcaagaacctcgagaacaatctttatacaaacatttatcacaacatacatacttcgtttaaaattaactggcatttaaaacctttgctctaaaaccattatcattaattacagtccttattaccttctcgctaattagcattaaaaattggcgcaccatctgcataaaactaatagctaaaatcattattaaacattcttttttcgtcaacgagattatgtaaaataaatcaaagaattctgatatgtttgcttagtctttttacttttatatttcaactaatatctacgaattttgaattttctaattcaatctaattcatattttgcgaattgaattagattgtattcaactattttatgaacatcataacctccactcactcaataaaatcaagtactacttagtcttttagtttatcgtaatcttttaactatactttagattttttaccccttttttttagtatttatatatacaagaaattctatgcagttacaaagcattgaaggaaggttataaattagttggcaccacattgagtcttgtgtgaataaaatttacatcgattgtctcccaaaaaagaggacgcacaatttattgtccatctacatgaatggctgataaaaatttaaaggaaaagccaatataccaattaattcaagaaaagaaaaataaaatccaattaattgtaccccattgtatgctactaataaatgcttttgtttgtggcatcgatctatatatttatattgtattaataattgtgcctatcttcttcttcttctttttttatttttttatttttttattttttgttatggtaggcagaagaagaataattgggatggacccatttttcactcctaaagatgatcaattaaacctcaagtagacgttgaaatacttaattgttaataagagggatacccaaaaaaaaaaaaaaaaaaattgacagacaaaagagtggttatggtaagttgtaataattatttaagtgtcggcaaaaggggatatatagatgtagtgaccatatttaatttggtacatgtttagatatttgataccaagaaatctccagaatctgaccaatttggtaaagcatggaagatgattcttcatcttaaattcttttgacattattggtggccccttattctttgaatatgcacaaatgatcttgaatattttatattctcttcttgcttgttttcttgattttagctccaaaaaaaaaaaaaaaaactttacaagttaatgtacaataaggaatgggaaagaagacccaaagtaaaatatggttttgtaaagtttttccttttcactcattccattttgttacttcctaattattctccatgcatatgtggatagagctaggccaagtattttctttaatcaccttttcatttttaataataattattattattcatgagcatgaattatataattatataggcttaaggaggaccacccaaattataaataatacaacactaattaagaaaagaaaacctaggacttcgcatgcttagttatacgttaagagtatggtactgcaatttctattttcttgtgctttggaatttttcagatagtcccctcaccacggataaacaaggatatataaatattaattatataatgaaacccttttcgaaataataataaaaattattactttaataataataaacaatggcaatagatgatatagataacatatacttattctcgttacaatgtattgataattgtcaaattcttataaattaaggatttgtgtaccgcgtgatccttttattattactcaatctaagccattgatgtcaattgctactaatcacttatttatttatttatttatttagaccatttttagtaattagaatttataaatttgataaagaatttataaatttgatgtaacaattctaatttattcataccacatcacactaaataccccactaaataaatatatttatttaaaacatttagtgttttatattatttatattaattatccaaaataactaatttttaatataattatattatggctactttaaaattttaaaataatttagtaaaataatatatttattaaattaattaaatattacatataatttttttttttaaaaaaaaaaaagaaaagaagaaaattgaaataaaatcacacttgcataatataaatatattcttcaaggttaagatccttaaataatcatattaaatttttattgtacttaatttttatttttatttatgttgtttttttattttaatgacttattactatgttgtttttattttatttaatattaattaaataagcatctctctatatattactgaaacttaactaagtaataatttgaaaataaatattaaaagaatatatctaaatatgtactagctagctgtactgtagcgagtcaaaatataattgtatatatctaataagtttcacacaaaatgatttttttaagtcgaaataggtttatatttggatttgttttggtaatcaaaccaacagaaaatattttacgatgttcctatttagttgcctgtaataatttctaataaaaaatgatatgaaattattttctctaaaaataaaataaaataacataaatggaaaatcatgaattatttattttgaaaaacaagataccaattctctcaacgcacacccaaaataattactctcttaaatgcatccaacaataaaaactctcaatatcttatacaatattacaattattttattttttttctttaaaaagtaatacattatgaggacatgtgtgtaaatttataactctaagatgacatgtgtgtgaattttaatttaaatgtattagggtttaacatagaaattttaaaataaaactaaaaattgagttggaattgcatctatctagttccatttggctcttcttcatatacctatatcatacatgtgaccggaaaaaagcatattgccaaaaaccacaaaaatgggccttgttttagtcattattataata

SEQ ID NO: 16486 - DNA, 7512 bp, Cannabis sativa
  modified_base (5805)..(5819): a, c, t, g, unknown or other
  modified_base (5968)..(5968): a, c, t, g, unknown or other
  modified_base (6390)..(6399): a, c, t, g, unknown or other
cgccacgtggcagatgcgatggcaactgatatgcggaacggacttgccatcgacggtgggagtgacctgaagatgatcctcagctatgttgatactctcccaactgggtatgtccaactcctatttacgacgccgttttttgctctccttgttgacgatttgacttagtgaagtttagtttaatgaattatatcaattaatgtgtgtacagacagttttgttagtttagtacttagttcagaagttccagattaacggtttatcttttacataaagtaacttcactttaaagttttttttcataaaatttatttatttaatggatctgatctattcatctttttatacaataataataataataataataattgttggaaggatcaacctagaacacagaggatttattatcattgtaattatttaatattcatgttgattcaattgatattatttgaaaaaggaacgagaagggtctgttttatgcattggatcttggaggtacaaactttcgggtgcttagagttcaattaggtggtaaggaagagcgagtgatagacactgagtttgaacaggtctctattcctcaggaccttatgtttggtacctctgaggtctgtatatttaatattatatataatttcctagtttgtttcaacaatgttagttagttacaactttcttattgttttactagcttatgatttcattgttttgtgtattttgttgtcgtaaattttcaaactgcagcaactttttgattttatggcatctgggttagcgaaattttcacaaaaggaaggtgggaaatttcacctgccaagtggtaggacgagggagattggtttcacattctcattcccagtgaggcagttgtctattgactctggtatactaatgaagtggacaaaagggtttgctgtttctggaacggttagtaatttgctgcatttttctttgcttgcatactctttatattaaacagtttatgtctcaaacttgattggaaagtgcaaacttttaaactctttcaacagccaggcaaagatatagttgcttgtttgaatgaagccatgggaaggcttggattagagatgcgtgtgtctgccctggtatgcttctcttcttatgtgaaatatctgtggtggtgtgttcaacttcaagaaatgtgtggttcagaagtgatgatcaacctgatatactcttcaggttaatgatgcagtgggaacactagctggagcaaggtactgggatgatgatgtaatggttgcagtcattttaggtactggaactaatgcttgttatgtagagcgaacggatgctattcctaaacaaaaggggcaggtctcttcatctggcagaacggtgtgtggaaaagctctgcatcttttagctttttctattcatgtgttttcaattcagtgatcatagttaagatgtttgcctttgtttttgaccaaaagctgcttgtagattattaatacggagtggggagcattctcaagtggtcttcctttgaccgtgtatgacaatgagatggatgctgctagtatcaatcctggagagcaggtagatgtttggtttcttccatcactcagttttaagtttatgctgttaatttatacagattattcacatctataagttgttgaaatttggtgtgcagatatttgagaaaacaatatctggtatgtatcttggcgaaattgtgagaagggtgctgctaaaaatggcacaagcgggtgacttgtttggtaaatctgtgccggagaaactgttctctcctttcatacttaggtaattagaactactaattaagatggtgattcatggtcaggcaaacagtacatagatcttggaaaacaagttgtgatttagcccaacttcattgatcactataatcgtttcattcaagtctttataaattttacaatgttaaaacgattgccaataattatttatgaccctttgttccatattatctctctactgttgttcattcatgatcttcttttaaatattgtaggactcctgatctttgtgctatgcagcaggataactctgatgatcttcaatctgttggatcaattctatacaatgtagctggggtgagtttcctatattttaggcttgaaataaacatctgagcttttaactgagggaatagtaacttaaactctactggggtcaagatggaacaaaataaaacaaagtaataatggaacatgtaattcagaacgaaattccttacatattcttgcgttatttctgagaaagaaagaaactttaatgatttcttgtgtgttgtctcatgatttacccctttgttgcttataatattcaccagcttgaaaccaatttaagcgcaaggaagattgttgtggaagtttgcgacacaatcgtgaagcgaggaggccgattagctggtgcaggaattgtaggtattctgcagaaaatggaggaggactcaaagggacttatctttggaaagaggacagtggtggctatggatggagggttatatgaaaactacccacaatacagaaaatacttacaagaagcagtgacagagcttctagggacagaaatttctaggaatgtagtgatagagcattcgaaagatggatctggtataggtgctgctctcttggctgctgcaaactccaagtatccgcatgacatttaaggcaggttgaaattttctcaaccttgtagtaattcgtttttggtgaagagtgaaataggtaatttaagtcattgccatttataatttggactcaattctttccactgaagaattatttagataatatgattctatgtttaggaaactgagcttcttagaacaacatttgttcctaatgcgccataagtaccatgtggtgcaattttgttctttattttatatgtcccaaaatgagtcttagagagtagtttatatgctggtggcctcatctgatctgaacagctttctaaaaaaacagtgtgtaacataatttgttgtgtttatttatattaatcccaccaatttcttccacgctaaatataataaatgtttgaattaatttatttttagtttcttactatcatccttacagttatagaaaagtttttcacatttagaaaagtattataagtttagagtatctctctctagtttctgtctagaaattagagtttgcaacttaattattttttctgtaattaatctcgtgagaataaaaagttgaagtagacatagctctattactgttgcgacatagaaagtgaagtactataaattcttatctgtggtctttacttagtacttacaactttcatctcgtctacacatacgagcgagttggctagatttttgcgtcaacaaggggtgttcaattatagaggttattaaagtgattattgaacgatcaaattagtgaactacgacaaattacgacaatcaattgccgctcagtgcatcttgtttggattcaataaggttcaatttgaatttgattatcaacatatcgaacgtaaaattaataatcatattagtcacggttcattattgaggcttgtttttaaggacattgccgaatcttgtaataattttcatgacacataatatgatagtgttagtgtttggtattactaatcctcaatcccttctttgagtgtatttttttattattatttttatattaagagagagagattcgaacttgggacttcgtgtgaggaaaagtgtgaaactactaaactatgcatatgaccacaatgtcttctttttgagtgtattgctctcaaggtttaggctatttcttaaaaaaaaatattaaaaaaatagtgaaactaacacaagcacaaacattgaaggggaggatgtcgtaatttataaaatgaaataacgaacgccatgtcgtttattaaaatataaacgacaacatactttttgtttcaacgaaaacggctgaacagaaccgaagacggcttatttctgttattcaaatttcaaaccagtcttctctttcctttctcgatcgcttcgtctgttctgcgatggtaccattctcatatttcttaatttgaaatgggataaaatgaaatgttgtggtaatgtatctatgtgattgaatcaattgtgtttgaatattatccgattttttgcagatccgattcatactcttacagaatcggcaaggcaagacccgtctggcaaagtactacgttcccctcgaggattctgagaaacacaaggttgaatatgaggtttgtgatgcttgttcacacatgattcctgtttcgaataaaactatatgtctcaaaggattttgagttccgtttttgtttgcttgcttaggttcatcgtttggtggtaaacagagatcccaaattcacaaatttcgttgaggtgatcttttttctccttatttcaccttatcttgttcatgtgattaatcatttcgatccataattactttcgtgcttttgagttctggagagggtttgtggttctaaaccctcaaaataaataaataataataaaatatagggttctaggaagatttctgaaaaaaatataacttggagctgtttcattactttgctataatcaatgcctttttatttgtacacaatattggtttaggagttgtaaatggtgtttgttaccttgactgagcaagaatgataatattggtttaggagttgtaaatggtgattgttagcatatcactatgtctgaccaccttatgtcatgacacttatttcagtttcgtacacacaaggtaatctacaggcgttatgctggactgtttttctcgttgtgtgtcgatattacagataatgagttagcatatctggagtgcattcatttatttgtggagattttggatcatttctttagcaacgtttgcgagctagatctggtttttaacttccacaaggttagttgatttcatgaacttattctccatgtatataatttttctgattatctaaactgatactttgttgtcctgtgaaggtttatctcatacttgatgagttcattcttgctggagagctccaggaaactagcaagaaggtgtgtatatattgaggtctttgctcttcatttatttagtttttgtggaatcaatatttgcatgcttttggggtcttttttaattctgatctcccccacctttcgtttgtgtgcgcacacatagttttagtaggatagtgacaatattttctctgctcagttcttttctcgttgagtgtgttttgtgcttggagaattcatttacaattctcagaattttagtgcacgtgcatatttttatatcttaggcatttttgcccagtctttttgaatttgcatgtatgtaaacactggaaaaatgtgactgtcaactgtggatgttgtttgttgcaggcaattattgagagaatgggggagctggaaaaactagagtaacaattctgtggtgaagagtgtagatgctgcagggcattctgtgtttctgggtctctaagacttggttaccttggaattggaagatgtgatgctctctagtgtaacatcagaaatggaactgataatgtttctacctcatctttgcatttctttcatctaattttgacaatttcatgtgatattctatcaccataggcgagagagtgctttctgttgagtgggctgtgattattatatctgaaatatttttcaacgtgtgacctgtttgtagtttccaactttgcttttatatccagtgctaccggctgtgttcaattttgttgaacggaaaaaaaggttgttataattattattattattannnnnnnnnnnnnnnttattattattattataaataaatcatttcttttataataaaatataaattgtaaatgaacaatttgtttactggaatatcatttacaagtatttaagtgttttaaagataaaatacattaaatagtagaatggtaaatttgtccctantcgatgtagatcatcaatagaagatcgctgattatttggattgaaacaatggataatttatagtatatttgtatttggtatagaacgttctatttaattaagagtgcaattatgaatcttcagtggagtcagaaggaactaataagatagataatttactcggtaaattctaaaactacttattgggagcttgattatataggtctataatttctacattagttgagataatattatcttgtagattcaattaattgattttattaatcaattagaattatatataagactatgttttatttatgaattttactcaataagagcttatttgagaagaaaaaagaatttatagtttgtttattaattaagagactttgaaagatctaattgataaatgacttaaatgacaattttatttgatnnnnnnnnnnaattattaaatagatagaattgacatttacagagttagaattaaaagatgacatttgaaaaaagaaagaaaagttttaataaagtggcaaaattgaaactcaatagacccactaaggaattcagccataagagtttaaataaagccaattttatctcttttttttattaattcattttattctaaatctaaccctaatagctattatataaatagaatattatagctcttattttcctaacctaattaattttttgtcaaacaaatagaaaataaagagagcttcttctattttcgaattcttcttcttcttctcaaaattttgaaccctgtagtgtatgagtgattgctcgcacaatttaagtcaatactcaagatagtgtggaagattgtgtagtattcttcacttgaaggagaaaccaggttcagatcttgatcatactctgcaacagaaaggatcaagggttaaagatctgaacggaatatgagccatattattctactgacatcaatgtaaggttttctataactttatgtgtttaattcattatttttaggaaattcatatataggatgttaaattatagatttataatcaaacatacttgttagtaaatctagatcttgataaataatttccaacaaccacgagctcccagcacctaggttaacaatttgtcaatctaagagccttccaagtgtccgattggagatccgacttttgcattgaatctgtcttcatcaaaaatggggaaatatttacttataaaggaaaaacaacaactcctgggcacaaataataaggctcagcacctaggttgacacgtggagctggccttgtgcccacgttgatattttgtcaacttgaactatttaaaattgaatttttttccagaaattctttcaagcatcttctctgtcttcagaaaatattgagattcaacttttttcgaagaccaaacgaaattttcgaaggggaaaaactagaccctagagcccagttgacattttgttaacctgagctgttttcgatcaagttcagtaaaaagtattttgggtattttttctatcatcgaaaataacaaagattcaagtaaactcagggagaaaacta

SEQ ID NO: 16487 - DNA, 10395 bp, Cannabis sativa
ggctatcaaatcttcttggaatgaaatttatgtgttctcagattcccaagtagctattcgaagtctgtctttgaacaattgccttcttgatattggagttttttaaatgtacgtgattatctgtttaaaatttagttaaaaagtttaatgttagtaagtttctttttagtcgtaggatgaattattttgctgatgctcttgctcaaagagttagaatttatagcctaaatgtcagtttgttctaagggaagagaatttctcctgtgattctcatattttgttcttagttttagtaaacttcggtttctttcaaaaaaaaaaaaaaacttttttttgacaaaaaaaaaaaaaaaaatagtttcttgataatagactttttaatgcctatctttgaaaattctctacaaataaataaataatggaagtttcttgcctatgtttttttctatattagatttgagaagcatccttgtatttttgttttgttttttttttttctgaaaacttgtgtagaattatgttcaattttttcgccttctcatccgagtttgtctgaatgcagtttctatatgttttccccacttcactttaataatgttgcaaaaatgaagtttcttttaaaagaaagaaaataaaaaaccatgtgtggaaagttgaatacgattgattgcattcatcaatactaacattttattttcacgttgagtcatctcatgatctgtgagttgataagagaccatataattaatgtaaatgattaaaacctaacaggtaaaatggtcttaaaaagatctctcaaccaaacataaaggtatataaatattctatcttttgaatggggccgggtgtgtactgttagctagagataaatttatattgaaagagaactattaagggataagtcaattgatttgaatttgaaccaattttcctgacgtaatctataatataaattactattacatttgagaattattaatattgtcacacatatccaacttgctcatattaatatagggaagttggaaaatcatgcaaaatatagtttgattacgtttacttccctctcttccttctttgaattcaaatttaacgggatacgaatacaataataacaggtaaacattaaaaattatgaacacttggacttcattatttatttgtaataaaaaattcacattaagaatcaagatattctttatttgaaaggtgaaaataaaatacgggttaaggagttttggccttacatatatacttaagaatttaaaatcttactttcgcaacaatgcttccccacgggtatttttctttttcctcttcttttaaaggaaggatcatctttttaaaagcgtatactgttaatgttatgcctatttctataattatatttctttcattgttgtttttaacttgtataaatttatcggtatattaaagaatattgtttcacgtgaattaaatgtaaatatattaaattatatataaaaatataaattattttattcatcattaattaattttaagatacatccatgtatatttattgatatgatacgagagacataggattcgtttgttatattgcttaaaaaacactttgaagagaatatcaaattaggaataagtatgttacaaaatggcctgtttagtcatttaagtgctcccaaacccttaaatttccttattatgtcgttttatttatatatatttatttgtgagagaacctaatatttttatgagagctctatttgtttagactttcttgttttcattctttcttctttttttcgttctttattattattattattattattgaaagattagacttaaaactcaaagtactgagacccaaacacagtgattccagctcatctgttttaccagttcttctaacccgcaattgggataggtcagcatgggcgcacatggtacacacacacagaattcccattcccattcttccctaattattattgttaaaagtctcattaataatctaaaaactaaataccatacataaaatataagacttacttctctaattattaattaattttgagataaaatttatatattatttaaaataaaactccatacacgttaccatacaccatctaaatcctaccttctaaaccacacactttcatattctaacaattaccaatatataactataaggtcattttcgtattcaacatttctttcatccaccgaactttaaatttatgtctgtctgactattgagttattattgacacgtttacctactttttctcatttcttcacattcatttactcattattttatagtagtacgaaattttgttcacaattcctattttcagtaaaacaaaaagaaaaatccactcaaaacattccaaacaacgtcctatacaaaatcataaacgcaatctatgcatcatatatattatatagagtcttttgtggtttgctgtcttgttttaataaaacttaattaagtcccccctgaaaaccttagccattactaaaactttaccaatttaattgagtttctttttcccaggaaagaacaaagctgtgttgttgatgctttgcttgtctcagaagacataaaaagattcgtactgaagttttttcttttctgcttattttcccggaaagtttctaactttcccagaatttcgaagcttcctggagctcattactctttgaagcgggaatggagactgggcaacgggtggtagagaagaatgaaacgaacgatgtcgtattacaggtttcgggtacggaagaaactagcaatggctctagagaatcaagcacagaatcatcttcgtactctgtttctaagaatttaaaaagtgggctttctccgaatgtatcgaaaagttcaaatgttgagctaactgagcttcagagcacgacaacaacgatcaaacccccgaaagctccgattgcaaggtcaccattttctaagcccaagtcgagactagttgagtcaccgcctcatcgtactgaagaggtcaaggctccatcaaaatcgaacacgagttcacctcttagaagctcgcctaatttaacatcaccaaaccggaaaagcacagccactactcccagagagtctcaaagatcagctcccattactccacgaacgcctttgattggaacaccagaatccgaggaggacgaggatgacgaagtttataaaacagctaatcttaaagcaaagcaggtttactcgagtaagaaaccaaaagtcagagtaatgcgtttgattgagtggttttcttttgtttgcatagtgggatttttagctgcaagcttaactgttcataaactgcaaaagaaattcgtttgggggttggagttatggaaatggtgtgttttggttttggtagtcatatgtggtagactagtcacagagtggtttattaatgttttagtctttttgattgagatgaactttctgttacagaagaaggttttgtatttcgtttatgggttgaagaagagtgttcaggtcttcatttggttgagtttgatacttttggcttggggtttgttgttcaatcgaggagtgaagcggtcaagaaaaacaaataaaattcttaattatgttacaagggctttagcttcttttctcattggtgcagctatatggttactgaagaacttgttagtgaagttgttatcttcttcctttcagtgcactcgatttttcgatcgaattcaagaatcgatttttcatcagtatgttttgaggaccctttctgggcctccattgatggagatggcagaaagggttggcagaacaccaagtacagggcaactgagtttcataaatttgaagaaggaaaagggtgaggagaaacaaatggggaaagaagaggtgattgatgtggaaaagcttaaaaagatgaagccagagaaagtttcagcttggaccatgaaagggttgatcaatgtgataagggttactggcttgtctaccatttccaatactttggaagatgatgaggacaaggagattaacagtgagtgggaagctaaggctgctgcatttcagatatttcagaatgtagccaagcctggtaacaagtaagaaactaacacccttttaagttgtaggaatttctcttatgattgctcatttttctcctagtttttcttaagttatattcattggtaattgcactaggtacattgatgaagatgacctcttgcgtttccttaagaaagaggaggtggatcttatactacccatgtttgaaggaactggagaacctaaacgaataaggagaaaatctttgaagaattggctcgtatgtgtttcacttttcattgcacctgctatcaatttgtcttcattgattcttaatagttaaattttcttgtttcaggtgaatgtttaccttgaacgcaaatcactagcacattcactaaacgatacgaaaacagccatagaggaacttaataggctagcctctgcagttgtgattattgtgatcatcatcgtgtggttcatcatgatgggatttttaacaacacaaatacttgtcttcatttcatctcagcttttactgattgtgtttgtgtttggtaacactgccaagactgtgtttgaagccattgtatttgtgtttgtgatgcacccgtttgatgtaggagaccgttgcgttgttgatggagtacaggtaaccctctaaactactccaaccatggctttagttaaatgacatgcttatattaacatgtgtattggatcacagatggttgttgaagagatgaacattttgacaacagtcttcttaaaatatgacaacgagaaaatcttttatccgaactcagtcctgtccacgaagcccatcagcaacttctacagaagtcccgaaatgagcgatgctgttgaatttgctattgatttctctacatcgattgagactattggagctctcaaagaaaaactaaaattgtaagtgcattagttcttacctttcctaatttagtctttaactatttacttctagaagaatgatcatatagacattttctactgtgtatggaaaaaagattgaagttgtatatttgaatattggttcaggtacctggagagcaaacctcagcactggcgtcctgatcatagtgtggtggttaaggatattaaagatgtgaacaagatatcaatagctctctacgttactcataccataaattttcagaattatggcgacaagaacagccgaagatcggagctagtattggaattaaagaaaatattcgaagaacttggcatcaaatacaggctgctgcctcaagaaattcttgtgaatcatgttggtaacgccactgcttcagcactccaatccacgcggcgatgattttaattaaatcttttcctctgcaagtacgtattattcttcttatttttttcttgaacaaatgactagtcttttcttttcttttcctatgctttcattattgagttatatgcttctgttgtccttatgtagataaatatttggtggtgatttaatcaaattgccttatgaactgatttgtttcattaatttttcttttcgtgacaggtgtggactatggaggacagggtggggatttttttttcttctcattcttttgtattcatttagttcagatccattgtccattagttgttgaatccacaaattttgttaggattttgaatgaaaattcaagagcaacttactccacttggagaaacaaactcaatttgcgtattacgaaaataagtggtatggaagatgaaatccatatggagatgcataaagaacaaaaaataattacacatactgttcggtatgtcactctcaaacaaatacagatatttaggacttaggagcattagattagtaataactatggcattacattaggcaacactcgtaatcatattattagtcattagagtgagtttagctaaactggaagttgcaaccagttatggaacggcaagagaaaatatctcttaccacattcaatgggtattactattagataatcgaaccctgaaagagaaattagtcacgagtattgcaagtgtttttgacaaagaatattccaagtatttttggcaatgcaagtcaaaaattgaattttaagattttgttttttctgtaaaaaaaaaaaaaaaaacataaaatttaacaaattgggccgtccaaagcaagcccaaccacgtttccgaagagcccagaaacacaaaaaccgtacaccattgaaacgacgtgaaagtgaattgacacatcggacaccagttgaaaattcgtaacttgcaaccttgcatggggattggaccaataagataacgttatctaccaagcaagaaaggagaatccgccacgtaggacagggataacaaaaaacaaacaaagtcattgaaaatccgaagacttcccacctctcgttttagccacactccaaatcgattgttgcctaccctctctctcatatcaaaactcccaaccccccctctctcctttctctaaaccacactactgcgattctccccattcaaaattctcaatcagatatcaaaaggagaaaagaaaaataaccactaaaatggctgcaacttcggcagtttctatggctatgccattgacaaacgcagtaggccagaagaagtttccaagctcggaggcattcctcaagccactcccgttgaggccctctaaggccatggctgcggcaccaagatcgagcggaaagctcgaagtcagggcttctctgaaggagaaggcagtgactggtttgactgcggggttgatgacggcctcgatggtgatccctcaggtggcagaggcagccgattctggagtttctccttcgctcaagaacttcttgcttagcattgcagctggtggtgttgtagtgacagccatcatcggagctgtgatcggtgtatccaacttcgatccagttaaacggggctgagcttgagggagaggagacactttcttcaccttttagtttgttattgagagaattatgcaaaaaattcttaatttttcgtttaaaatgtaacctgtttgtgtaatgtaatagtgtctctttctttctgtgtttcttttgtgcaatattgtcactctagtttccagcttttttatcattcaaggtgagaaactgtgaattctgaaattcttgattttgcgaatgatgagatttagaactaacatcaaggattattatgaaatttgaaaaggatgacttcagctgttagattatagtaaagggcaatatgaatagtttctaatattatatgcttaatctgaaagacaattaatggtattgtggaatcaatgttagcaagattcgctacaactaaatttacaaaaagcacataaaaatattaatctacagagaatgctctgttccttagacttgaaaatcagctctccggaatttaaactattattttaactactcattcttggtagcattaattacctcaagggctttaatattgactcaagcatgaatttgctctctgtagcgtagttcaccttatcagccttcattacagtgattttcaccctttgctcatcaccgtacatctcctctttaatcttgagcctaaaaagatatttgttaaaaaccctctgcctaactatggaatcgaatcttgcatcatcctgttcttcaaacttcaacatgtacaactcctttgccgagcagcccaaaatctcttccccggactcctgaaatgctgtcacccatgtcaatcctgtatgatcttgaatttgggcttgaagaaggtacctgtagtcgcattcttcaaattcttgattacatctgtcacactgccatctgtttcctgaccttgtcacctttttactacactgcctatctccgatcatcaacgggcatgctgtgtagcagaaagtatcggctttcataaatgttattgtagcattgacagtgacccaatctggtttatctgatcttcctagaccttcatctttaatttgagatatagttttccgaatctcattcttaggcattccaggcaccatgtctttagaaatggactgcgatacagcatccttgccccctcgatcaaaccagtctctcaagctatgagcctcagggaaatctggatttatgaagagttgagtggaagatattgtacctattgatttcccactaaagtcgttaaccttccctgcttttaccgctaaaactggacaaattccagaatcaaacatatcctgcagcttctgaccttctctgttacagaaatccccccatagggttatctcaacgctcctgcctgaccagtcctttaaattcaaaattcttctctgagtttccattccattctttctcatgataggaactgaaggattcaccgatatgacaataccaatgacatcaagaatagtattactatcagcactttcaatgtcactaataggcctaaaagaaaactgctgtgttggtatagaaccatcttcatcagggcaaagatcgacagttgaagttgcctctagaaatatctcccattcatttttaagatggttaaagttcttctgagcaggttttaagctaccctttgaaatcatatagactttaccaacctctataacatcataaaagcggtcaacaacagcattgaaacaggtgacacgtatttcccctccatcagagtcgagaaggtcaaaggagaacacttttccatctccccgggcattattataccgacgaaggtcccctttcgctgtcactcttgccttgatagcccacctgccttggtaaggattcaatgcagcaataggaatgatccgagcaggtgcttcattcttaagaatagtgccatgacttttgtaattagaaggtggttggtaaggaggttgaacagcaggccggaaatcctgcacattggctacaggagggggttggtaacgattattggaaaccctagctggctgctgtaaattgatattcggctgaatcttctgagctgttgaatccggttcgagaaaatgttttgggttcccaattatatcacattccggtataatagtttccatactcaaaattacaactagcctgcatggataagaagccttaacgatcttaaatattgaaacaaccacaatgatgaaaataacagtgaaatacagttcaatcaggaaatcttgttcttaaggttcacaacaaatttaagttgattatcttttaatggataataggctgttactccaagctcagattgtgccatacaaagtcgaggttaacttccacaatttttttttttttgaaaaagaaaattataaaaaataaatagcacccctccaattgagggcttccggaatatcatcaaattgtacacacttacttcatctaatgaatggcttccataatatcgtatttgtacctcagccaactcataagactccaaaaaatcctgatactattactacatatctagcttctactatactttaataaaaatatacatatatttcagaaagaacattatcctaatctgcatacccactaaacgacacgaagcatatcgtgccagtgaaattaccaaaaacgaaatgtcatcgacgaaatgataattacttcatgtgaaaacaatcactaactttactagcgagtaagaaattagagaacgagagactcactggcgattctgaacaaagctgcagaggtactcgataagctggatgaccgatccattcctgatgctaccgtccttaactcggtcattgagctgagttgcaagcatcgcgtgctgagtggaaactgcatccgagatcaagagtctgtacctctcctgcgagcttccgatgtgcttgatatccaggatctggacgagcggctttaagttcacgtcgccgccgacaatagcgggaatagcgttgggcgttaagtgcaccggcattattaacttcttggagagaaaccctaagcgcgagggtgagaaagagttgagcgtatacttcagtgaattagggatccaaattcaattcaatggaaatcgaattcggagtgggtcagagtttttggagaaagaaatggaaggagatgtctaagttttggagattttgaattggcgggcagggccgcacttaaccaaaaaaccgactcagaattgagaaattttatatatatatatattgccatatttagtagagcggagcgggtgtcttattttttgtatgggtattttagtaatttaaattcatctatttttcaacttaataatatcccacattttttttttataatttaaataaatattaataagagagtatgactgcaaagatgatggaaaaaaattccatttacttaaatttcttaatttgtaactaatctataagaagtcatgaaaagaaaaaatattttaagaaaattggtaag

SEQ ID NO: 16488 - DNA, 4802 bp, Cannabis sativa
  modified_base (2635)..(2642): a, c, t, g, unknown or other
  modified_base (4179)..(4182): a, c, t, g, unknown or other
ggcgacaacgaaaaatgcgatggatggctagtttgatcacatgggtaagtgtagaaccttatttcttagtgggataaatatcagaaaaaataaaatatcgagattgtgcgaggttatggtttttgaccattttacccctaggtttgaaaattacaaagttaaggttatagagggcattttaataattttaacgatgggttaggtggctgatttttggggatgacacctagcagtaaaatactccagccaaggttaatgtaattaacatttatttcatttgagggaaattaaaaagaaaaatcaagaaaagcaaatttatgaacaacttctctttcccttactctctctcttcgaaccagccaaaaccagggggctttgttgttgatctttggtgatttcaacaagggattcaaggaggatcaagctaaggtaaccttagaaccgtagtcttatgttttgaagctttttctttagtttgagtatgtgattttgtgaatggatggcttttagtgttagaattttaaggttcatttgagttggtttaagcttcttgcagctcgttttagtgtatggggttggatttatgcaaatttgatttttgaactcaaagctttggtgtttaatggtaagttgagtttcattgggttattatgtgattttctggttggaatatgttgtgtatacatatttaggtactctggaaagtttggtggcaattggaaaatttttgagcaaattgttgagtttttggggagactggtataaaaacttatttaccagttttaccagtacctgtcaaaccggtaaactggttttggcaaggttctccaaaaaaatcagttttctcaattctcgtccatttcagtgacgtagttgggaagagagtataacagaacctagggttgtggcttcgggtttcccggattagggttttgaccatgtgctttaccttgttttattatgtgattaggtcatccatctagcgcgagacttctcgttcaggtcggccagcacacttgtagccatttctcttgccaactcgctcttctttcgacaaaatgtcattaaagtctcccaatactatttagggatcaatggttctaatgccttaagtgtaattccaaagttcctttcttctatccatgtcattaaacctgtaaacaaaggtgaccaaaaattacttttgccatccaaggtcaatacagccatgtgcacaagctgactagtacactttaaaatatttatagtgaagctacatggattctaagctattattatccgccctcttgcattccaagctatgttagacagaaaataccaacctttgatcgtttacattcaaattcccaagtttctgggccttggctcttgtctccagaaaacaaataggaccaatttgttgagaattaatcaattgcttgacttaattctgcttttgttgatcattgatccctcagacattcaaacttaggattctatccatttcgaagaggaagtactgccctcctcctctgctctgtctcctttgtagccttacaatatcctctattggggcatgctcagaattaaaattcctatcccttttcaccacatcagagcaatttgttgttacaatatcatcatccataggtgttgttatatttccttcacctagtgccatggaaggttcagacaatacttgaaaagcattagctgggtgactctcaactataggttgcttccctattgttgatttccccttagtaacctaataaaacccctcattatctatcttcaaataatcacgattagttgtctctgcattcttctttgcctcttctttaaccgcccactgttgcttctgttatacccgaaattcggttggtacttcagaaggctaattgtgtgaatctcagagaatatgaaccaacaaatataatggaaattatattaaatggaataactcataaaatacagagtcaatagggtatatttataactcgcaaaccgcacaatctttagcgagacaagaatgtacaaactattgattcacgtattaacgagaaaccatttcacgtcagaggcataatcgcaaggatgacatcgataatacatagtgaggcatctacctcacaatatgtaaagaggtgttgacaagacgaattggctattagaacacttagcgtataatatacattatactaactaagtgtaacaacttgaaggacatagataacaaatagcaagacatccatctcgctataggaaggcgtactcctggtaaactccagctcgctgccagggttattgttactattgacaacccccaggacatgattgtccagtctgcaaggccttatggtcaaagagcagctcttaagtttgctcagtacaagggtgctcatgccattgctggaaaacatatgaataaaccaagctattcatataccaagcgagacacctcaccgagatacgttttgcagcgtgtcttaatccacgtaactgttgaccctttaaaagacatttaaatcacagctgtgggatttttaaataataactgcatttattaatgtagagcgtaattaaggcccacaattttgacgaaatattgttgtggaattcaaatttcaatgtaattaactgccaacctatgttnnnnnnnntaggggcagattatacagaaaaagtgacaaaaaaatattgagagaaaaagagaatacactgattgtaaagaaccctagttctatatcagaaaaatttgaataagattgactcgtggactatgcagagttaactgcaaaaccacgtaaaaacctgggtgttattattctttttttttttttctatttttctttcatctcttataatttttgtgcaaaatctattacgtaaataggctcatattcgttaatgaaaatttgtgttaacagtttggttacgtgattaaaggtcagaaaaatcccttctaacgaaagaaggaatttttttctccatggctgataatgggaaaaacgataacactcatcctaaagagacaactcaacgtccttgaaaagagttgatgggttcacggaggccccccaattcacaaataacacgttctacacggtcaacacattcaagaagaagccaacgtgatggtcaccaaaacccaaaaactgggaatgaggaacctaacataaatgtcggcggttttacgcctgtgagtgagggtgcctatgaccccacaagatacctactattggtcgaattggaaaattgtcaactccgggaatgtttggaggaggaaaaccaacaaaatgttgagttggaacgagaggtagttgtggccagggcggcacaggaaaacaacacacaaaaccaacctaatcttggattgaggaggccacctcgtcaaggagtgcctcaaagaccccatggatacacaacccacgggaatgaaaacaatgatttaccagattcctctcgcaggaatgtgagcagaaggcaaccccagactacagaacgtgaaatcccttgtggtaacaagagagatcctaagactcaacctaggacaactgggttgccactgagacactgtcaacgtccttctcgaactgatagggaaggggcacatacaaatcccagcagggggcatgtatcaacccattcccaaaagagaacgccagtacgtgacaaggcaggttctagcttgggacgtattagatctcgagatcatagttgatctacgagaggagcgaatagaagtcatcgcagtaatgatcgagagagtacgggcacaactagaactgagagctactcaaggatgaggtttataagtaactatgatccacaacgattggatcttcgtgagtaattgaaccagaaaaagcctgacttacgtcaacaactcaatcaaaagcaagaggatcctatccaattgcgaatcaaacgagataccaagatggggaatatgggaaattgcctggttatgactcgaacgaaaagcccaagcctttctatccagacattatgagcgtttaattccaccagggatttaaaaaccctcacaactcgtcatacaatgggactacggatccattcgctcaactcaaaaattttaataccattatgcgagctagcaatgttacaaacaacttacgccgtattatatttcccacctcgctgactgaggcagcgagcagctggttcaataaattnnnncatcactcaattacctcttgggaacaactttctaaagacttcaagaaacagttccagacagcaagagacatgcaacatgaagcgtcttcccttactaacataaagcaacaactgagtgagacacttaaggcctacgaaagacgtttcagtacagcttctggatgggttagaaacctgaacgacagtatccagcttactgctggtctagcaagaattatgactgatctctcgacggctagaggcgagttatgggatgactgacaaggtcgcccagtgcaaaacatcagcaatttcaatgagagagctcaggtgtttgttcgaaaagaggaagtgaggaaagagatgaagttgttaaggacttgctcaagaagtaaacccagcactctctcgacaagcacagtctcgacaaaggctgacaatccagcaggctctagtacaaagaggaaagatgactctaaggaatcagccaaagataagaaaaaatagaaaaagcacgacaagtacatgccaatctacactatttataccgagcttaatgaaactccagaaaatatctgttggaaattattttacctggatcttagatctactcacaagtatgttgattagatcggaagagc

SEQ ID NO: 16489 - DNA, 4187 bp, Cannabis sativa
  modified_base (3543)..(3549): a, c, t, g, unknown or other
tataaaatatatatatataaaaaaaaaacttgaaatttttttacaaaatcaatattatatgtaactatcacttttaaatatatataaataaaaagcccaaaattcacaattctgctaagagtccctatttgccaccgtggcccatttgataaggaactcatgctttgttaatccatagtcactcaaatactactaaatagatgttttctaaatttattacacatttgaatgtttcaattttggtataaaaagttctacttgcacccaattctactatgttgaagaagaatgttgtgtacaagagttgcattgcattcacctctttgtttttttttttttttttttttttgaaatgatcaaagagataataatgtggatgaagaatgataagattcaaagtgttttatgctttttgcttcctttcaagtctcagtcatacaaaccctcttgctcccataaatcaactaggaagtctatcatttcctgttcaagaaacaaaccatttacaaacaaaactccagcaaacaataatattggaagaaaacaacatatataattaacttacagaaagaggtattggttttggaaaaggcttgcttgttccaagtagactctcataagaggcattccaacttcaaatcaaacaaaccaaatatatatcaaaccacaagctcagaagtgtttgcaagatttttattttgggcttacattaacgtttttattaaaatataagttcatgttcatgaatataatcgatgatcaattgctaatgggattaacatttatgtaaaatctagttgaagcaaaaacgtaggttttcttagttaacagaagcctttaatgagaacgcccagtctaactagttttcctccctaactttgtaagtacatatcatctcatcacaattatatatttttattgatcagttgatcggctgaaatctagaaaaaaagacttagtaggtaagtattgcactaccaatctctattatttctcaattatctgaatggatcaatcaagtagtgcttctatattattgttgcttgcttctatgaaaaccccaaaaactattttaagattttcttaccttatcctgggctctgggctttgtgtccttatctgagactttttgtttccaagccattgctgccttgtctgatgccagagagtaagacctgaatccattcattccattacttagaatacttagtttcatatgtgcatatacagagaagataagatagacaatggaatttattacttcacagcatacaaaacaaagactacgaatggaaattagaccaagaaatatcagaaaaagagagttagaacaggcctcctatgcattgatttctaaatggaagtcaaggaaaactcaaatagtttgactatgccaacagtcaaaaccaaagtagaaaggaaagaccagaagaaaaagaagaagactggtgaatagataaacttaaaacttgagtaaatgaccaaaaaaaaaaaaactcaaggaagatggtactggtagtctggtatgtatgaaacttgccatggtttacgaattcgcgaggactgctcgaagtagcatgaggatcagaaacatggtttgaagtgcccaatgagatacttctctgggagtggaagccgctattgtccatttctatagtgctagaactccaaatatcctcggaaaaactagcttttgttgccgctttaccttgaattgtcagtcccttcgatggctcatccaccgcgataattagtgaaggtttggtaaagcatccaaaacagcctctgctctgttttaaatcaggttcaaccaacaaatattgattaacaccacttatcaactcaagtaaccaactcatgatacagattgtaaccagactgaaattaaaggtacccgctgaagattgtgacatacagaaaaaatttacacataaaaagaaaataatacaagaagctgatgaaaatgcaaccagaaagagtttatgactgtaaaagctttgatatcctccacattctttctatttttctcttgacaaaatctaacatgtatattaatgacacatcacattgcaaaggagtttagacaaaatctaacagcagttaattagtaccaagtgaaaattgcttggaaattcagaagtctaattcccatataaaaatacaccatttctcctaaaagattaggagaacaaacaaagagaccaaacgaattacccgggttccaacttgggtctcttccattaattcgaaaaggctcattaaactgaccaaggtcactagaattgttatgcaattgctataaaaattagaaacaggataatctagtttctatctccttacactgaaaactttcttgcatttaatcttgaacttctccgcaattaagagcataagagcttgaaaacaagctccagaaaacactaaaaacgagcagcaatctttctttccaaagcatctttcggtttgggacaacaaacaacattttgagtacatagctcctatagatgttccatgcaaaaggaaaacccctatgaatgctatgaccaactgaactgaagcccaagatttgaagtaaagaatggaaaatgcaagaaagaaaagccccagatgtgcactgttcaatatactagttcgcttaataaacaagtaaacacaagtacgaaccttcctaaccaagtttaataaacctcaaagcctgtttggttccccagaactttaaggaatcagggaaagaaaacaagaaaatattttttaattgccacctgactcatctcagattctcaaacaagaaaatcctcaatagctacacagaatagaaaaggaaatctcagtaaagctaacaactttaactcatttagttccaaaacagaaaacaaatcttatttgaaaatatacatatataaagtaataagcatattttctcatgaaattactttactttctcagcaaccaaacatacaaaaactcacagcactctgcttctacctagagatctaatttcaggaaacaattttaaaatctttagaccatacaaacaaattaagatatttaaaaggatgaagaaatcgatacaactcaccccatgcatgcgagaatgtcagagacccaggaaggaatatatctatagatttgcatttaaacaggctcaacaagagacttccttcagttgtaaaattctaaacccagaaagcagggaggcactctaatgttctgcacatacaacatacaaaaatacaaacacaatattagtccaaagtaaaaacccagaaaaaatctggataaaaagaagtagaacccaaataccctcttatggttctctaaaaattactaggaatatttcccatgatttttttttcctgcacattttctgggtaaagaaaatagtgagagaatagtatagacagagaccttgaatatagcatggttgagttgaaatgagattttgaataacattttctaatgaaaaattataggcccttttgttcctgattcagccaaacaaacttttcttttttccttctaaacctctctctctctctctcnnnnnnnctctctctctctctctctaactttttccactgttatttttttgataacaggtattaaaagaaggtgaccaaaataaacaaaaaaaacaacaagttaggtaagtatttgttccaacacgatatgccaactttgatttcttcaccaaaatgaaataaacaaacaaaattaaaatgaaaccaccttacccttttcagagtattaaattatcattatcataagtaatgagtgtatagtatatactaagcaagcattacattaagcttttgaaataatatgataaggtggtgctaattatcttattatataaaattatttatagttctcttttgctcaaaatttactttgggtagtttggaaatttttcatttttatggtttttttaaaaaaaaaaattgaaaaatataggaaaaatagtaacgaattacctaggtaacctgagagtcaccaattactcttcttctcttggtaaacagttactttataattttttctgatatttttcatttttttttagaaattttcccatttaataaaaaagaaattacataatttttccacaaattgtataaaaatttttagaatgtgtaatttccactattattttttagtaaaataatctaatcatagccttttttttt

SEQ ID NO: 16490 - DNA, 2100 bp, Cannabis sativa
atccactatagcgacggtttaaaaccgtcggctatagtctaacgacatatttctaccgttgcctattcaagctaatattcgcgacgctcgtataggcgacagttttacagaccgtcgggaattctttacccgacggtgtaaaaatgtcgggaattttgaggtttttagtagtgttggttaccttcctacttgtgttacaacttgttgttaagcatgttgatatttcttcaagctaccctgtatgtaaatctcaacctgaatctgctacacacgctcttgtttcttgtcgctttgcttcgtcctgctggcaaaaattaggggttgcttttgtctgtgatcctgtggctcttttagcagctggttggatggtatttttaaaagatatgcagtagatttggtgtgcgttgtagcagcaacgtgctgggctatttagaaagtcaggaacaaggttgtttgggaaggcaaacactcctatgtggatgaagttcttgtatcagcaagagtaattcttgatcattggaagcaatctcatgatgaaatttcattatcatctaaaatcgggtgaaaatactatcaagatagatgatggtgcaacagtttttgaaagagaaaaaatgtatagtttcagtattgtagctcatgattgttccgacaagttcattgaagctcaagcaggctgttatggaggcatttacacagctgaagtggttgaggctgtgggcattaatgaggctctaaattgggtaaaaaacaaacaatggcagtcaattgagatcgaaacagatagtatggtttcagtacaagctatcagaagcagtataataatgcactccatctttagtttccttattcatgattgtcaaattttattagtttttatgcattttgttagtttattttttattatgcacaatctcttagaattgtaaatgtcagtaggttgttaggattagttataaaccattttctgttacatgttagttatctctgtaactaactcttttcttggctactgagtattatataaactcagtcccttaatgtattcaatcagattaagcagagcaataatattcttcttcctctgtttctctctctctctctctctctctctcaaattctcatatggtatcaaaagacaccttgcccacagcttccatggcaagacccacaacttggtcacaagatggtgctcctccatcaaaggctgaccacacaacagctgagatcaactccgatcatcctccagcttgcaatcacaactcctcagtagttcctcggagaaatcaacatgttccaaaccaagatcaagaacctgatctggttcaaactcaagaacactccaccactgttgcagataacaacacagcagctcctgctgttcgaaatctcacagaagatcactcaagcccgttcttcctaagcacgggagatcatcctggattggtactcgtttcaacagtcctcacttgatccaattaccaagcatggaaaagagggattactatggctttgactgccaagaacaagatcgccttcatcaatggcactctccctcggcctgagaatggtaatttctcccttaactcttggctccgttgtaacaacatggtaatgtcgtggttaatcaattttgtttcccctgaaatttctcaatatatcatgtattttgatctagccactgatatgttgaatgatcttgccgatcgtttcaatgagggaaatggtcctcgtattttccaacttcaaacccaattaacccgtttacaacagagtgacctttctgtttcttcatacttcacaaaactcaagtctctttgggatgagttgaaagaatttcaacccattacatcttgtacttgtggagccatgaaattttttttggatcactataaccaaaaccaagttcttcagtttttaactggtttaaatgagtcttttgcctcagttcgagctcagcttttgctcaatgaaccaatccccaatttgtctcgggtttttgccatgataatccaagaagaacgccaaaggtcttttggttttgtggaaattcctctagctgctgcttccagctccaataatccaccaagaaccaagaaa

SEQ ID NO: 16491 - DNA, 6796 bp, Cannabis sativa
cagctgctctccaaatatctttggcatgatcacaagaaaataaggcatgtcctatggattcccaagcattagaacataagcaacaatttgtagagtttaagaccttccgatgaaataacgactttgcaactggaagggaaaattgaaccactctccaaccaaaaattttgactttcgaaggaagtttaaacctgcaaaacttttttcactaagttgcttgagatgtagaacttgaagatagattttgttcttccaaagagcacggaaaatggtagcccaaattatctgaatactcacctgattcattaaaatgccaaatccacttatcatcagtagcaagaaaagatagtgtaatggtaagaatatgatctatattagcaagagagaagtccaattgtaaaagctccaagttccattctcgactgatagtaatataatctgaaacttggctcatagcatcaccccgataatgcaagggagtgaatatggagattccaggaatccaagtgtccaaaccatatctaatattagtaccattacccacctcaatcttagaccttttaccaataaatctcgtccccaactaataccctgccatgttaaagaagacatacccccagtaacagcctctaaaaagtttttattaggaaagtaatgacacttcaaaatacgacttagaagagtattgtgattttggaaaatacgccaagcttgtttagccaataaatcttgattgaagtgaacaaaagactggaatcccatatcactttccatcttggttgtacacaaaaatttatatatttttttttatggatttttattttgtctgatgttgatccccaccaaaatttatccatcatagtctctagttgtttaccaaatttggaagacaatcgaaaataactcattgcataagtgagaatcgattgaataagtgctttcaaaagaatctcttttccaccaattgaaaaaagtttatcattccaagagtgcatcaacttctatatccgatccttgatgttactaaataattgttttttgtctcttccagaatacattggaaggcccaaataagattcatgacactcagaaataggcattcccaaaatttgttggaaaaagttcttggcgaccatcgttgtgttaggcgagaaagacatgaccgacttatctgtattcaattgttgtccaaatgcacgatgataaatgtcaagagcatgtttgattgctccacaagatcggtcattatcttgacaaaataataaactatcatccacaaaaagaagatgagagattgtaggtgatctacgagaaacacccagccccttaagccgaccaattttttcctcatattgtagtaagcgagaaagactcgcaaagcaaataagaaagagatacgaagaaagtggatcaccctgacgcagtcctctttgaggaacaactgaacccgatgttactccattggtgaagaacgaaaaggtattagtgtgaagacatgtcataatgagggagatccaacgaacattgaaacccattttcccatcaccgctgcaataaaactccattcaacctggtcgaaaactttcctcatatcaagtttgagggcagcataacctttgttacctttactcatgtgtttcaaactatgaacaagttcaaaagcaacaagaacattatcggttattaacctgttgagaggaaagcactttaagtctcagaaatgactgttgggagaacctccttaaagcgtatgaccaacatcttagagataagcttctagatgacattgcacatactaattggacgaaagtctttcgttgtctttagttttttaacttttggaatcaatgtgattagagtcttattaaaagttgttggactgccaacattattcaatacattcaaggaaactttagtgactaattgtcccacaatgtgccaattatgatgataaaacatagtcgacataccatctatacccgaacttttatcagaccccatcttctttaatgctaataaaacttcagaggtagtaaattcttttagtaaaaaatcattttgctcagctgtaattgatgcaggaattatagataaaacatgagacagagccaaataatattcttcagataccgtgaacagattttcaaaataagaagagaccatagttgatataccttcctttgaagaaattatattcccattatcatcatggagtgctttaattctgttattacaattcctagcagaggctttagcattgaaaaatttggtgttttgatcccctgactgcaaccactccactctagatcgttgttgccaatattgttcttcattacctaaaagttcatcaaaaatggattttgccgattgaataacttgagagggatcaagattagaaattggatttgagttcaaagaattaactctttgttgtgcatctgatatatcccttttaagctgaccaaacttactgatatgccatttttgtaagtgatcagcacacctatcaagatatgaaacaagaccaagagagagatcactatctttgtgataaaaccaacagtctgaaattaaaccagaacattcttcttcattcaaccaaaaacattcaaagtgagatcgggatcgacgtaattcgtgaaattttaggagctgagaaaaacaaattttggccataattgctctatggtccgatccaaagtaatccaaatgtgtaatagttggtgaggttatattatcttgccaaacatgattaatgaaacacgaatccaatctctctttcaaagttgttgggtttttcttattttttgcccaagtgaaatcatccccaataacaggtagctctaataagctacattggcccaatgtagaacggaaaccttgcagttggttatcatttctaagtggaccaccatttttatgagtatgggaaaaatttcattaagatcaccaattagcagccacggatcaaaaggagaaacatcacccaatcttttaagtagaacccaaatatgcttttatttatagcttcaagaaaaccatatacaacacaataatgccaacgtgggccatcatcaaacaagacacatcaatcaaagtgatttgtattcatagagagtaaagttacattaacattttctttccataataacataattccacccttcaaaccaacccaaggaacttctaaaccatagctaaaatgtaaagagcttttaaaatgagagaggacacctctagaaactttcatctccataagaaacaagacatgaggagattgctcacaaaaaagcaaacgtaggtggcggaacgcactttgactccccaaaccacgtattccagcttaagattttcatgacgaggagcaggattgctgagcaatcactgtattgtaactaaaaccaaagaatccaaagaagctttagaaattggttggtgaggctccactttaactgacaaggaagaagcttcaggtccatgaattgctcaacatctttttagagtttgtctcatttatttgggatcatgttgcctctttaggatgtacattttctttgtcatgattgactacaacagtaaaagacaatccaggaccatgagaagtagaaacaattgatagtgtaagtaaggatgtaaccctcatcagtagggaaggccatattaactgtggaaggcttaaaagatgaacttgtaataagatctggagataagtagcatgatgatgtgaggaagaagacttaaatggagagttaagagtgttgtctccaatatctggtataaagacatcaaatatatcaacaatagaaacactaattgtggccataaccatgggagtggtagttgatggaaaaagaggatcaataagtacgaataatgattgtgatagagagaggaagttagcggtggaagtggcaaaggaacacgactggtttaagacagtatgggtgaagaaagttgatgtaaccatctgtgtaaaagtagcagtaatggcagtagtatcactttgtcaattttggccattaaaatgctgagaattagaagcctcaccaattaaaagttgtttcggttgtggaggaggcctagtacataactgtgggattgatgcagtaagagaagttttagccaatcttgtgagaggtggccaagcatttcctttagagaagttcgaacgataatggtcataaggtgaagtaaggagtgcagatcccttcagtattggtcgataagccaattcgggttcaataccattgctgagattccttaaaaaaataggacacttttgatataagtgaccaatcacgccacattttgtacaataatctggtagacgttcatatcgaaatttcacccaaaattcatctcaaatttttaggaaagtaatcattttttctcttagcaggggtttagttatatcaatacgaaggaaagggccccaaccctcatttaaggagtctttatggacagccaagaactcacccaacaaatttctcaaaaccttagccaatgatctcaatttacttaaaaaaggaagcctataagcctgcacccaaaaaggagagaagatcatacctccggagtgacattttgcataacagttggaggatagagcacaatatgatggtttttggaagggccatggttccttctctaatgaccgaagccaatcgccctcacaaccaaaacacactaagaaaagactagagcggtgctccttgatattcactttaaatcgaccgtcccaatgctcagccatttgacgctacagtgttgaaagccagaatttttttagtaacaattcgtgcaaacagagcagatttttaatgaacatcaacctcaggagaactatcatcaactatagcaaacactaaactttcattctcagttaaattcatgattgatttcatcttatggataaaaaggtccatggaaataagaagaaatttggaaaagagaatgttgaaacaataaaattgaagaaaactaataagaaaaactataaggacaataactgcctcaaagcaataaaaggtagacgctctaaatataattaattttttaattatatttatcatggtcaggtatacttgtttacatttggtcagctcactcactatttaagaaatttttttggatggaaagtaaaaattaaaacaatatgatagtttaaagaattttacaagtaaaaaattaatttatgaaatgaagtatgacaaataatataattcacgtaattttttcaacaatatccttatacacaattttatattatactaattagaatttgataatctagctttggactgaggcaaaaagtctgaggatgacccaatccttgctaaagaactatccgaaagccacgtgtgtgtccatgagcttcaaactttttattaagctatgagcatgcgtccatatctttgtagtacacgtaaaacacataaaattaaaaacacttatgtataagtcacttttattacttttgataagtgtgattcattttaaatatatataatggtagttgaagtgatttatcaacataggtgtatgatttatgttacatatcattactcaattgcattaatccatataaaatattccaagaaatcaataatataatatactacttgtatagaaatgacataattctcttatatatatttatttgcagggtttagagaaacgttgaaatcagatattgatgtagggagatttcagccaccaggggaaagaaacacaggaatgaatttggtgatagtttcacatggtttgactcttagagtttttctaatgagatggtacaaatggactgtagaacaattcgaaggcttaaataactttggcaatggcaagatgatagttatggaaaaaggttatggtggaaggtacaagtatatatatatatatatgtatatttatatataaattagtttagtcttgaaaggagaagaaaaaaaaaagcagagtacgtatgaattgaccttaaccttattatcttatatttagcaatagctaatcatactatatgactgtgcataggtatagtttgttggttcatcacagtgaagaagagctaagaaagtttggattgacagatgatatgcttaccgatcaagactggtaagaacttcatttatatagaatcaagccaaatatttgataaaaaatgtacctagctattatttcgtatgtttatatacataatagtctaacttttgtggtggttggcttgtgatttaaggcaaaagtacgcaaaacctggacagctgaactatgactgcccaactttgagtgccttctttcctcacttagatgaagagtgtgctactgtaccataattgtaattattatagctgtaatgacatatagtcgtgtagtactaattaagagcactcccaactccaatagcttctctactttattttttaaaataaatcactaaattttaaattttttattttacatttattgcccaccatacaacttctctattttttctcactaaatcatttaaatattatatcttattaatgaaaataatattacataaatcataaaaaggaaaatgcaataaagaaatggagagagaatgaaagaaaaataattgaaaaatattttgagatgaataaataaagatgatgtaaaacaatgaatgattttagggcatctttggaagaggtttgtgcttttttttaaaaagaactctttaagagactaaaaaaagaaagaattagtgcatgtttggcatcataactaaaaaattattttttgtttttaaaaacaaaaaattgttttttgaaaa

SEQ ID NO: 16492 - DNA, 9035 bp, Cannabis sativa
aagatttttaattggatttagatccaaaatatcccatatgcataaagcacaaccatcacagtctatgttgataaccaactgtaccaatgcttaattcacagaaaagtagagggctagagatacctctgtaacaatatatccagttgatgctagaagcggaagcagaaccgagcacgtggccagaaccgatgtaataccagctgcagtcccttcaacagttttctctatgaaagtcaccatgtccaggacatgtcagcaaaattttgaaaattgataataccagctgggttttagaaagaaacaatagtaaaataatataaccattaatgaaaagcatacttactgcccgacttgctccatctaaggacaccatacttgtagccaaccattgatgcctgaatatgtaaagcaaaactgttggtaaaacatacaatacatcatcgtataaaaaaggttttgatggatagcttgatagcactctcgataatggtttagaaaacattttcagcaataactttgttctctgccagcttttataacagatgtgctataaaataatcatcctaggatcacagttaacatactctgttagcattactaatttgacaaactattggcatgaaacttatggctacatgtgcacgccatagttttttttttaatatcttggcacacttggtgcctaaatgagcccctaagatcctctatattaagagatcccaggttcaagcctgggtcacactcatttcttaaacccagtcaccgctagaccaacctagtggcttctgtgcaagccacagttgctaacaaggattcacaaatacagaagaacactgaactctttacatcatgcttgccaaacaacattcttctcatctcaaagataaggacagagttatgaatgatatctctaacccaaaataacaccctaactagtatatcaaattattggtgcacaattacaagtacagttgtgaactcgctcaccattgtatctccaatcccaaggctcaaaattccagcaaaaggaacaagaggacgatcattgtagccagaagacatccaaatgggaagtgcacatcccaacagaagtgaaaagtggctgaatatttaagatattagaaattaaagcatcaagatcattttgataagtactaaactttaaagtttctggtccaagagaaaaataaaatgcctcacccacctaacaattagaatatcagagtcacgatggtccgtgaaagcagtcataaattgatgcaccagtcgccccagaggccaaagtctccatacctgactaaaacaaagtagttacaaaaaaatgtaccataaaacataagaggataagaattggttaatatttttttgaaatgttcttaagaagagcttagacccagcaagtcttccgaaagatgaccatgaataaagcagagatgttatattctttccaatttatgaacccagattccatgaaatacatttcagcttttatgtcaagggacttaatttaaagtttaatagcacttatttaagactaaaagacttggtttaaaatctacgatctatcctaggttactaaatttatatttgtctaatttagaaatactattttgttttcaaacttcgtgttttttatgaattaattgtttgttttatgagttttatgttttttttcacaaatttatgattatttaaaaaaaatcaaaatgtatgttttgtttcagttgaggaaaacgcctcaattcccaattagttatttttgaaaaaaaaaaaacttgggtgtagattagtaacatagttgcccaaggtatgcactgaacaaaatttgatcatattgatgtacaatcttctcttcctatcgtacgatcctgtacttgactttgggtaattcatcttacaaatgtcaaatatgggacatcctaagtcaattgaatgggatcaaagtttctcattccgcatttttaacataatttttacaaacctccttttcatatacatggataatgccagtttacattagaacaaaagaaagacaatttagccaaacaatcatactattagttttgtaacttactcgaacaatttccaatgccaagaaaactcccaaagccacaccaaatgctagatcaagaaatttaggctgaaaatcaaacataaagagaacatatctaagaacaccacaaaaaagagagagaataacatcagaataaatacattaaaatcccttaaaatcacacctggaagactagagcagggagaaacattaaaacagccataagatggtagtacttccgtagaagaatcctctcgattttgctattttttgagatgttatagaatctcacaacagaaacacatatgacaagcacccagtagatgcataaagataatcttttaaggggttctgaaaagacaaatgaaaaaaccctgccgaaaagaaaaacaccatgtagagattagagagtaatttgatataaaaacacagatgccagaacatacagcagctaatagaaatcataattgtagaagtaacacctaccccatccctacccatcccaaaaaaaatgtcttattcaacttgtacagtataccaatttatacatcttcaaaggtggaaaagtctcgacagtctaagtaataaatgtatgatccaattcacaggaaacctaaataactatattaattttgagcaggaagatgtttgctgtagatcctacaaaagcatgtggctatttcaatgttataacaacttcatcgtttagcatggatgacttctgatattgcatcgcaaaagctcctacaaagccagaactttaatcttacaaaaaattacttggctactaatcatgtagggttcacaaggatagctactactgttccaatattcacattagaaaatacatagccaagatataaacactcatgcaggcctaaactcctaatccaaccattatcaagatatctaacgtggagaaagttaaaagtagcagttagattagttagactcaagtagccccaacggaatattatttagtcagtaggctagcctaaggagggatttattatctgactgttcaaagactttgaagagccttgatctagtagagagagcaaacctctcaaaagtttagaaccttatttgtacattgagtttgttcttttcagttcaataagagaaagaattcagtttcagttgtcttttacctatgatagagagaaagagagaaaaaaattgggatccaatacttcttgtggttgataattgtacaacatcaattaccactcagcaacaaaatgcactcccacccaacccaagcatcatatggtggagacccaccccacatgacctaatgtaaaggagtttcagaagcggataggttgttacaaaattgagatgctgttcaagatgacttgagaatgcagatagaaagcgacacgaaagagtttcagccagcttttttcttaagctgagaccataacggcaaaagttattaggtcataggaatgagaaacatccaactatgtactatgtactataaaccctacaaagcaaaggattgggaaagtagcctacaaattggagctgccccctacagcagccatacaacccactttccacattggcatgcaatagaacagactttagcaaccattattgctcctccccagctcacatccaagttggaatgaaagtacaaccagaagcaagcaaccgtagatgtgtgccctattcaaggaagagagaagatggagagcaagaggtactgatcaaatggaagcacttaccagaatttgaagttaccttggtaggaattttagatcctaacagagcgatttcctgaattccaccttgaggacaaggtgaaagtttggctggggtaattgatagaccaataataagatgaaagttaaaggcagcagttagggtacataagtagttttatcaaaatatatttagttcatttacttgtccataaataagataggctaaggagggattcattatctcatagttttgtaacattgaaaagcctagatccagtggagagattaaacctcttgggagtttggaacccaatttgtacattgaggtttcctttctccttttcttttcttcagttctatacaagaaagatttcagtttcagttctgtctttcacctttgatagaaaagaaagttctatcactcccatataaatattgaatctatgtcaaaacaatttatataaaaacaaaatataataaaatataagtgtttctcatttgatttaaatcatagtgagttcatagcagccatcaaacagagccctatagctaccaaactaccacctcaaatttaatataagtaaatgcaaccaaagtgatagcaacgtcaaacagagccctacagctaccaaactaccaccctaaatttaatataagtaaatgcaaccaaagtgatagcaataccatagcaatggatgcatatgaaaatcctgaacaaactccatccatgttggaataatcacaatcatgctaaatccaaggcaaaagaagaatataagagatttccgaatttcattgtcgatccttgattgagaaaatgctttagttaaaaaccattccaaaatttgaagtacaaatctaaacaccactggaaaaagaagaaggccgagcagcattccctgcacaagagagaagctttgctatacagctataacattttcttaatcaattcatcacataaggaatcatacctgaataataacaccaatctcactccttttacttccataccgcaccatgttttctgtaatcaacaatctacatgcctgttttttacaaaatttgtcactgccaatatcataagctagttttcctagaggaaacaaagaacaatcaagtgcagaagaaccttacttttgctatagttaatgccaacatgtcccctaaatagagaacgagaccggatgtcaccaaaagtgcttctcctgaatggaacaataagaaatgaatacaaacacaaaaaaataaaatttttgatgtaatttgttactttaatattaatacgtttaatattagctgtatttatctttatcctcggtgaatatgttagagttaattatttattaaagttggaaaaataattcatttactatttgaaccccaacattgaggtttaatttcattactcaataacattcaaattttcaaaacttgtttggcgttgtttttggttttttgtttttaaaattgtgttttaaaaaaatgagaacgcaaaacagtttttatagtttaaaaaaaaaaactgttttgtttatgttttttaacagtagattttagatcattttcttaagagaaaaaaatcaataaaaattactcaatatacttatagaaagataaatcttttaaaacttataaattataatgaggaaaaagtaatattgtggcaataatgagaaaaattaatttgaaagaaaaagtgatgaagaaaactccaaaaaaaaaaaaaaactttttgttgttttcaaaatttcttagttcttgtagctttatttttatgtattgttttcatgaaacaatgacaaacattcccacttgtgttcaataaacggtttttggttcttaaaaaaagaaaattttttttagttatgatgtcaaacactctcttaagttcttcagttttctctttactctcccgttcttcttgtttctctcagtagtaaactacatcaaacagtataaaaaaattgaattgaaatggtttatgcagtttataatcaagtaaaaataatactgacataaacaattagtttaccatatacgtatttaaaaaatttacaaaaggtttcatgataaataccaatggaagcacatgacgggaaagtactgagaagatgctgtatcaatttcacagctgccaatccatgacaaaacatccataatagctttaatattgtgttgaagcctgtaaaaaaacaaagatacagtgtcagcagagatatatttaaacttcaacagaagcaagacacacacacacacaacatgaaaaatcaaagggatgaattacacttcattgtaatcgaatcattgctctaattgtgtgatcggctattaggacgatggagaaaataattactagttgtaattgaagattaagcacttactggtaagagagattgtaccaagagacacacagcaaagtgctgtatataagactatacaggtcaagctgaactttgcatgccgagcactatgcagagcaaggggatgcgtattgctaggtgtatttgatataagcacgcaaagaagtactattacgcctaagcaacaagcagaagcagcccagtactgcatcgttaagtgctcaaactctacacaccgaaaataaaacaaagttacaagactcacaaattgttaaaaggcataaaaatatacaggatggaaggaaaggaaacgattaaacggagataaatttccataacttttttgtcacttgagtaacatcgtaaacaatcaaacggagcaatattgattgatcttttattcgataattgaccagaataaaatgatgaaattttgaattcgggaaacaatgtatttctaccttcaatttcgatttccttcaaggaaactgccctttctatctgtatcaacttggacaacataacagttggcagggtaacagcacccaatagtataccggacgaagcacctggcctgaaatataattatacatatataatgagatagagagatttgtaaatcacacttttctaagttttaattaagcataaattcaacattacaaatccatatatcacccgaatctgaattaagaaataaaattagacagatattgaggagaaaaagaggaaaaataatcacctggtttggaaaagggggaaggaatttaaataatcggctccaacatcgagagataaggcggcgagtgcgagaagagatagggcgaggccatggcagaagagagaaggaggaagggagacgacaacgcatgttacgaagacgacgaccacagctctctcaccgttcagcagcgacgccatggccgccatttttaatttcaattttatttattaagaaaaaaaaaagggtacaaaattacacagatttgataaaatatcgagacatgaattcttttttagttacttcggaatttccaagaaactactgtcatttttggaaaaggtaaacatgatgtttgttagttgaaaacaacgacagacgttaaatgtaaggcgaggaaacgcaccgaaggcaccacgtttacgcgtttaaggattccgctactggcttttataccatatgactttttggaccaaataccgccgtagtttctactcaaagttaaaaaacaacaccaaacaaagggaagggtgatcgagagtgtgatttaaaaaaggtttcgaaactaaaaaattttaagatatgcaccctaatatacttaaaaattctatggactgagcataaaattcaaaaaatagttcaaaccgtttaaacctacctgccgaacaccactaaaattaaaaccgttcaaaccgaaaaatcgaaaaaactgttaaccgcccttaaatggtcggtttttatttcggtagcaaaccgaaaccgaccgaatttatataaaacataaataaatttatatatactatttaatttaaaaatttatgtatatataatgtatataaaagttatatgattattacattaatattaataatattataaatgaaaaaaaattagtttacgtgtgtatatatactttctaactctgctttccgtctctctctcgtgctcagtggttttttttttgcctttgtgttttccattctaaaggcaagctaacaggtgaactaaatctatctcatatcatctcaatctcaatctcataaattataacaattgatcacatcttacaaaattttaagtctccactccatgaatcaatctcagtgagtgtctttttattcatcatctttctatatatccttcatatttatacaaaataaaatttttttctcatacattctctcaattttagagatgctaaactactagagtagagaaaatcgacagaagaaaccaaccaaaaaatagattatgttagaaaattagttgtaaaaaattaaggtaacttgaacttagtagtttcctattttgtatttagtagtttcctatttaatctcctagctttgtatataaacatatactattttatggaatacaacacacaatttaattcactattctctacatggtatcaaagctgattttaggattgagaattcaaaattagagtttttcacacatttgggtttttcaattagggttctttctcggaaaccatttttagagtgataatttgttttcactgcccactcagaaatattgcccgccaatctgcaaaaccccaaatttcagcgtccagattcaccgcgcatgggccccacgtgccgctgtttgtcgctgcccagaatcccacgcgccggcgcgtgagggcgcgtctggcatcttctccggacctattttttttcttttataatgtgaacagtaaaatgggacaaacgacgcctcattcttcgttggggcagacagagcaacaccggaatcatgaaaacactaggaaaacacccataaatccgacaaagaggaaaaattagtaaatcaacgaataatcaagacccaacaacaacatttaagctagaattcaaaggaaacaaaagaggtaattacacctaaacccacagtattttaattttaaaataataaaaaaaaaaaaaaaaacacccagatttagatctggaattcaaaaaattaaaacgagtataatctgaaaatgtataattatacatgccatttaataaagaaaagaaaaatattcatatatatcatccctgagaaacaattaataaggtaaattacaaaattcaaggttgttcttcgcttataaccataaattcattgttaattaggagaatcagccaaataatgaaaaggacaacagaaaaatgaattttatgtattatttttttagtgtt

SEQ ID NO: 16493 - DNA, 4242 bp, Cannabis sativa
aaacatgaaaacccatgcacagatctcaattaaaatactagaagagccaataattttgaatatatatatatatatttatacatgcaaaataaaaataagaaagaaaaatagaaataggcaattgggattttaataacccatattgcattttcaacttcattaatttctaattctcctcacagggtaataataataacatcccaaccacagtgaggaaaattttacatcaaccatctttatacaaattgcaaaacccattaaatcttttctcaaatgggtttctcaaaagttagaaaaaaaaaattaaaaaaaaaaaacccatcaaatggggttccaaaacaaacccacctagctttctagccacctctctctcctccaaaaaaaaaaaacaaataaataagatgaaaaaaaaaatcaaaagatcaagaaccctcccaaaaaaaatatataaaaaaaagagagaattttttttttttttaaaaaaaaagatgaaaaaatttataaaaaaataaagagagaagccaaatacacaagcttcctctcttcataaatcatcttttttttttctcttctactcttttcttttttgtttttgggagcgaaattactttcttgaccttgttattttcttttcatttcaaatatacccttccattttttctcttcttcatctgagcatggaagttagagagcgaaaaaccacttcttcacaaggaatagtgagacccatttcgtgatcgaacccaaactcctcctccgctcgccggagcagagtttgaaactcggggtgagtcaggaacgagatgggaacaatgtacctcgttctgttttctccgacgtagactgcgaaatgacctttcggtacatcaagagggagacccccttcttcatcgctatacccattgttgttgatgttcttcttccccaagctcgaacatctcttcaagatttgtttcagtactgcggcttgaggaagcttgtttgattttctaatcgccatttttaaaaatttctgagcagagagagaagaaaaagaagaagaaggactaaagtgcaaataaaggaaaaatggatgaagagtgtggtgtggtgaagaggagtgaagaagggggtatttatttaggagtaggagagagaaagtgaagggtgtgatgacgtggcgtgtgggaagagagagaatatttaataaacataaccacgggtgttttttggggcatgtacttgcgtggcagggttcggtgggagccaggcccattgggccttactcttctatgttggccttctaatcactctacgggcccattatttacgtatatatggtaagcaatatcattttaaagcttaagtctatgttttattattattattattattgttaggattatcttggaatttttgatattaaattggtgatcaaccttgactaagactttctcataatgttgtgttgaatataatatatatgccattgaaatataaaatttatgtcaagaagaagcattgtctttgaattttgtgtgtttgagagacaaatgttgtgatgtgtttctattagttttatttattgaaagatgtatgattaaatttaaagtgattgatgactcatgtcaagtttgtgttatatggataaaatgaatgttttagttgacatatgtactttattacaagttgatatttttttcataacaaggtcaagtttgttatgagtaagataggagtaataaaattagtattaaacaaatgagttttgggtatttttattttttgtgagatgatctatataagtcctttattaaacaattcgtttgggttgatcttactaattctaaaatgatacaagaacaatctatttcatcaagtgaataaaattataaatgagttatatacatattcattagaattttatttaaaatgtaagatactgtattattaagatgaataattatcttagttgttgccaattttggctataagagtgaaataatctatattttatatataaatattaaattagtaagattgtgtaataattcgtatattaattaattaatataaataaaatataatatttttataatataaatttataataatacataatgaatctttataggtcataaatatgaccaataaatacgaattgccacttcaaaactaacatcttaatgaaaattagactagtcataataaattgtttacaatgcctaatttgtaagtagctcccatcccatcacatggatattattattattattatggtactaattagggtaattcaaatcttagatgcacataagaaatcaataatggttgttaaacaattgcaaaaataatctaaaacctgaaagagatagagatgcttacattatttttgtactaacactaactttatttatttatcctattttgtgctactttcagaaaacaaaaacattttcttaataaaccaaccttattaatataagatttttcttttgatcattatttaatatggatttgatcacaaacataatctctccttataatatctctattattattttttttactgagatgtttacacagtaatttttctttttctattttctaccacacactctttaccaaaagtagatcattgaccaccataaacctaacaaacaaaatatataaataataataataaagtgaaaccctttaatatttacaattgttacacatataactttattgaaaaaaaatgacaataaaagtatgtacctgccttacaattttattgcagtcgtacatttttttagtccttaaatgtcaactcaaaaacatgtggcgacatattattagactatgtattgattaagttaaacaaatataccgctacgtgcttttgagctggcactgaacaagcttaattaacacttaactataaaaacaaatgtaagattgcaacaaaatcgtaaaataagatacttttaccgctacaaatatccccataaataataataataataaaaacagtggggattttcctgtttttttcaacctgaattcacggactaatattaaggagtgtgtactcttcagtacaatactccaatgcaactgtgaaagattttggccttttctcaacttgggtcttgtgatttctgtggactcactcagtctcacatacaaactaacttaactaactttattttttttttttttaatttatttaccaatccaaaaaatttgtgcagaaacccatgtgtgtatttataaattaatatattaactctttgtatttgcaggttttgaccttaataaataccatattttatctttaaacggtcactcacccagaaaaaagagttacctaaataagctaaatctgcaaaagttaaagctatattttaataaccatatgcctaaacttattattatgtacttatttttatttttgaataatcatatgtttatgttgttttgctaagaagagttataggaaaaaacaaagtttgatattgatattctgggggagttagttgttttgatttttttaattgtcattattgctgtattgaacattcatttatgagagtttttaaactcattaagactgacattaattgagtttgatactatttgaatcttagatgaagaaaaacaaaggtatattacaagtaactgctgagtcattcttaactgaaatgatctcacacttttcgataaaaataaaaattagggttctaaaacaaatggtccactcttgaatagatgttctaactattttattgtttcaaaaaaattgattcacatttctatatttttataagaaaatgttaaaaaggatatgtctagcacaatttaatatgttttattgttattagtattaaaggtgttcatttaattaaattcctattattttactcataataattttaattttaccctttaagagaaagctcctcatcctaatgctttcactattctcactaacacatggcgatagtgggtcgctcgtcatttgaagactcattgttcggctcttcctccaccacctttttgccttttctctcaacaacaggcaaaggagattagaccacctcgaccacaggctgatcaatccttgtagctaatcagattgggcgggcaagaggtgcatctttctttggagcagctttttctttattttccacaacccgagcagtaaaggactttctcttagcctctttggacttctttttactcgtaatgaaaggatcgtatttgtggaaattttcctcc

SEQ ID NO: 16494 - DNA, 3851 bp, Cannabis sativa
gatacacatctcctattgttggaaggtaaattgcctttgtactccattgttctgagaatatctatcattctttaccagtatggttcatgctgctaggtttgtgtttctacatacaaaattttgctataacccgttcctcacaaagttcattcctttgtctcatgtatatttttgtcgtagttgtcacttttcactcccttacttcaactaggattaattgtttagtttctagtatatgaagaatcctgaatgtttagttgttactgaaatatttcaaagacatttgcttacttggtcatatttttgtttccctaattgaactaaacattttaagttatcagcgttggattgatcgttcttggtgcatttattgcgggagctcgggacttatcatttgatgcctatggctattctattgttttcttatcaaacatcacaactgcaatatatcttgcaaccatagcccgtattggtactacttttgaatttttttatttatgcagaatctttcatctcctcatttctaggctaacaactgcttaaattgtgaattaaaacttgttctgtttctcagggaaatccagtggacttaacagctttggcctgatgtggtgcaatggtaatcttatcaatcttaacttacactctagaaatttcatgatttttttttctggacagtgataaaatgatatttaatattatcttacatatatgaacagaaagtgaatttttttcttcttcttcacaaataaataggaattgtatgtggaccaattttgctgctgtggacatttattcagggtgatctgaagatgactctaaattttccttttctgctctcacctggttttatggtaagtccttttcacctttataacttcaatcgttttacattgttgagttcacgcttaaaaagttgattgaagctctaatcatgtaaaactttagttttcatgctgtcatttgttttttaatattttatattattgttttgcctttttttggacaggctgtgttgctttgttcctgcatacttgcttttttcttgaactacagtatatttcttaatacaacgctcaattcagcactcacgcagacaatttgtggtaatctgaaggtgtgtttacaactgcaatttgcatcttttgcgtcctttgctaacataatttcaaataatcggtaccaaaatgaactaatctttaactttctgttattatgatattgtaggatctgtttaccattggtcttggctggatgatttttggcgggcttccattcgatcttgtgagtataaaatctttgtttctcccttaattatagggttatttattatgcctgctgcttcactcttgtcatggaaccttatgttatgtttatcctttttgtagtttaacgttattggtcaattccttggcttttttggatccggattgtatgcatactataagctcatcgggaagtaacttccgtcgttgctcatttgactcttcccgttagagacgatcagttttggccattgtttatatcatcctcacaccttatatctaggcacctattggggcctcggaagctgtataacaatgcttaacaaatcttatttatggttatggagaatcagaagtccccaatcttgcttctcgaggtacactttactatagaagaatggcaactggtttttgatctaatttgttgtaagaagaggtgtcacatgattagcttcctcttcctaggcatacactcgattttgaagtagatatccatcttgatttttaggaccgccttgtaaccataagctatcgagaaaggtgtttcccctatagtcgtgtaagggtttgtgttgtatccacttatgctcattcgggtttcgcaagtttggtgttaggttcttttttatgattctgttgtctatctcgacctaccggttggcttattagggtttgtgcactactaaattctttttgattcctccattgcagtaggcttggagtttgtcatttttcaaattgtgtttcattgtttgaaagaatcttgtaaaacccaattaagaaagggatgaacttgaccaatgacgaaagcacaatatatatttttttagagtaatttgtggtataaataattaagtttaaatcttattataaataaatactcaagtttaatttttggtagtaataatatttaagttatgtttttgtttaattttaagttattattggtatatttaaattatttttttttttaaataaaaattcatgatttggaccaatcatagattgtttgtgacaatttacttaacacttaccaaggtatcttgaaaatataaatattttgtttgttgaaagatcttttcaataaaatcaatataatctacattcggtttagtttatcatatggtaagtaagctgttgttaacttgttaatgataagtccaaagaggtgtttagggaaaccaatcccatcaattttggagaaatgagctgtctcaaaatagtgaggggcttctcattttcgactcgaatgaagagaaaattagattgtatatttattttaaattttatttttatttttatattttttaaaatatatctacttttattataatttttaagttaatgtaaataatgtgttagatttaagtggagagtgaatgtatattagaaaactcactcacaaaacttataaaatagaaaggataatgggccttttgggttgaagcatgatgggctgttgggctgaagtttcattggtagctttgaaaggatgggatggatatggtgagactgtcgatcgtttggtaaaaatagaaatttttttattactaaaataactttataaaaatttttattagtaaaataattttgtatgatcatagaaatgataatgaattatattgtgcaatcataaataactattatagttataaaacgattatagatttacattgtgcgaccatcatattcgcatagaaattaacaaattttagtatttcacattgttaatttggtaaatttcacatgtggtgatcatagatagtatgggtaaagaggagaagtgggccaaaacaataggctccaataaaatgtaatgagttggaattgccgtgggcttggaatcccaaagaatatttagttcctaatgaggcgtttagtatggagttaagacttgataaaaatagaaattgggaatgtcaaagtaaattaaattttaatgacaaagaggtttatatttctaagtgggtactattttttaattaaaatagcggtaatgttaattttttctaaattttttcatattctcttcaaatctactttctcaaactcaaactcacataacaaacaactataaaaatttaaattaaatatatattttaataatatagataaaatatttgaataaaagacttaaatattctaaaatagagtaatgttaaaaacacactgaaattatttaatcttaaccatacaattaaaagtaaggtcttttttatttttacacttctaaacattttttttgtatttgtacggaattctatatagaaacccctattgcaactaacgctgcaacttaaattgtaacaaaaactgcaacaattttagaaactcaaatcgtaaatttaaaaaaaaagttaaaaaacagtatataaagtaattcccctaaaagtaatatagtccctacttaaaaatataaatgactaatatttaatatgaatgaaatattaagtaaatttatcacaatataaaatatttaaataaatgtatctcttttataaaactcataaaacattctccaaaagaaaattattaactaaaactaatcaaagtatttttactaattgagtaggccaccaaggaagt

SEQ ID NO: 16495 - DNA, 6587 bp, Cannabis sativa
atttaagtcatcttcaactatgtagtcccatacctacacaatctcaaaatcatcacacatgatctttcccaagcaatgtgagattgtacaacttatggtcttttcccttcagatcacgtagctctaactatttaattactgtccaagaacattttttttttaagaaaaaaattattgtcctaaaatatttgtaaatgtggtagttgattccttagctaaatttgctctaacaattactgcaagcacagtatagtgatctgattatccttgttgtatcaaaaattttatcctaacagatgtcatgcattaatgaattattctagttctcagcccctttgagctcgttgctccttactattttcttaaaaaaaaaaagattatattttttattttgaaatgaaagatattcattaaagcaaccaagaactggcaaggcaagtccgaaacatggtggttaagttaagttttcaaaatcaatttttgctggttaggttgggatgaacttttctaattgtatcagtaatcagttacacaattatttccagtcaaatattacttgtttcaaatcctacaatttatgtgcctcaaacaatttagtagttttgtcagagtactattcctttattcatttatgtcaaaattactattaaaaaaagaagaagaagaagcctccacaacttcatttatttatattaaatattatattcccatgtccatatttatgaactaaatacaaattcaaaaacccattttcaaggactcatgtaatgatccttccataattaattttatttatttattttttttaaaaaaagctggaattatgtaccctttgatcaactcttaacatatatcaggtataaacctaccacatccaaagttcagaacaaactattaagtatcaagagaagagtaaaatgacattaaaacctcagcggtgcaatagcagcctgaaactgaaatcataaggtgttatttgaaccaattgtgaaagtggttctcttcctttcctctcatcaaggcatttcatagcttcattccttgtttcttttggtagttgtagacatacccaatcaagcattgaatccatatctttggcaaagtcaagaagataccaatccaataattttggtatgattactttgtttgtttttgagataccaactgttgcttgtagataatctctttttgctgcttccaactcctcttccacttgagaagcagagtacactctcaccttcatttcataatatcaattttagaaactttaactaaacttattgtagctctaatctaatctaacataaaagacttgaagagctgtaataaaatgtgaaaagaaagggaaatcttactgcaggagaggaccaacttccacaagagagtgcaaatgtaaccaatggctctgaccattccaatccgaatttgcttcgagctctcatctcatcgttcttcgcagcttttggacaggtcttttgtaacaaagagaattacatggtaaagcttagctagccatggataataaaaaaagctcaaaataatcattaagaacatagttgactatattgagttttgcttacaaatttcaagtggtaaggtaatctcaatataaaatgctcaattgtaattgcattaagcaaatgcccaccaacagttattgttgcctgaagtaagaaaagatgaaacagtttcataatcattctctaacaaaagcacatagagatctctgaggctaacatgctttaactttacacctttaaaaatatttcattgagtaatttttgggtttggaatatcatttaaattgacattcatattcaagtctaaaaaagatagaatatgaagtaagaactgttcttaccttctgcattagtgcaacaaccatttccggagtctcaggtacaccgtgctccaaaaatgcctacaacattgttaattaacacaacttttagttatcttcattttcataatacattgaatttgttggtggtattacaattcataaaaagagagacatcttacattcataatgcaagaattataagtgttaatccaaaatgcaagcttttgttgatggttgagaccttctaagttcacagaagcaagtttcccaagtagaaacctaagtaaacaatggtaagtacagaataaatccaaacacaatcaaaattagtcaaatgggagcataataatacttacttcagtttgtgtatcaagaacaatgcattggttgttcggctgatatcaatcgaactagcatcgatagaacaaagatgtttgtatggaccaacatctctatttttaaaatccaaaggtgtaccataaggatctagaaactcgatgtccttgtttgctaaccgagcgaaaaatgacaactgagaactccctgattcaactgctctgtccttcagtgtgctcaccattctcaccaaaatgttagataaacacttaacaatatcctcagatactttattaggagaacagtcagcttccattgctccctcttctaaagatccagatgaactgtctttagctctttcctggtctaccaatctggattctagctggacaatcaaaagatacaattaacacaacaacaacaacaacaaccaaaaaacaaaaagaagcaaacttttatattagttataacaatacctgcaacttgaattgatcaggagtagtagtcttgtcctttggctcttgcttcattggtggtttcttaactggggttaccaccattttagtatttctcttatcaggagatggtttatgatcaactttcttttcaggggatgctcttacaaagtttgaccataacctattctcttttcctcttccatcttctgaaatggatggaattggttcgagttttcgagtactaagctttccattattattattagcttgcccttgcccttgcctagtagtactagtactagcagaacaacctcctgatctgactgagatggcatcattggggagtaactttctacttgatgtagttctacaaagggaaggttgttgagacctggctgctgctgctgctgctgctggtgaagaagttgctgaattgaaatcgaattgagacatagatttcgacctatgatgcttagcatttcttacaggagtggtttgatccatagaagaagaatcacttgaattttccacattcctctttgaacatacatacacagcttcttgataaagaccttgtctaaaattcacaacttgttcttcaagccttacaacttcctcctctaaaacagctacttcagcaagaagctctaatgtctgaaccaaaaaacaaacattttcattgaccctttcgaatactaagctagaatttatatacacattatatatataatcaaatattttgtaagattataatactaacagatgaaggaagatatggaggaagacgaggtaaggctcctaaaggtcttgtgaaggccctttccaaagctctatgaacattctcttcatgtctaagcttcttcttcaatttatcaacctgtaaatatatcattttcaatacaatcaatatagaaacaaatataaaaaaagtgtaaaaaaccaagttgggaagtgtagtacatcttgtaacaaggccattttcctctccttgtttattcttcttctattggttagagttttctcagaacgaatgaccactcttctcccctgagtctccatcttctcctttggaaaattcaacaccaaacacacaaaaaaaattatataataatgttatgaatgtattatataccaataataaatgaaaaagggatctgcatgccttgttgtaaagaaataaattataaaagaaaaagctattcgttccttgagataagtgaaagaaagaaagaaagaaagagagaaaccaattcagatttggatcaaaagcattcacttttttttaacttcattaagtacataattggagactgtgtttattaatgagaatttaatgtaaaatttaatacagaaccaatttgaattttcttattttctttttcaagtaaaacttcaacaccctaatcagacacccaccagatttgaaaccttcttaagagtatttttgaaaatttgaagctccacatttcttcaaagaaaataataaactaaatgaattaaaacccaataaaaatcacatttagaaaaagaataaaggaagttactttatcaatatgatttgaagaagcagctttcatggcctgaagattagtccttacactggttttcatctttcttcaactttctttttctctcttttactttttaagaaaatgaaagaacataatactttactaccacaaaaaatatataaaaaaaaaaatacacccaatactagttacaacacatgactcacatataatatcttcaaaagcttaaagagaaataaaaattgaatctttgaattataataacaaaaacaatgaaaataaaaatgacatttttattttacagagcgggaaacttgaaagaaagaaaaaagaagaagaagaagaagaagaagaagatgaggcaggaaaacaagtgactggcattttagtctaattttgttcaaagtctcgaacagagtgaaagaaagaaaacaacaaaagaagaacaaaacgacgaggtttcgaccttcaaatcaaaatgcaagaacagacacacatgaatgaatcaatgaaccaacttgtactaaaataatgtcacaaaaaaaaaaaattaaaaattaataaaaaaagaacattactttactttattatatatctcaagatttcattttgtttttaatatgggatgacatagttttcattattatttaataatgaattagtagaaagttggacttggacaacattttttttaattctataaactcaaacatatttttttttaataagataataaagaaaacaaaaaaagaaagtacgtgattgtctggagcgttttagtggttctaaaatctaaactatattattaataataattaataaataaataaaattaaaagagagaagcgctctcttctcattatgaattaacgtgctttgatgttctctcttatctgtctttgcattaccaaaataccaaccattaacctttttactttattttattttaattaatttatttttctttggattcttttttttcttcattcaattcaaaatttgaatgaaaagcttgggttttcgttagaactttgctagtgtatttagcttcatcaaatgattcgttcacccattttaattaaagaaaaaaaaaaaagagaattattttgatatttataaattttaatatttgagtattattattaaattttgttgatggggtttggaatggacaacttttttagtggaaaaaagtggtagcaaagcaatggcaatggggtttgtcagcacatgtgatagacaactagaaaaaggtactcatttcagcaagtactattttggggagggaccatagaataaatttatagaatatataccaatataaaatatctacctaatttagcaaaaacaaaataatttaataataaaaaaaatagatgtaattaacattttatttgttttctatgcatgcttattaacaaccaatttggcttaatatcgatattttttctttcagtacttaattatctctaaaataatttataaattaatgaaaataaataaattttaaatatttttagtatttataggtaggttaccataactgtttttgacctaaagaatgttacatcagttttctgacaggtagaagatctatttcatttaacctaaataaataaataaatctatttacactaaattatattccaaaaatccatatattctagtagaaaaaaaagataaaaaaattattctaaaaaaaatgtaatgtaaaaggttatataattaattagctgatattattcagccagttagaaattctagcatgggccacatatgttttttacactactggcaattttattttattatttttattattatttgagtgaagactactggctattttcagaatgttagaaattgaaaaaaataatttttctttgttttatttatttatttattaaaacttgaaaggccaaacccatacaaactaatgataacacgacagctcagcacagtccctgttatcatttttttttttttttcaggcaagttaagtaattttttatttttaatttttatagatagcatcaattaaaataaaatcatcaaattttttttctactgaatttaccaacaaaaaagaaattatctatctctcttaaaatactgttccaaattttttatagtcctaatagttgacacaaaaatttgaccctaataaaacaaattatatataggagttttatatatgcatgctttccaaacattatatatatgtagctttttttaaagttgataagactccatgaataaaatttggggaatatatttctgcaaaaaaaaaaaaaaaaatagggaatatattttttaagccataaaagaaaaggtttggggctcgtttggaacggcgtactaggtcgtattgtattgtattgtattatattgaattatattttatgtaatatttttatgtaa

SEQ ID NO: 16496 - DNA, 3509 bp, Cannabis sativa
tttttttggatcaaactcaactacatgatgaggatatttttgctataacatagatttaaccttaacactatatttggtgagagggaaaagtgggaggatggaaatgagggaaatgagagggaggaaaggtcaaatcctcttgtttgtcaagaaagattcttggaaagaaaggaaaagtgagaggaaaataaatccactacatttttttaactccttccattaatagaaagattgatattctctattcttatttgttcaaaattataagatttattaaaaagtaattagaaaataatatagtaatttgataaatgaatagtgatttatcatttcacttttgtatctctcctaccaaacaatgtagagggattattttccatcttttcttaaccttccattctctctattctccttccaaccaacccaagcatattgtaatagagatgaaaacagaggaattttgtcataatattaataataataataatataagtgttcagaggaagccacctgtactttctttctgctccatggcatggtactagtattgcctactcaattactttgcttagattcttttttaactactgttgtttaacagtagacatgaaaaaaaaatatatacttttttacttttcaccaactttcaaagtaattatataattaactcatatattatatataattatataccactgcactgcagaagattataaccagaacagatcactcatttgtttcatgttataatcttgcttgtgtttcactcatatactaattaaacaaattccatattattataaatgaggtttattgtactatttcattttcaactataaatactttaatgaataaagttacatacagtactagcaaatatgacatatctcttttgtgtgtgtgtgttatattgaataagggtaagatggtaattatggtattgatgaaaagtgataatacatacctaaccgtagatgatcaaatagtctcacctggggaggaagacttttcactaaaaacctcaagagagtgagtcagagcaacagtttccaaaactccatattcaacacagtgagaaaacctttgcaattgtcgtttaaggaggaaacaatcttcaacctttgtcctcctaattacatttcctttcctacataaacattcttgttttaaagaaattaaaatatatttataagggtctctctccaaacatcattttcttcactgtaacaatatcactcttctagactactatagctactgatccacattattatggcttcatacttattcccagtgaactacttcaatgttggagcagtaattactgtgcttttcatcttttccatcataattctaccacccaaaacaggtacatatatataaagttagtcatcctattgggtttttatatgtacatatattatattaattttggtttttgatgtgtattttgaagtgggttttgaatattcatcaagagaagaagagaggaaaatggtgttggggtcaagaccacctcagtgtgtaaacaagtgtttgaattgtagaccatgtgaggctactttggttgttccaaatcaccagaagaagcctaataatttaaagaccacttctcacggtgaagatgacacatattatctactctcatggagatgcagatgtggaaataagatctatcatccatgatctcatcttctactcttagctagctaccctttttataattagtacatacataaatatttctaatttgattctgtctttgttgttgttcttgtcaatgggagtatttgatctattatatcttgtgttcattttagataaatatatttttgattgaagattagtatactcaaagttagtgagtatttccttaaaaaaaaagttgcctcgtataattaatcaaatcagcttttcaaatttagtcacaaaatcatttggagaaaagaaaagaagaatgataaaactaaaaaagaaatttaaataatggtaataaattatggatatttatttatttttagaccaaaataacactttttttttcacactatatttttttattttatttttaaattgttagattttttttataatggatttgattttataatgatgttttacaccatgtataaaataaaataaattgattttgccttaaaaaaaataataaataaaaaaataaaggaaatgtattttgaatgaaagcccagcccaaataaaatttccaatgaaaagaaaagaagagaagaaaagatgaagtggagaaaatatcttctttcatttctccaaaaaaaaaaaaaagcaactgaaatggcgattctctttaccgcgacaggttttgtccatggctccaaaatcaaccaccacgcattgccactccctaactccttcttcttcctcggcttctcactctcctctcgcaacttttctcaggcgaaccgtatgctctcatctccggttcgttttcaccgtcgtcagtctctgtctttttctctccgggctacgaaacccggccaacctcctccctctccccctgaatccgacccgcctcctgggacgcccccgataaagggtacgtaacccacgtttttcttttgttcgtgtttttggttttgaagatatatttttttgttgaacccagtttttcttatgcttctgtttgtttatttttaaaaagatgaaaattgaagaaatactgttcactagggtttgagattgattacggatgaatttcagcatgatttttgttttgttggactcgggttgtgctcttaattttaaacagaaatgggttaattttcttgtagtaaaagattctggtttctacaacctgcataatttgcagctttggtgtttgatgttttgctccaatgaaatgttttttatccgaaaaacgaaagaaacacttagcttcattttgcatgtgaacccctttcagccactcattattactaatctaatatgtttgaatattttcaagtaaaaaccaagttgtatgtaaagcacattatagcatatccggtatgctaattctgttccatcggctctttttcaagatgacaaatacattaacttggaggggagtatatagttacccttaattggataggatattgatgtccttagaactgtagctaatgaatgaagagaacgagatgaaagaagaaaaggggatgcccataaaagttttcaatggacatttcccaggtatctcaatgcgtcagtgtatgagaaatgaacaaagtttaattagctagttttttctaaataaactgtttaggctagataaacatatgtccatatttataatcttaaaaaaggacgtctataataagtatttgtatatgtataaagggctgtttttatctttggatgtttgttttctcttctacaaggaatatgtatcgtgtgaatagctgatgcttttgctatggtcaatttcaagatccagaatttgtcaatcatataataaccaactgcactaatcatttaacaaaaaaaaaaaaaaa

SEQ ID NO: 16497 - DNA, 6081 bp, Cannabis sativa
  modified_base (50)..(78): a, c, t, g, unknown or other
  modified_base (3970)..(3982): a, c, t, g, unknown or other
taagttgcagcgctagttgcaaaagaaatttttatgtagaattccgtaannnnnnnnnnnnnnnnnnnnnnnnnnnnntaaagtgtaaaaataaaaaattcctaattttttttaaggaacaataacatttcttgtccagaaatttattagtaaattctgtttgatagggatatgtcacaagaaagttaaacgacatgtcctttgggtaccattaaatgggcctttgaagctacaatgacccatttaaaaagaaaaacagaaaaaattccgaagcccagcattttccgaacggttcaatcctgtgtgcctgtgtggtgcatcacaatcacagaggcaaaggacgatcggatcggatagatagtgatggaggaagaagataacattgagcccgagccgaagaagaataaggtggtaattaagataccttcatatcaagaggtgattgaaagctcacagtcaaagtcaacaccaccctctctcttcgctccttctcaaagcttttcccaagctttttctttcgttaaatcctctaaattctactctcctcctcctttagagcctccacaggttacgcagaccacgacttccaggtagcccttttggccattttactccaaacccacggagtgaggattcataatttgttttttttttttctaagccaagtgagtgaggttttatatattatctacacatacgcattcaaaacaggaaacttgttacttttttgctgttttggaagaattgcttgcttgttttgatcttttaattagatggtatttcggtttttattttaattggtgagcagaaacttaaaatcttttgaagcttatgtttctgttgtttcaggtgtaatattttataatttgttatttatgtatagacacatgtatatgatcaagccttcactgagtctattttagcactaaaaccttgctagtggaagttatgaaatcaatggcaagatgaagattttgtttcagttccttgtattaatagtttttatggtaatgtaattgcttgcatcagggaatatctacattcaaatgttgcatctccattgccagttgcgtctactagctccgttgcttcatcttcgtcgtcttctactcagaatcgcaatgccattcttgtgagccacagacaggtacctatattaatttgggtccatatgaagatttcaaatgtatgaaaagggcacactgaaaaatctataatgactgttaaccagaaataggaatcgatgttttactttatctacaattcttgatgcagaaaggcaatcccttgcttaaacatatcaggaatgtgagatgggtttttgctgatattgtttgtgactacttacttgggcaaggctcttgcgctctctatctaaggttaagtgttctatttgtagctttgcacaatgccattagagtattaggggcatttggttggaggtaataaaatggaatggataagaatggttgcattttaaattattgtaatgtctttccaatagaataatttttttcactatcttagtagaatgactatttcgtggaagaaaacgccattccaatgcaagatgattaaaaaaataataatgttttttttctatacactttaaatttcgtggaagaaaacgcctttccatttattattcgtattctcgttcatattcctattcttatattttcattcctacttcccaaaggtacccttaatttttattattgaaatattattatgacattgtgttaaaactacctgttttttctactcatttgaccatttgttacagccttcggtatcatctactgcatccagactacctatattaccgtataagggaattgcaaaagaacttcaagctacgtgttgttctttgccatgttgatgtggtaagcaattaagccaactgatcatgtgtaagaacttcggacttcagtagtagagatttgaccagtttcaagtttccgaaaaatggtgcttgacttactgatgttattgttgcaggaagatgttgttaagcctttacttgaagttactaagacggctctgcttcatgattgtaccctgttatgtggttggaggtataatatatgtaattttcaatgtaaatgaatatacatatttgacaatacctcttttggctgttggaatactgtttcaaaacttgaatgtattgctgcttttgaagtagcttatttatgtccttggatttcgttaatttttttcaaaagggaagatgtccttggatttcacaaccaactctttatttcttttctcttgtttgtagcttagaggaatgcggtcgctacttagagactataaaagtgtatgaaaacaagtctgcagatattatacaaggacaaatggatacagattatttatcacgggtatgattctctttagcttatattttttgcctgctcaggtgatgctggcgtattatatgggaacaggttctattgaactatggctagattttggaaatttatagggtgcatctattagattgttgtgcactaactgaacacattttatcccaatgttgattgtagctgaaccatgctctcactacagttcgtcatgttaacaagactgatgttgtaacacttggcacaacatttggggtactacctactttcttaccctgagaattcttatggccaaatatcttgtagtttagtatatatatatttaacagcgtgggttctttctttttactattgttattctttttgcagtctctatctcatatcatggatgcatcaatggaagatctagcacgctgcccaggcataggagagagaaaggtatctatgctgagaggcatgtcaacttttttataatgttttaatttctctgtaagttgataacaactaacttttccaatattgggaacctatggtggtaacaggtaaagcgcttgcatgatacttttcatgaaccgttcaaacgtgcagtcgccagcgtccctactgttccagaaacctctacccagaataatgtcaaaccgagctcagtgaatgaagataaagaaaaagccgaacaagtagatggagaaaatgacggcaaaagaagtaaaaaagaacctgatttgacaattaaatcagccctatcggctgcttttgccaaatacgctgataaagttgttagaaataacacaaagtcaccgtgtaagaggaaaggtgaaacaagttctgccaccgaagaggaagcttaaaaagataattcatgataagtttaagctcacatatttttctgacttcaattagccttgagcataagattctttttgcactctgacactaggaaacagtcttcttcatgctctcttctctttactctattactttttcacaagcttcctcaagatgtacatttatataatgtcaatccaaattcataaagcattatcatccttgcattatgtgaacaaaataaaaaaggacagcgtttattactgtgttgatctatatataacaacatactgaaattactctgtaatgcttgctgttacagtagggtttttagaagttatgaagcaaacagccaaaccccataaatctcccacttttaagttttaagacaaatcaacagtacataaccacatgctcaatagtcctttgtagttggctgcaacggaaaggtagtaacatctatttagaacccaaatactgtggtattaaaagtagttgaagtggtaacaaagtaatagcagatcgggaagttggtgatatgatattgacggttttacaaaaatactgagttttggataaatgtttacaattttattgccacacggtaaaaattatttttattatattgtgttgagttttttttttcttttatattgtagacattgaatattaagaacaatgtctctatcttccacactcacgcacggaaccaccacaacaacacgaacacacccagaaaacaaccattcattcggacaagattgagcaaaaatagtgannnnnnnnnnnnntaaataatcatggcaaaacaactgtaaaataacactaaaacaaataaaaaaaaaaacaaaagaaaaaaaggattttaaaaaattactgtcttatgcacaacctcaacaccatatgcaataacaactatatttgcgttgttgagtaaatttcacttataaccagtcccttacatacaatatccacatcagcatatatcaacacattcacaacagaaaaataaaaagactcaatcctaggtggctttgcctctactagaccaagaaccaggagttagttacaactgttttttgtaactaactcccaaatctttgatcaaccgacttcaacataatatataagcagtaaatcaaaggcaaaatagatttagaacaaaaaagagagaagattaaaggaataaaccctagtttgagacttatgccccaagatccagagaagagaaagcaagttctcgtggtgaggaggtagaaggaaggaagtacatgcacaaaaacagaaaactgagttagatcaagaacataacagagaagaacaaaatcaaaaagtgtacaatgaaagaatcgagtcttacctgatcgttttctgtgacaggaagctccaaaatatcgtaaatcgccattgttgatagtggatatcaagctagatctctgagatgagcttgacagagacgtagccctaatttttgggtgaattctgaaataattctggtgttttctctccctttctcttgtttttcatttgattaaactaatctgtgtgtgtttggatgaagatcctagggtttctacttaggatcgagcaagttcttgtgaagaacttgctctgctagggtttctagtttttgaatcagagaggctgagtgtgtgagttaaggcttctagacttttcttgagaagtctttaagctgaaggattaaacgacacagggtttggtgtcgtgtggttaaaatattgccgtttttgtctaatattacttagactaaggaaaggtcaaaattgaccttggatactgataatagtgttttgttggtgtaggttaaattggtcaaaaatcctacagtggtatcagagcctggtttggctaagaagatcaacaaaactaagggtataattatcaggaaggagattggcaagcaatcttgaaagaaagattatcaagaatcaagaacacactcaaacttggaagaaaatcaaagttctgaatcagaaactgatctagaagtagaaatagaaacatcacaagacagcaaacaaactgagatttctaaactccatctgatttcaattttatcaaaatgagtaacataaaagttgatattgataaatttgatggtacaagtgattatagaatggagaaggaaaattaggtctctcctagctcaacaaaaattgctaagggtgctagatgaacctattgaatgaccagaaggaacctcaaagagtcagcaggaagaatacttagaaactgctactggaatcttgatattcaatctgtcagatgcaataatcagattggtagacaaggaagagactccatcaaaaatttggaaaaacctagaagagcaattcaacggaaatctttgacaaataagatctatctcaaggaaaggatttttggtttcaagatgaaccaatccaaaaccttaggtcacattcttgatgaattcttgagaatgcatattgaacttgcaaactcaggggagaatgaggcacttagtgatgagaaccaagccatcatcatacttaattcattgccagaaacttacagagaagtaaaaacaacaattaagcatggaagaacatctatcactcttgatgaggttagctctgccttaaaatcaaaggatttagagatgaagacaaaaagaaatggtggctctaatggagaactaaatccgagtagaggaaaatctactcaaaggaagccttggcatgggaaaggaaggagtcatagtcacagtagaggaccaaacaaaggacacacctgttggaattattttaccaggatctagatttactactaagtatgtttgattaatatcctaatatgaattctaaaaacaatgaaataaacacataagagtttaagaaaacattacatt

SEQ ID NO: 16498 - DNA, 6930 bp, Cannabis sativa
  modified_base (28)..(46): a, c, t, g, unknown or other
aaaaacccaaaaaaaaaaaaattacaannnnnnnnnnnnnnnnnnnaaaaaaaaaaaaaaaaacattttggtaaacatttcacatgtctataaggcccatgcataaatgggcctaatgggctacaatttgggcttgcttaacagagcttcagaagtggcgttgtacacgagagaagctgttgtattggtaaaggcggtctctaacattcttcaaaaactaagaagaagaagaagaagaagaatattgcgaattcccatggtttgaggcatgtacggctccatattcacgtcctctacttcattctcagtcgctgtcacacacacgatcgctgatcaacctagattccgttgcatcggtatttttcttcttctttaatttactcttcttttaattgcttttcttttttttccctacaaaataccgattaactagtatggattatggattatctataggatagttttttttttttttttatgataccctttcattttcatttggttgatgggaaaaactgtcatggaaaatgaaatgatttgttttttattattactttttatttttatgctggttgggtttgagtttattgattaaattaatatagtgattgtcaaatattgcctataatatctttgtcaaataatagtgcctttaattatataggaaaaggaagtatgctgtctctcccgcgccaagaacataaaattaaaatataataataatctcctatgagtgttactagatggagcacacacatttcatgatttgttagaacaaaaaaaaatggactttggtgtcaatttaagtttttctaatttattgattggtgtatggaacagttgtttatgcaagggggttgattttcaacgttaaagctatcatcttttgattgggtttacgtttaaagatttaacttaagtgatccttacccgtttggctgaaaattaatggaaaggaaaattaatgtagacaggcttagcaatttaccatgggatgtattagacagcattcttgtacgcattcccttgaaagaagctgtgaggactagtgttttgtctacaaagtggaggctcaaatggactggcctctcccaatatctcattgatgatagaatcttccccaccggtttagtgttggacccggtaggcagaggggatcaagttgcgggaatcttgcatcaagttcaagtgaatcacaatggcccaattgagaagtttaagttctctgcttattgtcgtttggaccattcagttttacttcagtggatcattttcttaggtgggagaggtgtaaatgagtttcttttggagaggtttgattctcccatgccttttgagtttccttttgatcagttctcttgtccaaagctgaggcatttgaaccttttttgttgcactatcaagctaccaattgttcatgcttttgaagggtttaaccaccttacaagccttcagctcactgaagttagcatcaacacagaaacgctagagtgcttgattcacaagtgctctgttcttgagaaattgacattgttggacttggagtttggtgatccaattttcttgaagattcaaaacacaaaacttagatatctgaagataatttcagcaattggagatataattcttcacgataatcctttcctagttagtgttgaaattcgcttgagaatcccacctataccgaatattttggaacaggatagcaatttagtcaggatctttagttccttgcaggggattagaagacttgctctgtcgaatttctctgttttggtaatcaatccccatcattattatttatttatttatttgaatttttgggaatttattttacattaaaattgtttcctgcatttcttgctagtttttttcaaatggaattatcccagaaaagcttccttgtccgcttcacaacctgacagttgttgaactgagtgaagtatcagttgatactttgaagcaagctatggtttgtctcagcctgatcaagagtgctccaaacttggaggaactattcatttcagtaagtttgttaactaaatttttgttaatatagagggcttcttgttaccatgttaatgagacttggctttactttcttaggttgctcgaccatttactaatggaaaatttgtgactgattttctgagtgacaaatgtcggtttggcttgtatttcaaccggcttaaagtagtgaaggtcagaggtgtatgggaaatggatcatgcttggcactttgtcaagtttatacttgctaattcaccagtgcttgagactttgactatagtatccttaagagatggaaggtttacagaagaacaattagcgaaattggatcgagcctcagaacgtgtgaagattttaagcttaactgcatgcagttaagaccccttttagcattcctcaatgtaagtaggaagtagctctgtttggtgattttcatcatccttttgatgtaaatgctgtttgatagtcatattttttttttccttttcttgagaaagctaagctataatacaggattttgagattggttttaagttgacgtatgtatgtacgtgtaattggtttgagtttaaatcctaatatttatggggtttttcatgttagaagccaagtttttgttcttcccaaaatatgagcggcagcatattatacattaatttctgcggaaaagaacagatgggaacatcgatgacattatatttcttgaatcaagagatgtcagtttcacaaactaatattctgtacagttgcaatacaagcatcaaaaaactttgtaactctaatatacaacaggtaaagaaataactctcaatattcatatatatatttttttcacttaataacttcaactataatttgtccctaagatatgctccgtttcgtttagaggaagaaaatggttatttcagaagaggtatcacctgggaccagaaagctccattgcttggactagtaatgacgaatcatctgtgagatcagaatatctatctgaggatgaaaattcatgaggttttcccttagttgcctcaactctttgagaagcttcccatctttcgacgagcccatcaccttcaagcatccgaacaacttcagacatctttggtctgcggccaggcaggtattgggtacacaacagtgccacttgaaccatttcctcaagctccaccctatcatagtttgtcttaagatccttgtctactagcatttcgagtttcttttcttgatggatttttcttacctgtgatcagattatttcaatttcacataaatatacgtacatacatagtcatgagatttaaagctaatcactaaaaaaaaagtgaactaacccaatcaagaatggctcctttctgattagcagccttgccaaattctagtgctctctggcctgtgataagttcaaggagaagaattccaaacccgaaaacatctgttttctctgaggattgtccagtggacagatactctggtgcaatgtgtcccacggtacccctcacagcggtagtgacatgtgagtcttgatgatccaaaagctttgccagtccaaaatctcctactacagcctcacaatcatcatcaagaagtatgtttgcagccttcacatccctgtgtattatcttgggatcacactgttcatgaagatataatagccctcttgctgctcctaaggaaattctcttccttgtgctccaatctagtactggtttacctgtttaaaatcaacccaagttcagaaaactaatccaattttccatcattgtagcacatctgcaaataaattacacaagtactataacatcagtaacattttacttacctttgagacgagaagcaacactgccattagacatatatggataaattagaagtctttctgtcggtgtaatgcaaaacccatatagtctgagaagattcctatgaactgctaaactgatcatctcaacttcagtctggaattgaatctctcctccaagtgcactgccatctttaagcctcttaacagctacaaaagtaccatcatgaagagttcctttatagacatgtccaaaaccacctttgcctagtatgttcttgctgctgaagttgtttgttgcaacctgaagttctctaaagtggaatctcttcaagtttcctagcgaaatttcttcgtgatgccggtctgaaaagttcattatgtgtggcaataagtaaaggagtttaacaattggtttaagcattgtttcatgctagtgttcctaactgaagaattatgttttcttttctttttctaaacttaattatcacaaacctttgacatcaaagaacttttgttgattccgcctatgcctccaccataacacggctccaaatccaagtgcaatcagacaaaggcagcctaggcttaaaccgaaggcaagggctatcttgtgatttctaggcttgacagaaggaagagctgcttaagaaacagagaaactaagtttagaagcagtgaaagatcaaccaaattgaattttgaatcgttacgagtttaaaaagcttagactgaattaagctccttactatctgaactattcaggttcatggacattggcattaatgttgtcccataacagcctgcttcagatccagttgggcagatgagaggattcccaacaatgctgaaaaataaataaatagataaattgtgttgaacttaggcatttgattttgaaaagagagagagagagagagggagagagaattacttgaatgttttagcaggaaatcttggtacaggggcgctaagattattgaaggacaggtccctgaaattcaaaagataacagaatgagaagagcatagcccaaaagactcatggtttatgtattaacaaagaaatagttaatagacttacagaaaggcaagctgggtcatgttaaccaatgaagttggaattattccagagagactgttattattaagcctcctaaaccaggcgacaacattcatatcagaataagaattagaatagaacaaatacattatgcagattgtacagtatgagtctttgaatgcttacaagtactggagatttctgaggtggcctaaagaggaaggaactgttccggtaaacatgttgttagatagatcaagggtgtgaagattagggagcttcccaagctctgaaggaactggccctttaatgttattgttctgtagtaatctgtaaagtgaaagacacttcattaatacctgaaaagaatgacaaaatgaaaagagcaagagggaattggaaataaatgctaaattgtacggatacttacacaatctggagatttgttaagttgccaatgcttggagaaagtgtaccggatagattttgactaggagtgcctctgaaacaaaaacaatatcaatataccaaagacctcagaggatttgactgttattccattataacattttctttccaagagggaaatgttcaattttctttctctgtaatgagccaaaataaacatttcaaacagagagggtggtaagacttacaggccaatgactaagctttcaggtgaacaagtaaccatagtccagctacatgggtcaacagaatctgaatcccaattctcaagcacgccatgaggatcttctagagaatgctttatgcccattaaagcttgaactgaaaaaaaaagtacccagatgagaaatgcccatttttatttaagctcaaacacatgaaggacaaaacaaagctatatataagctttgtaagagttataccttcaaagtttactccttttggtgatagaattccaaatacagaagtccaaaacaagagaaacgataaaaaacaaagagcagcttctgctcctttcattcccattgaattgaaacttgtaagtcacaaagcttgagttcaggctcagagaagagacccccttatgaataatgaattctgttttgtgatgatgactgagagtgacaaaagaaatccaaaaaccaaagtggggatttcaatttgaattcaatattttctattttcaaatcaaaagcttggtgctgctgcttctgctttccatggctataatccttttaagaccacaagagaccatgtatgttatgtaagtattcaatcaagacccaaagaaaaaggcagtgtcttttggtactagcagtagtacaagtagtagtagtagcataaagaaaaccagcatgccagacgtggagccaagaggtagtgtgaataataatatttaataataataaaaaaaaattaaaaaaaaaaatagaataagtatctttacaggaactaaattaaccaaatctaggtagaataaataagggaaaaggatagaatagtaaattccactatatagtgtgcaaaatcaatcatgcatttggcttagaaaaaagaaagaaggaaaaatatagaaagagtagttgtgaatgatctattcctactccaacattacacattttaaaccataatgagaataaaatggggtcatataaaaaccattgtctagagatgggcacaagacaagtattattattattattaacccaagagtgtattttcctttctttttttgtttaattatgttttagattagagacataaagtgaagagagagcagggtatgtggtataattagtttatgtattgtgagtgtgaaaacttggaaaaaagggaaaaatgctttacttggggagtgagagaaatccaacattccctgggcatgaccatcaagtactaacaacacaaacatcatcatcttctccatctgttttaaggaaacgagaatatatgttagtgggaatctcgaggaaggaattgaggctcgagattgaagatggatttggtaacccactacatatatttaaccttctttcaccccaggatctttgtttttcttattttttttttaatatatttatatagtattccctatatat

SEQ ID NO: 16499 - DNA, 4784 bp, Cannabis sativa
taaatataaaattttggtttctgggttttgaaactcgttgcccaatttagaagttgaatctttttgtggggtgggcttgatatttaatgtggtgttgatgggggatattgttcaggaaagtgaaatttagattggtgatgggttgtggttgctttggtgaattgaattggtgtagaggaagctttaaatctggtgagccacaaactccaggtgagatttgtattctagaatatattgattaaatttctggtttttatgtccttttcacattttttgtctggttcctgtgttttttcggttattttgaactctatttagtgccataaatggtatatctagttgcttagttgctaaatttccagtttctcagacaagggttagaactttaatagccaaagctttaaaatattagattggaatggactgttttgttgtcaagctttattgtcaactgtgtgtgtgaaatttgaaaatggttcctctcctaaccctatgaaacatgaaaactataacaattgttatgtaggtaccaatgagtgattcaaaccttacatcttgtgggagcaaaccacaagtctaactgtttgagctacctcttttgtgtgtgtgtgtgcccccatctgcttgtgaacttttaaagcaacaaaaagcttttggaaaatttgtctgatctcaactaaaggggttgttttttaaattgtttttgcttgtttagggatatctaccgacaatgtaaggcaattttcgtataattcgttgagatcagctacaagggacttccatccttcaaatagaataggtggtggaggctatggagttgttcacagggtgagtcctttctgttgttggtgtttttattctacttgttaatgttcggttggtggagatgatcatgagtttgaggcttctttttacccatcctgctcagtacttgtactgattttccattacatggtaacagggagtgctaagagatggtactcaagttgccatcaagtctctttcagcagaatctaagcaaggatcaaatgaatttttgacagaaattagaatgatatctagaatacaacatccgaaccttgttaagcttgttgggtgctgcgctgagggaagttctcgaatattggtatatgaatatctggagaacaacagtcttgccacttctttgcttggtaattgtctgattgttttaagtttttttgttgactgtcttttgtatgagttgaaatgcatcataattttttcaaagagtttcgaagtttgaagaagtatgagaaatgttcttttgttttactaagtcaataattttgttctaccatttcctcaaaacttgactatttgacttgattataagtttggcaatccattactacagaaagctagaggagaggtggggagtagaagaaccaatcaggaaaattgataacaaaagaagaaaggattttccaattttaaggaagtaaagctagttttttaatttaagtcaaggcctagttctataaaaattccttagcaaaaataatttttctaaagactagttgatttctttcttttcttcttcttcttctttttttttttttttttgactagttcatttattaggatattatcttttgaagggtgtttagtcttttttcagtgaattgttaagctatgctgacgctgattttttttacttttatgttgacaggttcgaaaagcaaacatgtttttctggattggccaactagagctgtgatttgcgtggaaacggcaactggtctggcttttcttcatgaggaagctgagcctcatattgtccatagagatattaaggctagcaatatacttcttgatggaaattttcacccaaagattggagatttcggacttgcaaaactctttccagacaatgtcactcatgttagtactcgagtggcaggaaccatgtaagctaatttttttttctttccatgtacatacaagttaccccaattctggttgtatgtatgtatgttctcatttctgattgactcgtatgtctgcagaggttatctagcaccggaatatgcactcttaggacagcttactaagaaagctgatgtatacagttttggggtgttgttgcttgaaataattagtggcagaagtagtagtaaggcagcatttggagaggaattgctagttttggtggaatgggtatgtgattatctgtttatcatcattcattttacattttcacagcccaaaattgattaagcttttatgtgcacactctatatctatctacactgtgattctaataagagcacgattcaaaaccatatgttctaatttgttgtcccataaaatgaaatgaatggtggtacaggcatggaaactaagagaagaaggaaggcttcttgacattgttgatccagaacttactgcatacgccgaggatgaggtgatacgctttgttaaggttgcattgttttgtacacaagcagttgctcaccaaagaccaagcatgaaacaagtagtggaaatgctttcgaaacaagtccacctcaatgaaaaggccctcaccgagcctggtgtgtacagagctagtagttcacggcggggctcgaggggagccagttcggaggaaacatcctcatcccaagcagagaaaggcaagcattcaatgactgctctcaagattcagagccagtatgatgatcctgattctatgactcaaatgtctcctaggtaatttgtatcatgtatgtagtagcagtagtaagctaagcctaagccatgtgaagtttttgccttttggcaagcttgtaaagaaagagtttgtgtatttgattttgtactctacatttattcttattattctttcaaagtggtttggtctatatttgtgtaaaggaaaatatcatttatgtatttatattattcttttgactgatttatttttagttaaagatgtaactcttcttcaattgtactagagaatcagcctcttgtgtttcaatatttggttattaatggatgaactatttacattgcaaaataaaataccaaagcctatttttttaccttaacactcactaaagtgttttttttttaatgtttatttaaagggtaaatagtggcataagtatccaaaattttgaatttataagcggtataaatagtggcataaatacttaatatttataaaactgtaattttctctatttttgtcagtacaggctccgttttaaatttattaaaagaagatttagatgaaactgatactacatatttctgtccagaccaaataatctagaatctaagtcttatatatgtgcactgtttaagacaataacagagtctatactgatgaaactggaggaaatttgcagttttataaacattgggtacttatgccgcttaaaaaaaacattgggtttatgccacttacaaatccaaaactttaggtacttatgccactatttattcttatctaaacgagggggtgttcgttataggaaaaaggctggccttaagactaattaggccttaggtagtaataaaattatttgcctttaaaaaaatgtggtattttcaaaaattactaggaagatgtgtatttttaaaatatttatttttatttttgggtctttgggcggtgggccctaggccggtgcctagtctgccttagctcagacccaaccctagaaaggtatgaaattcaaaaaggttgtaaccacctagtctaggggctaaggaaaaaaatattatttttagtaatttttaaatatacttttgaaaatggcctaataattttgctgctacctaaggcctaattagccacaaattcttaacaattggtttttggtatctttacaactttcatctctttgaatagatggagagctccttgtgtatcttcttccaccaacttagactgaatcaatgcctgataagagttggaatctagcaagattcttgccctacgggcatcccgaagaagtgctgaaacatctcctgtctagtttgcttgacaatgtgcttttaagagagaagagtatacaaaaaataatactgacaccagccaatatcaactcatctacaaggtcacgtgcttggtctaaccaaccacgcactatcaatgaatcatcattgaaaactagagaatcttttctctatccaccatgataagaaattatgctaaatctttaatctttcttgcttatagaaatgccttgactaattcaacaaaattttcacaactggttgaataatacctcgttcagatgttaacaattcaactcgagtctatagcttagctaacatagtatttagcactcctttgcttcagtatcaagtttcacaaaattccaatctcgtaaatactcctcgtaagacatcacataaattttaaaaggtctatcatattttaaacatctagattcttcatggctcaaagttggcctgaaaccaagaacacaagagtatttaccatcattttcaacaacatcaactaccattgatgcaataacaaaagaggacctagcttcttttgctttccgaagcaattctaaaaccatgttcgatgcaaaacaaagatcgcctagtctcaaatggcattggaggaaactgttatagaattgtcgtaattgaatatcacttagattgtgtgcatcatttatgtaatgttggagtttcctaagctcttctcttcttccatttctctcatatatgtgtgccatgactatcaacaagtcagtgtcaagtctcacaccaactctaggcatcatgttaatgagttgctcggctttcctatgcgt

SEQ ID NO: 16500 - DNA, 4309 bp, Cannabis sativa
aataaataaaaaataaaaataataaaattaaagatatttttgtcaatatactttttaatttattcaattacaatgctcattacagtcttaaactaaatatcgtaatactattcatattacaattcttattccattacattgcaattcatattactattaccattcccattacattacattacatcaaagcaaacattaccaaaaaccttcttaattctcatggcttttgccaaagatagagataccacttcttaacgaacagcagtagctgctaacaattctttcctcaaattttgaaccacaaaaataaagccatgccaattattctccttaaaaatagttgcatctacactaattttaattaaagattaacaaaagtgaatttattattagatagagactgctagtcagagatgtatgacccatgttgttctacttcaatttattattttcaattttaacgtgcttttcccaatggtcaaattatcatatgatttatgtttaaaaataaaaattatcatatgatcattattgtacatgtactattcttcatttatgtaacaccaatagtagcaaagtaccatagttaactaatttatatgtaggacaaatgcagctaatttagttaataggagcatctttaacgggattgcttaataaaaagtcatgccacatgtttaattttggttcaatcattaataaaagtaagaacaaaattggcatttttttttttaattttgttttgttaaaaaaaattctttaaaaaaaatactaattaatattttcctctcttaaattttaaaatgtatcaaatcatgtcttataaatttttttaaccattaaaaattcttcataaattattgagattgttagacttaatgaattttgtctaatttcatttaattttactaattcggtaattatttatgtactaaattatgctccgagactttgatatgtactaagctataattttcaaactttcacgtgtactaaatcatattccttaaattgatatgttaaactttgtttactaaaattaaataaaaatctttaaatctaaacatttcaataattcaaaggtaatttttaaaggacgtcaagaacaaatatcctaattagaaaaaaaaaatgtatgtaaaagggttgcctaccatgggaaaaaaagttgccaaataatgaaaaaaaatattaatattgtttgatgatgtctgtactttttgcacctatagataccattggcgatgctctctgttttcttttcataaagtttttttagtcaaccattttcactctaggcttctcacttatttgagggtggtcataaagatatcagtcacaaccatttagcttgaaaagatagactgactgatctgttagtgggtttcttttcttctaaacttgtttgttcctcagtttcattttcaggttattttccttttttctccttttttttttttttgagaaaaaaggggaaattaaaaatggctaattggtgtcaaaagcatgaggaggtaacactaagtaaacagcttgctgtgactgtgaaaagcatcaaatggagctatgcaattttctggtcattttcaaccagagaacaagggtatttgactatatattctgatgcgttttcccatctttttcctttcttattttctctaagtctaaacaagtttcttagtgttttctgctaaatattttatgtgtatagttgtcagaactaaagcttaaatcatcttctgaggaaggtacataataactacaaaggaaaatgatgatacttgacaaaaaacattgcttaacaataaacaccttgtaaaagagtaattttttaagcaaacaaaattggttagtgttttcagctatagattttataatggtgttggtgtgttgggagcacaaatttcataattacaggggaaaaagtttgagacttgatgaaacattgttcagggtgctggaatggggtgctggttattacaatggagacattaaaactaagaaaatagtccactcaatggagcttgaaaccaataaaacaggcttacaaagaagtgtgcaattgagagacctttacatgtctctgtcggaaggtgaaactgaccaacaagccaaaactacatcatcatctgctgctgcattatctcttgatgatctcactgatgcagagtggtattacttggtttgcatgtcgtttgtgttcaaacctggtcaaaggtacaaaatttgtctacttctttgactttctatcagcaattgatacattattttactaataaatcctactctataatgttatatagtcttccaagcacagcattagaaaagggacagcctatttggttatgcaatgcacaatatgcagataacaatgtattttctcgctctttactagctaaggttggttagatcttttaaaattttttattgatttgtatttcttaatgttgattctagcattttgaattattattgacattatcattttaaataaacaattaaagctaacaaacttcctctgtttttctctgtaattatttttatatggatgcttatatttctaaagagcgcatcaattcaggtatattataattcatcatttttcttttaaatttctttaaaggaataaaatctttaaaaagtaacacttagctccatttgattgtgtagacagtggtctgttttcctcatatgggtggtgtaattgagtttggaataacagatttggtaatagaatttctttaaaaactttatcttaattatttcagttttctcagtttgacttgtcaaatcttttttttgtgtgtgtgctaaaggtgccagaggaccataatcttcttcagcacatcaaggcttctttactagatatttcaaaacctagttgctcagagaaatcgcctcgttttcatcgaagaacaaatggtgatgatgatgattatggtcatgataaagaccaaatgtgtgttaaggttgaccatgaagagttgaagttgaattctcctgatgaatattcttatggctgtaagaatgatcaccagccaaagggtctcaatgatgggacttcacaagttcaaagcctgaatctcatggataatgatttcagcaatggtgttcaaggctccatgaactcaggtgactatgtatctggggctttggtcaaacaagaaaaggatagcaaatcctgttttgcagcatggaataaaagaggacatggcaataattataggccaattctactgcaggaaatgttgaagagcaaattgtttacagttcattcatctactcttgatggggtttttagtttgaaccttaaatccaaggtttgtaattttattcattataccaattttcatgattcattaatctctgtagtgaaatacttcaactgttcattttattttattttttgaattggttttcagtgtcattaatgcaccagtggagaagatcaaagaagctcttgatcaaactagtcagcttccatatgcgcatagagtactcagctctcacgccacagtcttatataagtgtaatttgtttcacatgaaatggttggcaggatgagaataaagacctatgcaatataatatgttatatttaatcctttcttcactaaatctcttcaacattacaagtgaataagttccatatatcttgtacggtacctattgtttttacaactgttattatatataatgcaaaccttttcaaatgtgaacattaagtatgtggtattattcatgatgtgttttgccaagaaatatataaatgaatattatttataattaggtggagagactcttatttagagctgaaaacactaaattgaggagagttcaatattatatttatggaaacatattgttaataattatgtttatgtataagatactatttgtactcgatgatgtcaatgtgacatgccaactgtgtcttcacttcataattagacgaaccactagcaaaggcatcattaatttctagtctctctgccatgcatcgttgggaatgtgatctgctctccccactgtgcgtctcgctccgtttcacaccagcaaaaatgtgacaactcatctttgttaacttctgttaatttgctttgtataacttggtcaaataaggaaaggggactatcattattattactactttcctctttttattgaaattcagtagtagaggtgtttatcaaactgctcaaactgtccgcaccacattgcactgcaaaaaaaaatttgatttgaaattttttgcaacggtgcaatttgcagttttgaattgttaatatgcagtttaaaccgcaccgcac

SEQ ID NO: 16501 - DNA, 3784 bp, Cannabis sativa
  modified_base (3349)..(3351): a, c, t, g, unknown or other
attgatgctcttgtcaaatgtcctagcctcctaggattgatttatggcgcttcacaggcttctatggtaattccaaaacacaacttaggaaagattcatggcactcctaagacggattaaagatttctttcatttattatggatttgtgtaggggatttagggtttaggatttcaatggaatattatcactaaatgagaagaatggtgatccggaccataatttagtgaacattgtaagctgatcattgtaactgtttgtgttttttgtgaacattgggacatcaagggaaatttagtataactacgcagtcacatgaaaaaacaactgtttttttttttttttagaaaatttaaaaccaaattacgtattttcgaaaagaaagtcaaacaaatgtcaaaactattatggatatgggcttctcttcggcccactaaggcattctgtgtaatcaaagaacgaaaagataataataaaaagaagagaatctcgatatggtgccacgtgtgcaaaaaatcttgtagtaacggcagagacgaaaaggatagggcttacagtagtcctaaatcagagtatcgttccctgagtcgggggtaatatcgtcaattcacacacattatccccaatctatagttccgctcctgcaactcgcttacttcattccactccagaggtctcttcaaaatcctaactctctgagaaggcttaaaaaggtgataatggcggtttcggttgcgtccctcacatcttccctatcatctctctctttttcttctcaggtttcttacaaaccaagctctctttccttcaaccgaccaaagcttatctcagtctcccatgtcgccaaagtttcgccgcttgttgtttcagcaacagttgcgtcgcctgaaggagtggagaccgctgaccttacaaagtacgtgaaatcgaggctcccaggtggattcgctgcccaaacaatcatcggtactggtcgaagaaaatccgccattgctcgagttgttcttcaagaaggcactgggaaagttatcatcaattaccgcgacgccaaggtctataacctccctttatctctatatatacttttcatacaaacatattttatttggtattttgtgcgtttatgcatttatgactgcgtaattttgttctgtgtttgatttttctttttccgtaccttttttttatgggttttgggtttactaatttccatatttttcgaattactttcttgcattatgcttacagcagagttgttggggtttttttgcttgaataacagtttggtaattgtttttgtcaattgtactaactatagttaagtaaatttgattctagttaaggtataaacaactaattctttgggaaaaatcgcatcgtggatttatatttatgtatacacacatcagttagtcttgaaaatgctgaagttttagagttggtagcgttgctatcgaagtatgtactggcatcttttgatactttaaacttcttttagttcatgttggaaactatacccgtcttttgtggctttggccatgtgatgatcaagtagaggactttaaattgtttcattcattgaggctttccagcttttgctctttattttcataaagtagaccggctttcatgtgaagaggttcactatccttttaaaagcttttatttttcctttatctaatttcattgtcttcttgaatttgaatagtcatgaaaaactttcctaacctcaagaaatattttctgcagtcactgcactagtttgtgggagatatgcactcatgtgaacatttcatactactgtgaatggattttaaactaaaatgctagagcaaacttatattttccctatcacttgcctcttagttgtggccacttgcatctgagattttatggacttgaaataaagattaatgtttaaatagtaacatttgatctcctttcaaaactggatattgttttgagttaactttgctaagcccaagagtctgaggtgtccatacttggattgaaaatactactgatctgtaccgtgggttgacaaaagaattaggaaaaccgaaagccggttctacttatccttgtttgacgaagaccactattagattagatttgttaaaaatcatgttatatatattttgtgactggggcttttaatttgtgcaggaataccttcaaggtaacccattgtggctacaatatgtcaaatttccattggtcactttgggatatgaaggtagttatgatgtttttgtcaaagctcatggtggtggcctgtctggtcaagctcaggcaatctccctaggcattgcccgtgcattactaaaggttagtgaggaccacaggacgccactgagaatggaagggcttttgacaagggactccagagttgttgagaggaagaaggctggtctcaagaaagctcgtaaggccccacaattctctaagcgttaagttatgtatgctttccagtcccatgccttccacacgaagggaaactgaagataactgttttaagctctgttgttcaataatcttttttccttctcaaatttttgtatagcccttctagctattgttgccgctcttctagttttaatatgttgtagcttctgtacttggatattgcacttggcatgataatgattcttttctatcaaaggtttaaatcactcaatattgtaccaatttgatgggaaatttgagactttatgctttccagtatgccttgttcgatttttgaacacatatatgctggactttttggattagtagtatcgtttttttgtatttataaagttttttgtgggattattgttaactatcaatatgagccttgtttgctctttaaaattagggctagatatctgattcaatttaataattttttcttaattcaattcaattagatcttaaaatttaatcaaattactaatatctaattatatatttaatttttaatatttacttaaaaaaaataaagaaaaagaaaaataaataaaaactaaatattatcattcatttaagttcaatatttcgtaagaatattatcatttttttattaaataatttgaaataattaaaataacaatactgctaactaataaaataaaacaaaaattacaaaaacaaatacacaaaacaatcaaatattataaattcaatacaaaacaaaatgtatattttttattatatataaataactataaataattttttaatatatattaaatgtaattaaattggattgatttttaattgaatttcgagattgacatctaataaacgatctaatttaattagaatctaacttttgacatccaattcaatccaattgtaattggatatcnnnttttttataattgaattgaattagatcagttcgttttaattggattatattatattctgtttacccctatctaaaattaaaattatttgtgctacgcattgttgataccatcattttgtaaaattggtgttgcatgattctcactcggttgtcaaattgaggtgattttgtttttgggatctacacattgtttacatagccccaaacatttacatgacaaaaaaggccaaactacccatcgagtgaaatgttgtctcacaaagttcttataatttgagtttgcatgcttaaatgtgtctcacatagtaaaacaattctccctataatacgctctaaaaatttacgctattcttttccaatctaccaaaaatactcctcttattatcttcctctcttttcttttccttcatttcctcgttctctctctttctac

SEQ ID NO: 16502 - DNA, 5900 bp, Cannabis sativa
  modified_base (5860)..(5875): a, c, t, g, unknown or other
ttttggggttttgaaaaaaaatgtcatagttttttttagggtttagagttttggtttaataataaatttttttaattttttaagtatataaaatcaaaattcccttttgagaattcctacttttttttgtagatgatgagttacttggttagaagaaattctaccaatgtgatgagactagactagtggattatattactacattgattttatttatgaaattcgcctttttgtaaaaaaaaaaaaatcagtaattaagttttttttttttgcaagaaaagtaattaagtaaatatatatatgttaaattgaataataattaaaataaacctcatgttaaattacacttttaaatatactacttaatcaaattatttggttatagacatgtttacgtgtagtgtaaacttcattttgcatggcaatgcattgccattagcttaaaaagttcattccacgtaaaacaaataatacatattgaaattcattcacaaatttctaaatttaaggaaaaaaaaaatcaaaaaagagaaacaatcctttgactttctgtccttttttgcaattttaattttaatttatatttaaaaatggcgcaattttatttttaaggaaagtacaaaaataagagtaccatattatccatagggtcccttttaaccttaaaaattattattattattaataacaaaaaaaaaatagtgaaagataatgcacagtctcataatacgacgtcgtgtctagtcttggctagctaagaagaagagcgcgtgattacaccgcctaattttatttaatatattattttattcttatttttcctaattaagcccaagcaagcaatctttttctttgaatggaaagatcaaaacgattcgttttaccatttatttcactctccgtttctctctcctctttctctctctaaaatggaaagaaagaagtaacgcattcgaggatttcagaactctgcctctcaaaaatcctctcactgcgcgtgttcgacactcgctgatttaattattattattattttttttttgggttttgaggttttgatattgcaccagtcaccaccaccaccaccaccaccggatccccattctcccaatctagagctacactggctgtaattatacgtcgtcgtcgtttgacaccgtaaacgcttcgccgttagaggttctatgtataaccacactaggtgaaatctcactacttctcctccattttaagaaattgattatgtaatgtttgggtgttggggaagaatttgaacatgggttgtgtttgttttggaaaattatcttttgggtttttcgcttaagaaaaatattttagggtttgtgattttttttttgtcttgttgcagaggaatgtcattatggattgtgcaaggtcagggcacaagtatagtatagcattttgggtgttctgggagggactctgctcatctgattggatttacatcctcatataagggtttgtttttttttattgtttttttcgatttatttgatgaaccatagatttatgaatgtctttagctattggattgtattttctcatgtgtgtttcagtgtatggttgtactgaggggtgttagtgtaagaagatatggtttggtaggtgttggggtcttgagggtaggggaagatagagctgtatccactttattgtatttgttggaatggaattattgactatatttagttaccttttttcttacttttttccccaagtttcattttcggttgtattgttctgttgttaatatttggtgtttactgatggttgttatagaacagtattctaagttagggttgtggaataatagttttttccatatcttttgttagaatgaaaccattgccatgtttggttgctttttcctttcataagttttacctttggattatgtctttttttttttttgaaaaagagacagaggccacttgtctaagacaggcccctatccgatagttattgaaaagcctcacttgtggcggaggaaaacggtagttacatgaaattaaacagaaaacactaaaaaaccagcaaaacgaaaaaacagaacaggaccccaaagaaaaacagtatttgtttgaccaaaaaacacattacatcaaacttctccattctctactcaaatcgaagaatgataagtgctcaaaatgcttggtcttatacacccaagtcagcaaaacaaaaaaacgaaccaggcccaaaaaaaaaaaacagtatttgtttgacgaaaaaagacattacatcaacttctccatttgctactcaaatcgaagaatgataagtgctcaaaatgcttggtcttgtacacctttggattatctcttaagttgttcgagtgtttcgttcttattgtattactaatgttggcttcaaaataattcttttaaatttatactgtggtttgcaggagtcatggcttttcggaaatatgttccttctagtgatgcaccaccttctataactatgaagcctttggaattctcaagtaaaatgcatgataatcctcggtttgtggatccagagaccgcccttgctgtggagcctgatatagatatagatctcagagaagtttactttcttatcatgcatttcctttcagctggaccatgtcgtagaacatgtgggcagttttggaatgagcttcaagaacataaacttttacccagaagatatcatgcttggtactcgaggaatgatgtgcttattggagatggaaatgatgatggcatgtcaatccctttgagttatagaatgttggtggagaggtatgcttcactttgcatctttccctcttaggtgtaatcaacattttcatcagtaaacaattaattgtgcccaagattttaatttccaagtaacacacatggtttttggttgctaaacagctttcctatgaagctgattgttgtgtgttattttgcttatttaggtattctcacattcaaaaggatcacttggtaaggcttttgaagcagttgcttctaagtgcagctcctccacggagtataagcagtgcaaatcccccaaatgctgctgatgtacctactttagtgggagttggttctttttcacttttaaacggtaggttaaactggtttaagaatttaggttttcatggcatgcaattgtaaagcttaattgttatgttataatgtaaacaaataataatgttatcgtattaacttaggctttgttttttcttcctttaagttattatatgatcgatacttgatgcacccttattatttagatgatggagatacttccaaccaatcattaaggaaaccccctgctcatatgcgttggcctcatatgaaagcggatcaagttcgtgggctaagtttaagggaaattgggggaggttttactcggcaccatcgtgcaccatctattcgtgcagcttgttatgctattgcaaagccaacaaccatggttcagaagatgcaaaatatcaagaagataagaggacatcgaaatgctgtttattgtggtatgcttttttaattcagttctattatgtcaaatgattgcatcctcccgacctttcttttgtacataaggcttgttttccatgctaggatgtaatgtttttgtgtgatgattttgtttatttttggagcatacttgtaggtgtatgatatgcgacaaatggaagttgcaattttttttcttttcttttgagaagtatgctcttgattgagtgtgtgaaattactgcagccatatttgatcgcttgggaagatatgttattaccggggcagatgatcgccttgtcaagatctggtcaatggaaacagcatattgcttggcaagctgccgtggtcatgaagtaagtttgtacaatctctacagcataatttgcttatgtgtcattgttatctttgtattattttttcatctttgtttttttaatgtttggaagggtgacataactgacctggctgtgagtgctaacaatgctgtagtggcatcgtcatcaaatgactgcattattcgagttgtaagattaagatttcccttctactaagcgaactgcgtcatcctttttctcttttgtttattgatttgtgacttacattttacttgagggtcaatcatttgtacatttttggtctgttttagtggcgtatacctgatggcctaccagtttctgtactgcgggggcatactggagcagttactgcaattgcatttagtccgagacccgggtttacctatcaacttctgtcgtaaggccgtctctcttttttttctgtctcctatttctaccaaagttattctgttctctgtaaaaattattctaaccttgttgatattgatctctttttttgtcagctcatctgatgatgggacatgtaggatttgggaagctagaagctctcagttgagtccacggatatatgctccaaggccttcagattctggggctggttagttgctctcttaatttcatctagattccaaatcatagtttgtgaaaggaccttgtttggaataatatgattagttgcaggtagaaacaatgttccatcttcaagcactggtgcacaaaaccatcaaattttttgttgcgcgtttaatgctaatggtacagtctttgtcactggtagctcagacacacttgcaagggtaaatcgttctctctctcagtatttttggtcacattcttgttcagggaaaggctaaatgttctgtgtatggaacaaatttcatcagtaatcattttctaagtgaattacgacattcaagggctattttcttgcaggtgtggagtgcttgtaaacaaagctctgatgacgcaaaccaacctaatcatgagatagatgtgttatctgggcatgagaatgatgtgaattatgtacaatttaggttagttagtctgtcaatgtagtttccattattcactgataaatatattcgtactgatggaggctctctctgtattgcagtggttgtgctgtagcatctagatttatgtcagctgacaacatgaaagaagagaatgttccaaaatttaagaattcttggtgtgtcccttgttccccatcatttttaccccttttaaaattagtaacatagctttttatcttgatttgtgttgttttgctttgtctaccccttcttttaatttcagttgaagttttgggtaataacattttacggtgcttattgtaatgtttgtttccagcttcactaatgagaacatagttacttgttctcgtgatggcagtgcaattatttggataccaagatcacggcgatcacatgtgagttgccacattatagcatgcatattttgtgtgtgaattaggagtgtccctcatataatattactcttttctttttctgtttctttttttagttaatattccccaaaatttgagcattggagactttagtggaaagttttatcatgaactcttttaaatgtttgttataccatgaattcttttttttttaggagtctaaataaaatgtttattgccatttttatgtttcaaggggaaacctagccggtggacgcgagcatatcatctcaaagttccaccaccaccaacacctcctcaacctccacgaggaggccctcgtcagagaatacttcctactcctcgtggtgtaaatatgataatttggagccttgacaatcgctttgttcttgcagctataatgggtatgttgttgattgttcttttgttgtaataataacaatccaaataattgttagtattatagttattgttattgctgttgttggttggttctttagctgtgcatgtgttttgaagtttctataatgacccctctctatttatatttatttaagggtaaataccannnnnnnnnnnnnnnnttgcaaaagttacagattggaccct

SEQ ID NO: 16503 - DNA, 7034 bp, Cannabis sativa
ttttttttttttttcttttcatggtcaattttattattattattttttaaaaaaatcttcaatggtatgcctagtatatagtctatcaactgtcattgtagtaacttgaaaatgaaaaactgaagtgacaaacaaattgaaaattttatgatcaaatatataagttggattaaaaacaaataacttgacaatcaccaaattattcttcatttaaaatcacaaatattacaattaaaataaaaatatacccttaatataaacattcttaaagtgtggattgatttaaatttatatagctttacaattatacccctcatgttgactaactaaacttcctacttaactttatctattaagaaaatcagattgggacctacacacaaacataactatcttttgtgtctaaagttttttccatcaaaacaaaattattacaaagaaaatttagccaaatcttcttctttttcttttttcttttacctaaaataaaatataacaaataaaaatttagaagggttttactttaaactctataatataataaaaaagacttagtggtgtaactacaaaaaaaaaatgagcctcaattttttttattactacgaattcaatgttcaaaataaaatgtcgtaattaattacaaagagaagaactaccgttaaatcagttagtgaactcttcttcttaagcctttgttctaagaccttaactctagttttcagcaaagagactttgcttcatttcgagttgaagcaccaccccatttccaccattgttatttcctattctctcagaagatttaaacccaccttttagaatacttgtttgattggcgaaccggaggaggtgtcttggcatttctattgtcctttgcatctgtataaacaaggaaagttaaatacattgttagtacaagaccatcgaaagtacgaatgaagatcattgaaagttgttaaaggacctactattattattgtcagctgtattttctccaagagaagatcttcgattccccgagtttagaacaccggtaagtgattgcctcctcaaagttttcccattagttgttgtagcaggagatttcccatcattgaaattgcttgaaactttggtgtttagttgagcttccatcagaacatgttggctcctgcaaagtttgaaactgcactagtttaaaatgtaggcttaagtgacaacatgttaataacttgatgattttcctaccttttatcagagccattaatcagttttccgatcgttgtcctcaaagattttcgtatctgggatccttttccatttgtgctagcaaccaagttgggtgtctggtagtctaacgaaaatgtaagctcattttgcatcatgttctggaactcaattttggagcgtgtttgtgattcgggtgtttttggcggttgaagggaaggaatctgtgttctactgtctgttttcaatctcttctgataggtaacacttgttggacttcgaggatcctttggacgaattgattctactttggttggactccgaggatccttaggacgacttacttctaccatggaactttcgttgatgaaatttccaaatgatttcatggaagcttcagaatcttgatggaaactagcatctgccacaattgtctctagagcatccttcttgaaagattttggaccttccaagcttgatcttctcaaccggtttggtacagatggggttctaaatcccttcctgctttcaatgctcatttcattctttgattggacgccattctcaatgctcaatctcctcggacgtggtggtgttttctccatcattggtctaggtttctcacatgttctgtttagctgtacattactctgtccttctttgtttgccaatgccttcttaagagtttcaacctgaacattcaaagacatttttaacaataagattgtcacaaggcctttgataaatcgaaaatttccaaagcttattacctgttgtttaagttgaataacttcactgctttctttgttcgagcgagcagcaccaagttcaacagtcgaagctctctgagcaaacttcaaagtactaactgtttcgctaaaagaatcttcttctggactgacatgggcaaacattaatgttttcgcgtgtccacctgaaatagaaatttagatgaagttgttagataagtacaccatctatttcgtgtaaaaatcgttcgagttattaagcattaatcatcagctatcaacctaaggaatcttgcagtagcagggtgagtttgctgtttctataagggatatgagaattcttctgagccaaggctgtaattacatctcccaaacaagaaagagacttgtttatacactgtgcctcctttagcctatcccctgtaacttccgatttgtccactcgttcacttcctgcaaggtctaccaaatgaaggcaactgcggatattacctccagacgtgtcttttccaagcacatgtaccgtgaggacactgcaaacatatcagaacaaagctattagtaacaccgaaataagagtagcagttaaagaaagaagaagaaaaatccatccagagaaacgacctgtgtgaacggctactttgggtgttcattgcagtggagctgacaaaccgattaacctcaccaatcttgatgaagttgtaaacatcagcagtagacttaacagagcacattgtagcatccggaagacttaagccattatcagttgtgcaactacgaatctctaatgtataattttgttaaggataaagtttaatctcataaaactcaaacacataaaatataatttagtaaattaagaaaggatatttagtggttgatgaatcttcagcaagaaggtctcgaacttgctcgttatatatttcaaccatttgaacaaagatttcataacttatgaggtcttttctcttgctagagatcttaaagaggtcattaagagctagataattgattcccaaatcagtagttgagccacctgagggaccgctctgccaataagaaaaaatgtacattgtgaagcttagtagatagtttctaaatttttatacatttggttatgaaaatgaatcaaaataagcaatatctcaccatggtataagtttttcccgatccagtttgaccgtacgcaaaaatgcatacattgtaaccatccatgacagatctaatcagtggttgagtgtccttataaatctcatctgaaaagtgtggtcagatattgagaaattaatcagctcaatgtacaaaaaaaactatggtgaagattgaagtttggaattatattattaccttggctagaaatggggccaaataccctgttgaagttaaaaactcttcttccatctttcccgggttttgatggatctagcaacactagtgaaccatcctctccgatgtaatctattacagttgttgcttcagcattgaaggagggccttattctacagtaaactcgaatgttacctaaattaagatagagaaaatagcatgtttagttccaggccaaattaaaataaattcaaccaaacgaaagtaagaagcatacggcataattttattctatataaactgacctttcaaatcctgaaccatgttgtataatgccctattctctttaaccaccttatggtatccgcgagcagctgtagagagctcttgtacttcggtgcctaaagtagtacaaaacacagagaaaaatgaaatcaatataggcagaactacaattgattatttcatttcacattgctgattatttcatttaacatacctaagtacttcaaatctctttgcaactggaattgtagctcttcaaactccaccttagttgtgaacaacaaggttttgagatcctagaaagtgggaaaaaaattactgatgtagataagcactttcgatgtattatcttagttcaaataaaggtaactaatttgatttttttcaatagctgggtcactagtttaacagcatgaattatgtatacaggccgaaagtctgctagaaaaaagaacgcaaagatgaaaaagatgcataccgcaagttctttttcttgcatttgaaatacttctctatgatgacaattgccctttctcaaacaagctttgcagcacttcaaaatccacataagaaacacattagaatatttagtaacactaaacgtactgtataatttagtttattcaaattgttagatactgtaatgttacgcataagtattccaaataagacaaggaacaagtttaagttccaattaacagttccctgatctagcaaaaaaacacattatatgaagacaaagaagataattgtacttcatattcactggactacagaggtcagaagtatggtaatttcagttatgaaattgaaatgtttaaacaaataagagctttggcattgctaggccaaggcggttaagaaaacaggtggcattcttttttataaataattttaaataataagtttataagaagaagataccaatgaaagtcattaattttttcaattatactgaaatataacaagaaactaatcaaaataaagctagtttattagtgtggtatacatataaatatgccactcgaaaacatgtttgctgtgaagcaaggaacaaggaatttcagctaccctttatacatatattgttcaatcaatttaatcatctgaaatgagtcactaaacatacatataccttagtgttttgcagtgttgataaatcccctaatggctcagatgttgaattgagattggcgatactccgttctttcaacgaatcttttaacattgaatgaaactatttatataaatataaaacaaaaaagtatttcagttctgttgttctgtaactacttgatgttaaaaaaagcagtataaagtacaataggtgaaatcagttacataataaagtaagcaatctacaattcaatcaaacatattccaccctagctttgcctccatgcctatgaattaaccacccgaaactaaaaactaataacaaacaattttgtgtctacaagcttaatttacgcattggggatattctcattcagactcacctctggcaacttcttctggagttgttcacccaaataacctgacataatttttctgattagcttgagacgatcctgtgacaccattagagaggattgaacatattagatattacacaacttttatgccttttggtattttgttagttaagttgaaatataaagtcaataaagtcttattgttacctctccattatgaaaggaagcaaacaagttttcatcaatgttttcctttgtgcaatccattgactcttcaaatagcttgacgattgaatcgaccaaggactctgcaagaagagcaaggaaagacatgtacagccgatattagaagattatgttccataactaaactagtcatgaaccttattacaatcaaatttattcactatttgtaacacttaataattttcagaaatttccaaatgtttacactagaattaacgaggaatcaagtaatattaaccttcaagttttttactgtcaccctcaattggtggctgtctttcacatgtggttgacatatccaatcgtctacaagaatctgctgagattgcagctgaagctttcgattgcatcctattgacagaagtcataactaaaggagattttacatatctatgaattccattcgcagccacgctactttgctgcttacactcgtgataagatttaagagccaaaatgcaatcaacaaccttggctgctgaccctgcttccaacgagtcctgatataaaaaagagaaacaacatcattagatacatattattaactctaaacattaaaaaccatacaatatcattgaaaatgttaccctttcaaggtcagaagcttcaaaagcgggcagctttaactcttcgacagcaaccaagaagttacgaacattctcaaaatactgataagcaggcaacggttgtgtttcccggttgagtaattgtaacgtcgattgactctctacaacctaaatatttccaaattcaaggtcatatgattgttgacagatatagaaaatagttatccaattgataaaatcatctcaagagggaaaaaaaatctaatgaagagtaggaccaccatatacaaatggctcaaatcaataccttgggcactgctcctggatgaattttgttaatggcattacataaaatgataccatttcttagacaagaaatgaattctctctctgaaggttggttcagcaatccaagtggacccacaacgctttcaagccattgcacagcttggaatcgcctccaagctgcagattttaatcgttaaaaatggattaaaaacaagaaaagggcaaaacaaataagcaagctctaaatccaattaactattagcaatttaaaaaagattcaaaaaaatagaaaaatactcatacaatctccccatttctattgtacaaaattcaattgctataataaaaacatgtaaaccatacaaaatgaatgaacaagtttgaaataccaacctgtttcttcagcttttcttgaagccatagtaatatcatgagacccagttcttgtagaatcctccattaaaaacccaattagttatttcctgcaataaacccaaaatccaatcaaatcccacaaaccatttcaactccaccccccaaaaaaatcaaactttcaatccaagaaagacccaaaaatcaaattttgttcctgaataatcatcaaaaagagaaaagacgccaaaaaaaaaaacatacttgattgattgatgattgttaaaaccctaattaagatattgggattttgagattctacttattggtggtggccactcagagtagagtggaagaagagaaagagaagactgtgctcaatttccggtaattgtttctttgataagcctttagtttgggatttcgaatctaatggctgaccaaatcgtaacgttattaaaatgggtgcggtaattttttgaattcaaatttgtagggccacacgtgacaatgttgacatagtg

SEQ ID NO: 16504 - DNA, 9663 bp, Cannabis sativa
gattactaatgtagtgagacatctaagtgagggtgttgtatattatagagattatatatgacaaggactgatatgaatgaagttgtctttattaacatgttgtttaatataaagacctaattcatattataatgatgatcaatagtagattggcctaaatcctgagttatcatggactctttttcatgttattaatttttttttgattcagccgttaaagtttctcagagaagataattcttacaacttctattttgggaatctaataatatggatggctaggaacatgatgtacaattatggaatcctgacttttctaagggatcaaatgttggttccctttaagtgttaattctagaactggaatgttgtgtacaaattcagatgtgatcttgaattatacttccactagtgaataaatggaactaaaggataaagaagtcattagaagggtaaaacattattttgatcaaaactaattacaaaccaacacatggagggctaatcaatgtaattaattatatcaatggacactgcagttaaactcaataaatataattctataattactaagagtgcaattccatatttatagtggattaatcatggaattaataaataagggattatttggttgatgagactcaataaataaaggattgtattgactctatttgctctgcttatgcagatttacatactttgtttttcccttaccctactccgtactcaaaggagggttggaatccacccccacaggatcggatcaagctgaattgtgatgttcgagtggggcttgatagtatgtgtttggaacttgtggccaggaaccatcttggtaaggtggtttgggttcagacggatcgccttaatttttctgatgctctgtgtggagaggttgcggcttgttgtttggtgctttcagttgcaaaggatctcgggtccaagtttattattgtggagagtgactctagagtagttatcaatgctctgaacgggattgattctcacaaggcaattgaaaactatgtcttattttgtaatagtgcttctcgctcgtttattagttgtaaattttctaatattggtagatcttgtaactttgtagcccataatgtggcaaagtgggcatttgctcaccagaggtttggttttattccgctttcagccattttttcaaacctattttgtaatgacctagaggtctaattttcccttatatattaagtacgctttttttcaaaaaaaaaaaaaaaaaaagactcaataaataatctagtttattggagcttagaattataggtctatcatggttcccaaatcgccaccttgaaacactgtcaagagtagggatgaagagttgtataaagatgttcgaaaaaatctattttaaattggaaacatagtaattatttatttttgtaataaataaataattttttcaaattaattaaacaggaaaaaagacaaaaattgttaacgaaaaaattcatcgatacaagatttgtcaagacaaaagacatcaatctagtcctaaagatacaggtacgtctaagcattgtccccatccttatgggatttatctttttgggctaattaattatttaattatttcaattaggtaaatatctaatttgaaaagtggttatagatatttcaaggttgttgagacattgtctcaaagtggttgagagattctatcataaatatcagtaattgaattcgattatatatatatttatttatttaaacaattaaataatgattgaattaaagagatttaactactataaatagaagcttaatttgagaaatcagaacacttctttcacacagaaaaattcgaatctgtagagagaaaaggaaattggtttttctctctattgttcttgctcatgtgttgagaactcaacaagaacaagattatacactttatcctaatagcccacactattccttgtgtgtggtggatggatttggaagacactggtgtgagtccaaattgcatattcctcatcaactggattaagggatacaacttacgaaaagttttgaggataccctgataggcttcaagaggtatactctaagcttattgtttttattgttttgatttaatgtacacacatatggagatcctgagggctatggtacaatgataaccatctaatacaaaactcttccaagcgtacctgatttaaaaccataaaatcaaaacttatcatagtttcccttgcctaataccacattggggagaaaatgaaccttgtacaacaccattcaagagaaatgaataagatattatcttaaacatcgaaggatcagatgtactaaactgctaccgaacctcatcttcaacataacttgttttgcaaaatgccattcaactcgatcaaaagccttgctcgtatctaattttattgcagcatatcctatttaaatcctctctttctatttttgagcaagtgcgggacttcaaaggcaacaagaacattatccataataagcctctacaaaagaaaagcactttggagttctgatattaccgtaaagaggaaaggttgaagacaaagaacaatggtcttggagacaagtttgtagaggaaattacacagacttatgggttggaactgagttatcttagttggcttctttactttcagaatgagactaatcagagtcttattgaaaaaagagggatcacaaccattatgaggacatccaagatagcaaaagtgacaagagaaccgacaatattctagtaattagtataaaatatcagtaatattccatccaaaccagtgctacaatcatcaaacatagatttcaaggcttgaaacacttcatctgctgtgtaaagtaaggagagggctattctagaataagcttaaatagatgttataatggtttcaagaacatactccattgcttgttggtcaataccttgtgtgctgaaaatcccagtaaagtaatcttcaatgttaacaaggatttcttgattactggtatgggtacaaccatcttcatcttggaggtttttgatatgattattagtatgctttacattagcacgttggtgaaagaatttggcgtttgagtcaccagatttcagtcatgaaattttagacttctggtgccaatagtcttcttcttgagcaagaagctcatccatgattgtttctaaatttttaagggccatgaagtgagattggtctgtattggatgagttttgcaatgtcacaacatgctcatgagatgttttgatacacttttcatactaccaaacttgtgatgatgccaagcctaaagttgagtagcacatgtttttaaagatcatatcaaaccattcctcttctttaatccaaaattttttgaatctaaatctagacttgaaaactggtttcgtagcttgctcaccctgcattaaaatctgacccttgagatggtcggtgtgataaaaatcaagatattgcaggattgccatgtgaaggaaatctgtccaaaaatcattagaaaaaacaataatcaaacctttctttaacatttccttgacattgacttttattagtcaatgtgataagttcacctttctttaatagctgattgaaaggtctcaatttatacttgattcttaggtggaccaccaattttgttatgaattttattaaagtctcccacaaccagctaaggcctttgaggagcaacatcaaaacatcatctccttagtattgtccaagtatgtacatcctcacttgttataatcatgacattcaatatgaagcaaatgtgtttaagagagaaattattaagagcaatatctacatttgacttccagagaagcatgagtccaccacctacaccattatctggaattatagtatattgacaatttttttaggtaatattattattatttattattattattggaaggaataatattggtacaaaatgacacgatatccttcttttttttttgcccttttgtagggatatccttccttttttgcccctttctgtaggaatatctttcctttttcatttactctatttcttttatatatcatttttttacttcatattttttagatatcatttactttgtaattactcactcattcagattcatatatttcactctttttcctacaatataaaaaaaaaaatatgtgaagagaaaaaaaagaaagaagcatttatttctcaccatccttcctgatacttattaataaactattatattcctggatttattaagtcatcaccacagtgactgaggctgaggtctgagagtgtgatttgaggatattacaatggcgaaaccacccactgaagagcacccacaaaaggcatttggttgggctgccactgataattctggagtcttatcaccattccatttctctagaaggttttttatttgtttttttagatttacattgtgaatatattgaaaaatgtatataatgtaatttgggcttcttttgctattagagtctccatagatcgatgaattttaggacagagttatcgatattacacatctgtacttttgttaagatttattgttgatgcgttatagtgttagtataagtattattatatatattatttcttagattctcctgttttataaaaaatatatatataaacaaactaaaaaggatgattatacaactagctaaacgccaagtttgtcttaaacggtatatgtactagtggcgttttcttcttttagagtatcaacagtgataaagggttgatttaatttattaatttttttacgatttacttttctgttgttctaaacgggttcaagccctctcaaacagtgcctcaaatctaatctgtaaccttccctaacatgcaacatcatgtaaatctttgaaacgtaattgctgctgcctctttagaccatttatttattcatttttctcgactgaaaatgacaaaaggtttctttccatacttctgggatgtaattagccttcagatattaaatttttattatcaaatgagtttaggatgtgatattgtgcttttgcattattggcagggacaatggtgaaaatgatgtcactatcaaaatactttattgtggagtttgccattcagacttacattctgtaaagaatgaatggggttttacaaactaccctatagttcccgggtatgatttatttttgtatctaacttgtttctaaattttatatatgtatgtatttcttcaaacaaaaaaaaaaaattatatatgtatttgaatctacctttaaacagataaatctcactataataatctacttctcaaaaagaaacttgggaacatgaaatacttttcatcattggatgtttatcgtaggattggactgttctattgtttttgtttttcataatttgtccaaatacaaaagcatcctctttttattaactcaagtagtggaaaacttataatacaaaactaataacaatctctctcctagtttcttatctttgtaaatttgtattgcactcacaaaaacattgaaatacttgcaagaagaccatcacaagtcattttatctgggaaatctcattgaaacaccactcttgtgtgttagcttccttacatcgccttgtgtgatcactttaacaattgcatactctcagctttattttgatttatgtccaaggaattaaattcttatgtatatttattaatcacttttttattgataaaaatcatctgagtaatatctttattgccacggcctaatatatctacacctgccaatcacacagtagcatcagaaaagataattgtttgaagtctttcctcttgaaaatccaaatagctaccaatgtttaaccttattttcttacaaccctcttctatatcattgaaaactcaacaatttcttttcaattaattagcccaaagaacagcaaggatggggactgtgtttcacgttgtctccttccttcttccctttgccatcccaatccatagcctccaatatatatacatacttaatgttacaggatatcttatcaccttttgtattgcaggcatgagattgttggtgttgtgacgaaagttgggactaacgtgaaaaagtttaaagagggtgagcgtgttggagttggtgtcatagtgggatcctgcgagacatgtgagatttgccaacaagacttggagaactactgcccccgaacaattttcacttataatgcccatgaccatgatgggagtaaaacatacggtggttattccaatatggtggttgttaaccagcgttttgtgctccggtttcctgacaacttggctcctgatgccggtgccccacttctgtgcgctggaatcactgtgtacagcccaatgaaatattatggaatgacagagccaggtaaacatttgggtgtggcaggtcttggtgggcttggtcatgttgctgtgaagatgggaaaggcctttggattaaaagtgactgtcatcagtggctccccaaataaagaatctgaggcaattgatagacttggtgctgatgctttccttctttcttcagaccctgcaaaaattaaggtactgatatttagtttttaaatgaacaaatgaaactgaaatgtagttgaatcttttggaatttagtccctatccaaacgatgtaggaatgtctgtctatattttgttggacatgattgttgtgaatcaaggcaatagagtctaaagtttactcacgcaatcaaggacacaatcaatctgagaatcacaaagaaaaataagaagaattaaacaatgaaaagagaagaaagacactagggatttacgagttcaagcttagtgcaatgctctacttcttggttgaacaacagccataataatctccattaatcaccaagagtgttacaaaattacaatagttcttgatcaagaacaatagagagttacaagtctcacttctctctctacttcgcaaaactgatataactaactctctctctctctctgttacatttggataatacctttttatgcaatgtgagatagcaatgaacaagtttagtagctagtaacttgtaaccatttcaacaaatctccacctttgttcaagtttctatcactcaaaactttaaacatggctgtattgaggttcatcaacccaacagggctcaactgactccaattcctatcatcttcaagtagtgcttaggttccatttgtttaaacttaatggaggcatgaatcttattcagttagattttaagtcattaagtgtgtttgtttttttttattttttgttcactttttactacttaatacctcttaccgaatcagacttaatgcgctcttaataaaaaatatatagtattccactttttctctatctctctgccgcaatatcaatcaacatcaaggtcagctttcttattttttttattatcatcattctcatctcttttcttttttttttttatcattttttttaacttttttttttgtcaaattaaacgttatacatatataggattcttaaatgatatatattatattacataaaaaaaatatattatgtatattatatctatttgtactctatattattatagcaaatataggtagtatatctcctaaaaaaattatttggtagactactctatttatctgtttcggtatataggagagctttttatttaatttcttttttcacgatcgtgtacgttatagctacttattaagatcacttgtaattttttataaaattcggaatagtttatcgaaaattaaattcaaatagcttctcaccacgagtataagaaaacacagtggcacatgtaataaaatatttgaaccttatgttcagcatgataaaccatttaaaaaattttaaaaatttacaagtgaccttatatagtaacgtacacaatcatgattttttttattaaattttttttttaaatgtcgaaacaaataggagatcttttttttttggtatccaccaaaacaatatttagagggtatactatagacttttgattcttatatattgtaaggtaaaaatatataatatttaattatttgttttttttttttatttcaaaatatttgtttgtttattttttttttaaaatataatataatataataaatttattaatattatataattaaatactttggaaaatacatttagatgtgaaaaagcaaatagtcttaatatttcagtattcagatttagatatgatatcgtattatttagatgtgcatccagatttagaggtttatatcttaaaaaaaacaaatgcacccattttgtttcttgacactactttggtaatcatatcaaaaggattgcccattgtagggactttggcaattctcacagcttccttttcaacaatttctcttatgaaatggagctttatgtctatatgtttagtacgttcatgatgtacataattattggttgattgcatagcacttcgattatcacaataaactgtgataatctttagtctcgactttaattcttccattaaaccagtcaaccatattgctttctttatggtttctgttaaggtgatatactcagctttagttgtagacaaagcaaccaccttttgaagataatctttccaactgatagcagtaccatacatattaaagacatagccagttaggaattttcttgtgtcaatacaacctgcgtaatctgagtcaacatagccattgatcacattagtgtctgtttgttcacgctaaacactagtctcttgtccattgttccctttaagtatctcaggcctcccgatgttcttttcctgggtctctcataaatctacttaccctacttggtgcataggctatgtcaggtctggtacagaccatgacatacatgattgatccaactgcattagcataaggaactttagacatctcaggttttttagtttcatctttaggcatctgagtagcacttagcttacagcattgtgcaaagggagtaatgactgtctttgagttactcatttcaaaggtatccagaaccttttggatgtagctcttttggttcaagtatagtgttttttccccttatctcttttgatgtccatgcctaggattctacttgcaggatccaaatccttaatttcaaactccttcttgagttggagtttaagatgtttaatctcttgcatacttttgttggctataagaatgtcatcaacttacagtagtaggtataaaatatcatttttctctctgaaatacatgcatgaatcaaacttacttctttttcagacccaacttggtcacatattcatcaaatctcctattccattgcttaggagattgtttcaaaccatatagagactttctcagaaagcacaccatgttttcctttcccactttttcaaaatcatcaggatgtttcattagaattctttgatctatgttcccatataggaacgttgtcttgacatctagttgctctaattccaagttgttataagcaactaatgccaactaaattctaattgcttaactacaggagagaatacctcattgtagtccaccccttcagtttgagaaaatccatttgcaactaaccttgctttgtacctagcctgctgtacacttggaatcccttccttctatatgtaaacccatttgcagccaaccaccttggc

SEQ ID NO: 16505 - DNA, 5815 bp, Cannabis sativa
tgcacttaaattttagcaacccgaactttagattgggttagaaaatatataggataaaccgcccaaaccgaccgatgaacagccctagtattacttacaaaatccaccttttattagtcgtgagtcgtgaccattacagaaacaagctcacgcgccttcacgcgccttcgtcctctctctctcttgcctatagaaagaccgcctccccacacttcattccctcctgtcgtttttgttatatcgaaaaagaaacgaaaggaaaaagaaacaaaacctctctctctctctctgtgaatggttgcttacccatgaatatgagccaaatctagagcaacctacgttgccttttctctgccattttcatagccaaaatctcttttctgagaagtccatttccttcaccttgaggttcgataatgctttcttaagtctgaaaagttgtttcatattcatttttttatatatacaagttttctctcggtttcttcttattcgttggccttaatctaccaactttggacaaatctagacatacccatttggttactgactgtggaaaacccctccaccgaggtttattcttgatgggtctccttatggattttccttttttttttaatggcttgttttgtgtgctattgatctggtttgggcttcaatatttggtattagttcaactggttgatgcttttttcttttaagttttgtggggtttgatgtttgatagatgctactcatgcgctaatcgctctccacctaacattattttattattctctgtcactaatcactcttagggttcttagtttaggtagtgtaatgctgtttctgtttttaaaaagcattcttcttttagtgaaatttgtgcttttttataggtgtatatataaaagtttagtgttctcgttctgatcagtcttgctttttgtagtaccaaatcaatttgcatttcttcacttttacgattccagaattttttaagtctgcattgtctagctgcctcatattgctaggaaagtgttttctttctgatcatgtccttcgaagatgcatgtgatccccatgtgcttctggctttgcatgttatctcgtgtctgctttgattaatttttaaatttgatattatttctcatggttattgaatcattgaaaggtatattcttttatcataatcttttcagacatgaccagtgattagtgatttctatgttattttggaaagattactgattcatatgagttatctgaggattgaagtaaataactcataatgtgcttaatcttactattgatcttttaattagttgaagttcattagtctatctaagaaaacttcgttatatgtttcattattttaagtctaaaggagtagagacttttggataatctttctcggataaggaactctattacctggattttcttacttattgccatacgattttgtttggttttgctgtgtgtttttggttgaggggagatcctaataatcatttgattgattctatggttttttcttcgtacatttcaatttaatggtcggttcctaatttccttaattctgatatgccatcaggttctaacttttttctgaccagaccttagatttcatgatctaaagtagtctcaggtgatgttagtttagtgatgtgcatttgctagtcataaagttattattgccatgttaaataaatttattttcttgctcaggttttctagtctggtttcttcttatattctattatggagggagagacgtcgtggattagccattgcctcgatgacatgtctagagaaattggggagctcgattcatactcagagctcagtgacgaaggcaataaagaagctagtggaatttctgtggatttgatcctgcctgatgacttgttagaaaggattcttgcgtatcttcctatagctagcatcttcagagcaggttctgtgtgcaaaagatggaatgagattgtcagttctgaaagatttctgtggaacttttcgcaagtgctatcccaaaagccttggtattatatgttcacaagctctaatgaagcatttggttatgcctatgatcccattcttcgaaagtggtatgggattgaactcccctgcatccgagcacccaatggggtcattgcttcatcatgtggactggtatgctccatggataacgatgggataagcgagttatgtgtgtgcaatccaatcacgaggcggtggaggaagctggaggagccccctggttcgagaacttgtgagtacagtgcactggcaatttcagccaacagggtgtcacttgcttacaccatctcaattgtgaaatctaagcaaatcccagataatttcttccaatgggatatctcaatccatttatacgagtctgaaactatgatgtgggtgacctctctgaccgaagttttgacaggatggagagctggggatgagagtgtaatctgtgatggggttttgtacttcttgatttattcgacaggaggtgcagctctggaaagccgtcatggtttgatttcgtacaatctttccacccgtcattcccatggtttgctggcaaggagttttgtccccgtaccttgtgctcttacctgtggtcgcttgatgaacctgaaggagaaactggtaatggtgggaggaattggtaaacatgatcgacccgacataatcaaaggaattggcatctgggttttgaaagggaaggagtggcaagagattgctcggatgcctcataagtttttccaaggatttggggagtttgatgatgtttttgctagcagtggcacggatgatctcatatacatacagagctatggagctcctgctcttctcatttttgacatgaatcagaaacaatggaaatggtcacagaagtgcccggtcacaaagagattcccacttcagctcttcactggtttctgctttgaaccaaggcttgaatttgctccctaatctatttcttacgtgcatatgaaagtggtggtagtggtgatattgataatatcatctaattttctgtctcatcttttcattagtgtttagttatattgaattctctttcaaaaaatttgatacaaaatgtacttgcagataaagctgctcattcatgaatcatgacttttaaaaatgttgttctttgcattttggaaaaaagaaaaaaaaaaaatacccaagttattagatgttcgaaaagccggaggcttgtctaattgaaatatatatataaatatacatatatacatttgtcctgccgtgtgttatttactttttcagctgtcctttatatgttttaacaatacttcatacatacgaaaacctggactatttgtcatttttttaatacgaaaagaacagacaaacgtccttaatttctgtagatctctttcaattccaagaaatagttcatcttgatttggtaatccttccatctccagaattggaatctagagatgggaagctttcaaaattgagcaaagtttcaattccaaagtcaatatgtggagatgggcttccatgctgttgtgatttgagtgcatacaatgttactttccctgttctgtcccttctcatagtttcgtttttgtttcttctaccattaaactcatgccacgataaggtttaatggccccatagctgtagtctgtagtagacttgacctgtagtgtacagccatatctacacttgttccaaatccaaggaatattattgttttcaggtcttaatctacagtctttgcactccactccaactatacatagtgaaaattacaggacatccaatgaattgtctttgtgagaaaacaagtgccactatatattgaaactagtttaacatagttaatctataaagattatgaatcatctttagctaatattttaaatggtgtgatgaagaaatactaggattagaagattcattgtgagtatcattatttctggttttaatattatataacttgccggggttaacatagtgttagttggtctgatgagttatattttagcactaggtttggctgctgcaatgtgtgggttggtggagaagtgatgaggtccacacttgtgctttaaaccaagtggattttgcttggtggagatgtgacatttaaagatcatgtaacagcttttccaaaatagctgtcaccttaaacaaattaaataaaaataaattatattaaaaatacaagtacccacctccattactattatttataaggtaatttaatagtatactaactaaattaattctttctatatagtatttattaattttgacatttaaaagagttttgtatttataaatttttttataattatatatattgtatttataattttttatatactattttagcacttgtgctgacttgattcgggatatgttcaatcaacatgatagtgatttaattctttccattcagctgagtagttctagtggtattgattgctggtattggtctaaagagacaagcgggatatactcaattcgaagtgcttataaacttctggaatttgttaatgggaattggccgagtactggaggaatgaaccattggaagcaaatctggaatttgaatgtccctgctaaggttcaacacctgctttggagggtcattccaggctgtctcccaaccaagttacagctctctatcaagcatgttccagtcgatcttacttgtcccatgtgtaatcttgaacctgagaccgtgtcacatgttctgttcaggtacaattttgcacgttcttgctggaatttggcgtcggctgacactgctggtgctgatgatattgagttcagcagctggttttgtgacttgctgctgcattgtaggaaggcagttgttgaggaagcggctatgattatttggcagagctggacggctcaaaatgatctcttgtggaataacaaatcgactactgcttcggaggtgattcgatcggcaaaaactaatcttgacaactggcaaaatgctcaattaaatggttccataccgttacttaatgttaatttgagtaatggtagagagcattggacaaaacttgtttcaacaaagttcaagatcaatgtcgacggggctatctttgcagctgagaatcggtttggcataggcttccttcttcgggatacgaatggtaagcttattgaagttttctcaagcagtaaatttggtgtggtttctcctgagattgctgagattatgggggttaaagaggctttaagctggatcaagacgaaggcattaactgaagtggaaattgaaaccgactcattagttgttgttcaggctattaatggctcgggtcaaatgccatctcagtttgggttacttgttcaggattgtcgtttgttactttctgaactacataaggtttttctttcttttgttaaacgatatgctaatagggctgctcattgcattgcaagacagtcttatttcacgccagatcgtatatttgatgaggcttctgccacatctgatttactttctattgtaagggaggattgcttttcaagttgaataaaatttccttcttctttcaaaaaaaaaatattacttgaaattttttaaaaaatttaaatattttgcaatgttgaaaataaatttaatattttattgtacgcatgataaataattgtttaaattttattttcaacactgtaaactatttaaatttttttaaaaatttataaatggttttaaaaaaaatacaacatacacgaggataaaaaaaaattaaactaaaatattttctgggtaaatactattttggatcctgtgttttgcaaaagttacagattggaccct

SEQ ID NO: 16506 - DNA, 7091 bp, Cannabis sativa
ttaacttaatcataaactagatatttatcaacttttttccgtttattgggcttttggtattggctcactaagagaaacacaccaaggtcggtggataaaggcccaataaaaaagcccataaaaagcagttgtatacttataataatcactttcttttagttgtcaggtgcagcacccaagctcttttgcctgcctcccgtcaaaaattagggcatttgagctttccttttcctactgctgttccttcctatacatacatatatatatacacacacaaactaacttcaccatcttactcctacgaactccggccgaacccttcttccttttttcattctctgatcttattcatcttcgtcttcttctactactaagttcctccatcgctaggttcgtctctcactctatttgtttgtattttgttgcgaacaaactatgctattcaataattgagttattacttgataagctttgacagtgttaggttttgattgtatttatgtttgtttttgttaagttggatctttttgttttgattaatgattttcgtggttggatgtggtcgagtagcttcatctcgatgtggtaaggcatcaatgaacttaatgaaaaccctaggaagtataaaattaattagttttaaagttgaatcgttagcgatatttgtcagattgctttttaggctgttttgagtcgttttgtgtggtgtacggtatgttgattgcttctcctatggttttttttttttttttttgtgttttgtatttgtcttcctagttttcttttatatgcagcagggtttaatgatttttcttgaagttcacaatgatcatagtcttattttgttggtgaggaagtgtcttcattaattgcatatttaatttaagtgaagtggtttggaatgtagattaattggcgtaatggcggatatcataagagttttcagcttaggtcaacctgatcttgacgttgtagatattatgtcccagttatatgatctaatcagttggactggtggttttactggtttcacttgggtcacttttagtttattaggtttcaaatcctaagtccgagtttgttattatctgatcaattatgtggtggtctcattacccatgcctttgtgtttttgtacaatgtgcatttggtctgtgtggctgtatcttcttgaacgtactgcagagttttatttgtttttttgttctcattaaattgtgctttgttggtgcagtttggagtggacctgttacactttctggactaagagagtactgaaatttttgtaactgtaatggaagtccgatcaagcattcggcgtattacatactcacaagagcttgtagatggaaaatcaattcaagtttcttcaaattgtcttcctattcaggcttccaagtacgacccagcggggcatgccttccatcaagcagctctgaaacttcgtggtcatgtggagaaagttgtggacgatggggataagaaagtggctgatgaaaaggaacaaacttccctgccatctgattcttacagcagtaaaggtaaaaagaaatctggtgctgatgacagtcaacaagatcattatgcattgttgggtttggccaatttaagatatcttgccaccgaggaccagattaaaaaaagctatcgtgagactgccttgaagtatcatcctgacaagcaggctgctcttcttcttgctgaggaaactgaagctgccaaacaagcaaagaaggatgagattgagagccatttcaagtccatccaagaagcatatgaaattttgattgatcccgtgaaaagaagaatttatgattccacagatgagtttgatgatgagattccaacagactgtgccccacaggacttcttcaaggtgtttggtccagctttcatgaggaatgggcggtggtctgttaatcagccaattccatcttttggtgatgacaagaccccaataggcgaagtggataatttctataacttttggtacagctttaaaagttggagagagtttccacattctgatgagtttgatcttgagcaagctgagtctcgtgaccacaagagatggatggagaggcagaatgcaaaactgtcagaaaaggctagaaaggaagaaattacaaggattcgtactcttgtcgacaatgcttataaaagagacccgaggatccagaggaggaaggaagaggagaaagctgagaaacagaggaaaaaggaggccaaatatctagcaaagaaattgcaggaggaagaagcagtgagggctgctgaagaagagaaacgtcgaaaagaagaggaagataaacgagctgctgaagcagctttacagcagaggaaggtgaaagaaaaagagaagaaactcttgcgcaaagaacgtgcccgtctccgtacactctcagcatctgttgtaacacagaaatcgttcggtatatctgcagatgatgtagaaagtctttgtacgtcacttaacacagagcagctgaggaatttgtgtgacaagatgggtgggaaaggggaactggagattggcaatattcttagagatgcacttggatatagtagcaatttggaggagactagaaaagaagaccagaagaaagctgaatcacagaatggctctgtggatactaatggagccactccagcaactattccttttagcagctctgagaagaaggaaaaaccttggggcagagaagagatcgagctcttgagaaaaggagtgcagaaattccccaaaggaacatctcgaaggtgggaggttatttcagactacattggtaccgggagaactgtagaagagattctgaaggcaaccaaaacagtgctcctacagaagcctgattccgccaaagcttttgattcatttcttgaaaagaggaagcctgcaccatcaatcgcttctccactctcaacaagggaggaagcaggagtatcaatcccgcaggcaacagaaaatggtgctgcacagacagaaactccacaagaattaccaaacggcggtgcaaacacccagagtcctaatgattcgagttctgttaatggtgtaacatctagttcagagcaagatgtgtggtctgcagtacaagaaagagctctggttcaagctctgaaaaccttcccaaaggacgttaatcagcgatgggagagagttgctgcttcagttcccggaaagactgtgaatcaatgcaagaagaagttttccgtaatgaaggagagcttcagaagcaagaagactactgcttagttatttagtttttcggctgcaagacaaggctcgagtaattttgtcattgggtattctaatattatttcaaattctttcaagctaggggattgttcagaggccacaatttgttccccctagctctgagggttcttcttgactccggttactactgccgtccggattttgtcgtaaagccttgaccggttttacagctaatttggaagagggagatttttatttatttggtatttgtttcttcactatgttttatacttttacagtaatattagattaattaattgcattgtactgagagagatgatggccactattcattattatgaaaatgagagagaccatattgaaatcaaacaaattgatgttagttactctttcctttagttatccatgtctgattttattgatgagcattatctcacatatacataaaacgatttacttgaaacagtgttatgcagtaatgactttccataatagtaaaattctcaatacatttaactaagatatccgagagagagaaattaacgtttacttcttaaattgatcagaattaaaaatggtaagataagtaaagcaatctttcttagtcttcttctctccttaaattattatcatgttggggaactccatgaatcttttatagtttctgtccagccaagaaacgactgtacagatccaatgcttctcgtggcttgtattcaggaacagtgtgtccagatccctgaaacccattgaacaatcaaacaaaattgtaaaaagttaaacactgttaaaaagataagatactaaagaatgtcatcatagtgttgtggtttcaagtatggacctttacggttgcaaaggtgagattatgtgcatagccctgtgtgtacctgtaaccaaagagaaagataaatcactttacattcatggggtttccattcttgttcataaaaatctttttccattttggtaaagaaaaaaagatgtacccggcgatttgttcactggagagccaaggtctccattcatccacaacctcataacccattgatcttgtccaagcttcactcccggtgtatggaacacacatgtcgtgatcgccactgttacacgaattggatcagtttattttttttttcagagcttcttgtttagatggcattaggcttcagaaaagtacctgaagataagcgctcggtatccccgagacgtgaggtttttgtggtaaggaatcatgcttccagcatcatggtaaaataagattttgtttgtacacaattcccagctgcccaccaagctctcctgcttgtacaacaatggttaatactactgatttcaatgcctgaattttattttttttgagattctggataatcaaactacctcagctacatgaagtgcttttctgactgtttcattgttcaaccacgcggtagcaacctcatcactctgtaggaatcaaatgaaaaaaactagagaatgaacacaaatgaaagaagtaaactcattattttttgcaggagcataacaagaataagactttttctcttagcctattcagagacctaagtaacttacagtgcatggaacattgccactattaagaagctcaggccaagttgggactcttccttctctaacaggagctctaaagggccatgcacgaccgaaaatcctcattctaacagcagaaggcctttcggtctcacctaactgtctgaagctggatggcagtttagaattagtagtagctgtaacctctcttaattctggttggtgataacatggttcgagtatgtcgtatatgttcaatccatctatgtcctgaaattaattgaatcttcaaacaaaaattctaagaaaattttctccacacttaaaatatgagtagttttatgttacctcatcaacttttgaaagcttgctctgacaactatcattgagaggattataaaagtttcccttacactcagttgtcacctcctgcaattagcacaagattttgggcaaaaatttcccaagaaagtgagcaagattcttaatgtacttatttcatgtattgttattgttattgttatgtgatcaatatcaaatgaggaactcacctgaaaaagctcatctgatatgagtcccattccatgggcaaatggaaccaaagcattaccatcaaacacatcatcagttactccatttcccaccagataaccctgtgcataagtgaatttaagttaaaaaaaacaatgtatgtgaatgagcttaaactaagtcaatctgaagataccttaaagttaagcttgggtgttgcaccagcatcaagtcctgtaacaaatccaaatacaaagttggagcttttagtcttaatgtcaaaacaaagaaagaaaaaaaactaccccttttgttgttagtacttttaacttaaaaatacctttaactacttcataagcaagagttggcacataaactccagcatatgattctccagcaatgaagaaagggtttttaaggtactccggatagagttcaaaccactgtttgcaacataagaattagtatttttggggctattcattcatcccattagccaatttttcctttaaagtaaatattgtaccttgagaagaaatatatggctatccaatgcagttttcttatcaccagttctatagtcactactattttttgagtaagataacccaacaccagcaggagaatccaaatatataatattggaaacctgagaaagtgaccaaagaagtgtaaatagtgtaatgatttgaaactatatattaaacttgttctttcttgatacataataataaaagtcaaaaagtttcaacctttgaccagctgtatggatttaagtggagttggggaaagcttccatcagattttggtaattcaaaattaaatgggcctgcaaaatatgtagtaaccaattgtaaaacaagcaaatctgagtcaaagactgcatttttaagtctttgcagcataacccagttggtaaaaaaaataaaaaatcaaaacttgatataaaaaaaaggtcaactagtctatgaattatctaccatgttcataaacaaagccatcaaagcttgaacaccctggcccaccattaagccaaagaaccacaggatcctcagatggttttctctctgattcaacaaaatagtagaacagattcttctcatggtcttggtcaatggtcacataccttcaacagatcccaacacccaaaaagttatagcataaaaactgaagaaaacccagtaattaaaaagctaaaaattttcaaaaattgaaagaaacaatgaatgcaatagaaacaatacccagaatagtgtttagaaggaagagtgcctgaaaagccaggaacttgactgattagagcattttcaggagctgaatatgttaatccaagtctcatacttagtaaagctgaagataataacagcacaagactgatccttataatagccatggctgcttcaatttcaatttcaatttcgtggggactccaatattttaggaaaataaaaatctaatactagatgaaactgttacataatataaccaaagtgttaagtatttatagtgaaaaagaaaataaactcatttttatatatgttttttactttcaaggcaagataacctggccctgaaatagtggaaggagctctcataataaaaagcaaaggagtaatgaacgctgcctcatcttgaagagtggtaatgagtaacaggctcgtcattcaaggtgttagaaggtccaatagttacatgacacgtgcacagtcatgagaaatgtttttagggagttattgttgcagtatgggttcacataaatttttatttt

SEQ ID NO: 16507 - DNA, 5036 bp, Cannabis sativa
  modified_base (1122)..(1128): a, c, t, g, unknown or other
aatccaactaaataacataagtatatttagaaaagtcaatcgtaaatgtacaacagcaaaaactcaattttttttttaatttaatggaatatattttattatatataaataaaaagtgacacatgaacttttcataaaccattttatttttattaataaactattttatttttaatataaataaaaattcaaccatgaatttctcataaaacaataattctgttatatatgcacactttatataaaaatagatatattgcatattaattaataatataaaaaatttataatttgccactataaacaataattaggataattctccctatactaataataagagttctggaaagtttttttttttttttttttttttaaatttttgagaataaatatgtgttcattaaaacaaaataataatagaaacaataacaatgaaatgtatcatgtatggcatctataatttggtacagatttatgaaaaagagtaggtatgaaacgagtgtttacttgttgtaaataaatgtcttttttattaaagggtgaaactctttaaaatatatttagtaatataaaatatgttaaatttaattttgtaagagtatattctgttaaaaatataataaaccgttaaatacataataaattataattagatagatatttatataacatgcatgtcagattatatgaaattcataatttaattgtattgaaaacaatattgttcacattgttttgtagtgaaaattacatgttgtttgttataaaaaaaaatacatgttgtttatgatatagtcatatgttaaattatttcctccaagtaatatgttttcttgttaaacaaatatacattttcttaatataaaaataggtaaagaataatatttttaaggagaattattttattttttatttttatttttatggcttaggtttctctgatgttgcacagtaggttgcgatttaagtatgtaaaaaaattactttgaaatgtaaaaataaaagaaagttcatatttttaatatacaaattaatggttctttagtaagttatttttgtaaaaaaaataaaaaataaaaaacataagggcattaggtaatacttttattttttaatttnnnnnnnacaaaaataaaagtaaaatttgtgtttttaaaatttattttaaaaataaaattgtgttctagaaccacttttattttttgattttaaaaatagaaaataaaagtgtgttctataattttcgttttcatttttatttcttgcttttattcaagtcgggttcaggtgcgggtctgggatcggggtcgtggtccgagtctgagactgaagccaggtccggagttcgagtctaaggtccaagttgaggtcagagtctaaaatattaattaagaacaaaaaactgtaaaaaaaatatgaaagtaatttttttttgtttttaaaatttttaaaattttgattctcaattaaaaaattaaaaagggaaaacagttttataaaacatgtttttaaaaaatattttcacttttctaattaaaaaacaaaaaattaagtaaaaaaaatattaccaaatgcacccataatttttttctgtttgatctattttgataaaaatttagttcatatcattaaaaaaaagattgaagcacaataagattaaaattaaaaaaaaaaaatacaaaaatagtgtaagattatcatttacaaacaaaatcactaaccacatcataaaaaagataactaacaagactgaaaaaatatcccctcaaaaattaaatataaaaaagataaaaatagagaaagaagaagttgagggcccaattaaattttaaaagtaataaattataaattaatttcaaatgaattatctcattaaattaaaagaagttggtaaaacagttgaaacaaaattattctttcttcttttaaaattattcatgaagagcaagaatatgactattaaaattagtatttgaacattgggaagtgatctgatttgtcagggcttttccgtacacttaacaacataatacaacagcaacacatcataactcataacacaactttcatggttgtcatgcttaaaaaaacaccacctattatcacaagtcatttttaattttggatattcttcttaataaaaataagagagagtgtctgcagtctagcatctttctatgtgttaatatcgcaattggtcaaattaagtatcaaatccacataatttaatgtaataatttttaaaaaatatcgttaaccaatcgtaaggcgacatgtctggtgctaggcaccactggtgctcaatagtaatgctctaaagataattagttaaaaaaaagcactaattaagtgtgtgtgtgtgtataataggggtgttttactattattcattgagatattatatatattccttttagcattgttattaggtaccagtaatgtttattactacttagagatgacgtcttataaactctcactctatcattctaaaattcatttgaggattgaactattgcagagcataattttagagaactctcctcaagcattgagaccataaacatatttaaatagattagcatattaccgctgaaagggagtgaatcactataaaattctcgtgttcatctttgttaatttttttttttttcgataaaacgatttactttgattgacatacttgtgttcaccctgttcgtttacaatattcttaaattctttgatgaaaaatcatgtcataattgtaacagttaaaagatacttttgttaccactttttttttattaaatttagatgtgtaacaattacaaatgttaagagagttctcgccgcaaatatttcctataaaaatatataataagtaaaaagaaatgtagtcttttcaattgcaataaaggtgagaaatgctaaaaggcacagtggtgcctagaactctctcggtgtcatatcgctataatgcaattaagtatcgagtctcatataacttaagataataacttttaaaaaatgttactaaccaatcgtgagaatcatttcgagtcctttataattgatattacctttattatataggttttcatctaggactctcttagggtttaaaatctcttaatcctgagacacaccttctcttaactatagtcaaattaagtttaatatgcaaaataataataaataatatttcaaaataaatatctaaaaaatgataatttgttgaagatattttttaatgacaggtgctagcttgttttcgtcatgagtagcacgtgctggcatgttagtgaggagcacatgttgatggatcttcttgggccgaaatggtgttcttagccttggtccaaggtgatgatcttggccttggtccgaggtgatgatgatgttggtgagaatatgagatcgaggtaatgcatgagtgattagtaggccaatgtggtagtatgagacaaggtcgagatgctgccttcgtgaggaggttgagatgatgttctcaactttggtccgagatggtgagatttagaatagggtgattgtgtttgagctgagatgatgcacttacgaggatgtgtatctcagctagggtcaacatgatgctcggagtgtgattctgagtcttggtccgagatggtgagttgtagtacgagatgatggtgtttgaggcgaggtggtggtgtttgagccgaggtgatgcttggagtgtggttctcggctttggtttgagatggtggactttaatgtaagttgaggtaatgtgcatcttttggaaccaaagtgaagatgtttgaggatgctgagataatgcacttatgaggatgtgcatctcggctagggccgagatgatgtgcatctcgtctaggatcaagatggtgccctaataaagagtacctcgatcttggggaaggtgagttgacgtcgtgccaccacctagatgtaggttgaggtgatgagacatggtggtttcaccacctaggtgcctaggtgaaatgttatcattgtgattattatttttacaaaatcaaggtataacaacaataatgtgttgttggttatttttgagttgacacttaatagtcaaaaggatacgggtgcaataaaattataaaaagtacttttgctactattttttttattaagattatatatatataacaattgtaaatattaataagatttgactataaatattcttactttttttattattgaaaatatccctatttataataagcattgtgcctattttgaaattattgaagtaatttacaaaactaacatggttcatgtagtggcagaaaaatagtaatacacacccacgatccaaaaagcatactctcagcctaggcattttataaatcaatgtaggctaataagcttaagtcatagatacctacattcattaacaaagttacatctacttaaaaatgaagtcaaacatatgacttgaaatctatctcaaacaattcactctcaattgagaatcagtctataatcttttaaatcgtaaagagaatatcgagtgccacatcactccacgacctagtgttgcgaaaaataacgattttattttctaaagaacgaattttatttaaaggatcgatccttctcaaggaatgatcatcagatatctgttatcttctacattctatatcctaggctctacacaatgcatttattctaaaccttctcttattattggagcttcactttaatcttcggtattttgacgacaattatagctaagtctttctattttatttttagtctacttgttataaattacgtaactgacttacttgaccgtcagaatcctttaaccaacaccaccacaatgtctcaaaggctttacacgcgattttgttttcttgtattgtgtgtagattatcggtgtccacctacaattaacgtctacaattcaaaataattaatcatacacataaaaaataaacatgcaattaaatatttgaatttatttttcggaacaacttattatttcaatttttcaaaagtagcttaaatatatgtaaggctaatta

SEQ ID NO: 16508 - DNA, 3950 bp, Cannabis sativa
aaaaaaaaaactctttcaatatttttttaattttcagataattttaatgcaatataaaatataacacccaattgtagtggttgttcccgtaaatgtaatagatcattttcccgctcaaaacagaagccatctccttctccatcatcttcccctcatattctcttctctttcacatcgtcactccaagattgcaagaacctccttgctcgcccctcttccacctccaaccacaaccaccctcacgccactctaggtatactcacctctctctctatctcatgaacttcttttcttatgtctctctctctcacagacagtgtcatataattttatgtataggattaatgggaatcagcagatctttttctattaatattttataacgtatctatatctgcaagaattatattatgtgtgcatgggatggaatcattgggttttgttctcttggtattgaaatgataaaatcattttaaaatagtatgattttttctgtgcagttatacaactaaatagctttgatgtttcttaatatggggaagttggtttcgggttccacatttgggaatatgatattgcgtatacatgcatatataatgtttgataaaatgattgtgtgaaaaattagtttataaacattcatggatgatatgctttatgggtcatcatgtggtatattataaatgctttgtatataaatatatatatatatatatatatatatattaagtcttgtgaattcatcaactttgctattagtagttgctgattttgatcaattcttttatacttcttgcttcttactgaaatcacgttccattttggatattaagagtgaaaaaaaagcatgtattctctgtgattgtaattgctatatcatattatactaagaagaaaaactaataagatagtgtttacctgctatgaggtgcacactacgcattttgtattctaaatagaacaagagcatgattctcaaggagtctgtggcagagttaactggtttatttattggtggaggttgtcttatgtgttttgatgagttgcttttgtgtgatctagattatttaacattattaatgatcttgcttgagaacccggatgggacaatttgattcttttttgtaaatttatgattatttttatatttgcccaagaaaaaaattgtaatctttcaacaatatttttattgttaaattttattttcccctcattttccttttttttttacccttattataaccatttgtttgctccatcgtgagtttaggttcaaattgtatatatttttattaagcttaacctttggtcactttaattcctgcccgtttcccatcttcatttcagtctaatcctccatcttgaaagtagtaacgatggacgtcaatgaagtcgatgacgatgagtttggattctcaagaaactactttctggcaaaggagtttaagggttctacaaaaaaatcgaatcataagctctcagacattgatcttgttgaggaacaggttattctcacttccagttttttccttgtgatttttaatttgttttttttttctcagagcaaattatacttgcaggaactcagaactgcggcagctaacattgagcccaaacatgagaaagaggtcgaggaactagtgagaagctataggactttgtaccagagatgggttttcaagcttaggtataacatgttatggggattgatcaagaaacaactttattttgttacgaaaaagtggcgtctttattttgttatattgctttttttaggtcgtgggctagtatatatttgtaggttatagctgcaattcttcctcataattactgttatttaaagtccaagtattacttgcttaatattagttgtgtttaatgttctatcatatgctagagtctagatagggaataatatccgaccacaacccaactacttccagcatgttggaatgtctcttagtttacaggatttagttgattttgatggaacatcacacttgacaacattcttatcattctattttaatattcttaggtgtggatttaaccttctaatgtatggatttggatctaagaaagccttgattgaagatttcgcttcgacttcattgactgaacattctgtatttgtaatcaacggttatcttcagtcaataaatataaaacaggttcatatattaagaacattattcattgattcaattcattattagttattataaaataggatcaggcaactgagttttgaggcaaaatggtgctttgctaacatacattgcatgctctaaatgcaggtcttgattgccttggctgaagttctgtgggatcaattgaaggccaaacgaaagaattattcaggtaattcatcaagaggaggccagcagcctttcaattctagatccatagacgatcttcttgagtttttggatgaaccacaagtcgaggagaaggaaagttttatatgcatcatcattcacaatatcgatgggcctggattaagagactctgaaactcaacaaattcttgcacgcttagcttcttgctccagtatccgtgttgtttcctccattgaccatgtaaacacgcctctttgtaagttcgtcctcaaacttattctattgtagagtttaataactagctggagatgatctgcctttcacatttacactttgagtttagagaaatcatcatttgtagatattgacatattgcatagtttggactgaataggaaaagtgtttgaattcttaggctgttttcaggatacaaattttcttgctattgtaactatgaatgttgaataatgttgggggtgatgaaggaaacagtgtcagtatcttttaatgtacttcagcgaaattcattacaaactgcaccaaatgaaaactagcaccatacaagcatggatgaaattaaatgacactatcttttgtttgtctttagtgtgggacaagaagatggtccacacacagttcaactggtgctggtaccacgttcctacttttgcaccatacaaagttgaaggaatgtttttcccactgattctggcgaatggaaatactggtcagagtgccaaaacagctgcactagttttgcaaagtttgacacccaatgctcagagtgtttttcgagtccttgcagagtatcagctgtctcatcccgatgaagaaggtaattttcccaagcgttcatctcatatctcattcctcgttttttgtttgccatccactcgaactcacatttttcgtcacaaaatttaacttcagggatgccagtcgataatttgtatgctacatgtcgagaacgcttcttggcaagtagccaagttactcttaactcccatttgacagaattcaaagatcatgagttggtcaagactagaaggcattctgatggacaggactgtttgtatatccctctcactgcagaagccctggaaaaacttctactcgagataaattagttgtgttatttttctttcttgtatttcatttcactcaattgtaacactaacatataattattgaaatgcagtgtaagactcagattttgatatcagagtatttgaattcatttcttaatcctcaacaaccaaataagtagttgagaatggaatcttaccaacatatataattgatcgagtggaccaatttggacttgggtaggagtgtgtttttggcttggttctaagatttttgaaaataaaaaaataaaacaaataatgtgatgtatagaatttaatcaaattcccctaagaacaaaaaaagattcaaattactagcctcctctagactttagttagtgttgctacctatttaaatttcacaatgggagactctctactaagcatgaaagcataaaagtgttgatagtagattaggtcaacaacaaaagctcttatcaatggctatgatttgtatataggatgattgaatggtaaagaagaa

SEQ ID NO: 16509 - DNA, 3365 bp, Cannabis sativa
aatttactatgatagtgcataaaatgggtgagactcgtatcaaattgtaacaataataattacccactcaatttccatctaggtatttaacaatgccccttaaacatgtctctctctatataacataatcgttttattgtccattagtttcgatatcctcactcgtctgtcttactttgaaaaaaacaattacacattcttaataacattatggtacgtatgtgtcctataattaatttatttgataatttgtttggtgatgatatgatcagtacggtgtactatggtgagtacaaatgttatggtcccggtgcgaataggtcgaagagagtagggtggtcacgtagcctaacaagtgatgaagctgcctcatatttgaccaaagacatgattggagggagagattggctcaggccttcaccaactcgattcaagacaccctctgctattatatctgccaaggatttaaacaatgaataattaaaaaaagaaaaacactattatacaacttacaagattattgttccctcaaattctaatttagcacacctgttattgcttcattcaatatgtataactattatatatctatttatatgtatatatatatgttatttatgtataactattattattagggaacgaatctacacttcacgggatcatttattgtaattttaatttttaagttgctaatctttttgtttgaattatttatatataatataaaattaggaacattagaccatcattatttatagatagagcatttaaactcattacaagaactgtaataacagctcggtcacatttgtaatatatattacaacttcaaattaatatataaccgttaactaataactacctctaataataaagtagtgttttctaactgcaatcagttacaacgattttcttatctcaacacagcttatcatcagtatatatatctatcgatcactagtagttacttacttctccacacacccactcacactctatattaattaataactaaagaacatctcccataccaaagaaaagcaagaagaagaagaagatcataacaatggatacgagtgagaaaccaataatggtggttggattcgacgaaggccagaacagctgctatgctctagagtggactctggaccggttcttccttccctatgctcccaactttcccttcaatctcattcttgtccacgccatgcgtccatcttcctccctcaatctcattagccctagtaatataacttattaacatccatatatataatccctattaattactcttgtaattcaaatcccatcatttattttgtatgattttaatatgggcattttttttttatataaattgatcttggttaagccgaggctgaggtcttgcggtctatcgaacgtgatttgaggaggataggtgagcagattgttgggaaagctaaaaaaatttgtgccactaaaaaggtattataaatatataaaaattaaatgaaaagaatcttgctttaatacaattaagtacgtttattactctatatgtatcttataattagttctatgttcttggtagatgaaagaattttcgatggatgttattgaaggaaatccccggaatattctctgtgaagctgtagagaaaaaccgtgcatctgtcttagttgtgggcgctcatgactatgggcctataaagaggtaattcaaattaattaatgactatataatctgtatatcgatcaagttgttcttgaatcttgatcaaactatatataataatattattattacagagtggttttggagagcgtcagtgactattgctttcaccatgcgcaatgctcggtcatcattgtgaagcagcctaaaataaaccctaagggcttcatactacacacataatgaccactttattagccttcaactgattgaagtgatatcacaataaattttctcaagtaattaataataataataataatgttctttctcaaaagtgttgttatttgtttcggggaattcatgggcttgtcttatttcacgtatgtatttatgtttgtagaaattttcctagctagaaatctaatatgagtcactacggtattaatcaattagtttattatcttgattgtgtttttgtatatttgagatttaagttgtgaaagaattaattttgtcatgttctcgtaatcgctttcatttataatggatttcttcccatctttgttcataaaatacgccaaaaattatagtcaaaaaaattgatatgggattaaacatcacgatattaatcaagtcgtcggttcagtaaaggaaaaaaaataaaaatcaagtcgtcgtctattaaaatgttttgtattaaaaaaattgtgtttagcaagtaggagatataaattaaaatgaagagaacgtctaagttaaataaagacacgcattattaatagtacgttatagcaaatagcaatggtatttgacttggttaatattaataacaatataaaattgcgtctcttttttatcacaattatttttattcagtctgaattgagatatataaattatttcatatatacccaaataatgcgtgctccacatttcagcagagacagctttatttgttttttaatttttttggattgtaaagaataaaggaaaaaaaaatgtcacatttattggtggtgcgtgttggaatgaaggttggtgaaaaggctagtattaggccacctcaccttgaaagacttttatcgctaaagaatttctatcatattttcgatgaaaaaaataaaatagtactcttcagttctttgggttttgtataacatgtgtctgttaattctctataaaaacgtttttcaaacatattcgatatttaatctatcattgggtactactgaaataatataacgaaaaattattttataaagtaatatttaaaagatttaatgtcactaatatgacttctacatgtgtagaacttatatattcttaatcttgtaaataatttcctttcaaacaaaaaaaatgaaaacatcttgtaaatactttttttcaagataactttaaataaccttcaaacaaaaataataaataactttagataagtcccccctaagatgaaaaatctagtttggagaacttgtatggactgtcttcccacgatggttcagctccggtctaagtatgtggaggttgcaacattgtgccttgtttgttctagtgcagatgagacaattcttcatgccttggtgggcccgactgctgcaacatgctgggaaagaactggtataggcacgggtttgcaccagaatttcagttttctggtttggtgcacggatgtgtttcagcaggttgataaagctggaaaa

SEQ ID NO: 16510 - DNA, 5027 bp, Cannabis sativa
cgtttgataaagtttgatgtctgtacgagataaggagatctcaaccgttgatgggtgtgttggtggcggtggtggtgggaatggaggtgatgatggtgatgatgatgaagatgagagtggtggggtccaagaaagggatgagcaaaagccgaggaagagagccaaagggcatggctgttatgggttttcaatgaattttggaaaagccaggaacttggtacttggtcaattcaccaagaccacaagaaaaccctccagaaaaacccatataaaggcttcttattcttcttcttctgttcttgttgctgcaccaaatgcttctacttcatcttcttcaggtaaaggttgttgcttatgtatcaagaaatctggaactggggaatcatctttggggtctcaaactagtgatcccaatgacccaacttttacttatgatatgttgaaagttttgattgagaggaatgatttttattcgaaagaatgcaattcccatttagatgtttctgaagtttcatgttgcagagaatgagagttaaattcaatatttttctgtattataatttgttgttgatcaaaatttcattggaagtaataacagtatagaatttttctccaggtgtttgaaatagattatactaagtttctacattgagtaaagttttatgatgtatagtatccctttggagatcatggaagacctgtttttgagtcttcactctttgatgatcaattcagggtgagaatgaggaaatgtggatagattttgtcacttgttttgattcacaatagctatggagaaagtcgaaagaccaagcttggtcataagctgtttttgagtttttctataaccataagtatataaaacccggatgcaacttttgattatgaaatgatttagatttctaaatctaaagccattatatatgtgtatgtgtctgtgataattgtgattcagattctaataggtgcagctcaaacggtcatatttgtgagtttaatatgtgtggattcttgtattgtgttgttgctcctgaagaattatttgaaaacatataggatttgatatctaccacattagggctcataagtgcagttcaaccagtgcaattggattatgaaatgattttctttttgttgttgttgaatgacatgtcatgacatgactaagcttaacttctttcttgttgcaatatgggcaagagtatgagacaccataccacactgttttatggatgaacctatacctatttaatcagatgtgtccccttaatagggaccactttgtgtttgtggatgatactaaattcttagcagatggatgatattgattaggaattctctattgttttttaaggtatttggactatagggcatactcctttttaatagcaaattaaataaggggacactgttggttatttcagatccatgaagcttatggtagttatcattctactcactgttggtttatggttgattgttcagttgtgtaatactaactgctggtgtttaaattttacctgttagaacttttacaaagggatttcgattacactaatttattacattttcttgatagaatttattgatttatttttaattgcccagttgagcatttaaatggttagaattggagttgagtgaatatatgaggggaagagtttgaattttgaaatcagtgcatctgtgtatgtgtatctgagccaaattagttgatagtttattacttggtgaactaaccaagtaactcctcttttcacaacttgattgtatacacatgttgaagatctacaagtattccaattggtaaacaatttccttgtgatttgagtttgaaaaagaaacatagccatacattttgattttcttctaatatatgttgaaggaaccttcccacaacctcctatcataactaaaacaaaaaaaacacattgtatacaactctaccaaccaacttgtctgcacttgggattaaaagatgacacaagattataccaaaagcataattagatacaagaaagaatgttcctcaattacaaacaaaaactcatgtggttgaaagaatgagaatgatctcacacatagtatagctatatgtactatatctatctagctaactattcctcagtgtcgttttaattaccttaagtgataacctttatctctacctcgtttgacacgatgctaactaatcaaagctttgaaaaagacaattgacaaattcaatgctaacaaattattattagacacaaacaattctataaataaaacatctatatatatatatatatatgataccagtagtacttaacaccatctataagtaatgtcttgtgattggttagcaattattaaattatatgagattaatactaactctacaaataacgatataataatacactgacaattcttgaatcagtgtattttgtatgttgttcggatttgggacaccactactactaccacgatgggggcttactcaaattctgaccttgagcttaacaacttaaagtcccaaccactcgtcacaagtgattaatttacgccgttaaaaattattattgagtatatatttgtaccctgatttgtacatctcataaaaaaagatttgggattttttattgggggctgagataggagacaaggagaagggtgacccatattctacccatgtcattgttgggcaattccttataacatgcacactcatccttttccacatacacttactctttagtgcccagattcgttcagtctcagcaaagataaaagagagataagaatgggaagatagtaaagcatgtaatatggatcctaagtgggccccatattttgtttttttccttttgggccttaaagtgggccctacaaataaaggttaaaataaaaaataatatagtaatgatcatatgctaaaattatgggccgaatctgatgttggttgagctgcccacaagaccaagagacagaattatagttgagataatagtataattcgatgaaatctgatccacagttgagttaacacaaacaagatagactgtcgcacgtgactgcctgtaagtgccgtaacgcaatcttttgttggcactcgagtcaatggcatgggctatttctgtatctactctctctctctctctctcaaaaatagtaaccttttgctattaattaaacctttctcctttatttattattatccttttcagacccttctagtaacttattattctaaacccaagttttgagttagtatcgattcaatactacactcaataattaatacaatttttgcttctaaactatgactcttatgaaattgtgttcctgtaatatgatcaacagcagcaacctaaaaatagttcaaatcatgtccattaattctatcatattaaattgcttaatattaattctttagttaaacaaatagtaaaactagagttcaatcaattaatagggcacgtgtgtattttactttttttttttttttttttttgcaacttgcagaaaaaggaaagagtcatgttaataattactgtacagtaacccaatcccgattctcctaaattgttcttttctgttttgaaagaacaaaactcaaattcaatagtaataataataaataaaagggttttttgcattaaagttgcagttttttaaatctggggttcaacatatttaattgaaaattgatcaagtttcaatcttttgtattttatttgtttaattattatatccatatttaccaaaaaagaaaggtctttggagtatatgctatatatgggggtcgtcaaccaacgctgttatccatctttggaaaccaaaccgctcttccgacgtagttttggctttttcactatccataaattgactcactttccgactttggagagtgttgcctactttattattattattctacaatattatattattatacagcgaaaacccaattgagtaggtttatcgtttctctgtgtatctgaattattatatacatcacacaccatataatatatttttatatatatattgtattgcttagcacgggggtttgatggggagagcagtggcgaagtgggaccacagacagcagaagcggtgatcgatattttgtgggttttccaggaaatgggaatttgagattgagagtcttgttgggacggtcgggaatttcatttccaaactatattttcactctgattttgtgctattcaaatatggttgaagctgaagattactgggtctgagttaaagtggggttctttctttttcttcactttgtttttgctttcagctgcttcttgaccaggttagactttcataagacatatttctttttctttctttctttgtctcatattttaattttcctaccttattgatcaactgtttttctttagtttatgagattagttgggtaagtcttagtttgttgttttttgttgcgaatgtctctcttcttgctatgatactggaaattggtattgtttactgtgtaaattagtagctgataccagtttttatagtttgttattatttgaattaatatgattgttttagtttgctggagtacttttagatttgggtgaagtttttggatcaaatcatctggggtgtcaaggtttattataatattatttagctttatagaatctaagttatattattttcaaaatgagcttgctaatggtatggttttgtatgctatatcttgaaactttgttggttttgttatgatacgtttgttcttaatttaaagttaattttccagcttctttgaagatgtcttcttcaagacccagccactcgtccagcaattcggggcgatctaaacacagtgctagaatagttgctcaaacaactgttgatgcaaaactccatgctgagtttgaggagtcaggtagttcatttgactacacaagctcagtacgtgttagcaactcagtttctgctgatgtacaaccaaggtctgacaaagtaaccaccgcttaccttcaccacatacaaaaagggaaactgatcca

SEQ ID NO: 16511 - DNA, 7426 bp, Cannabis sativa
tgaatttgggggttaaaaaaacatattatggacattaaaaatttgtcttacattgtcttgtagtaatcgtcacacttgtattttagtcaaaaaaaaacagttgtaacaactaaacgataacataatacaaagccaaaacaagcaacattatatcattttgtatgtacttgcttataatcagcattatatatacatagatataaactagtcaccatgtcaagcaaactaaccaccaaaaaaaaaccagaaaaaggggcttaaatttaacaaatcatgaaactgatgatggtaaagagtgaggataatcagaatagtactaggaggcgtcgggttagtatggccgccgacagtgaagctcaagcggcgttaaggtgtgttaagagacgaaaaagagatattccaaccgatcaagtaattaattgtgatgataacaaacaggggactcaagctgatgatcaagctcctcctgccaccactactactgtcaaaagaagctcgaaatatcggggtgttagtagacatagatggacgggtcggtatgaagctcatttgtgggataagctctcttggaatgtaacacagaagaagaaaggaaagcaaggtaaagatgtgtttataatatggtttagtttactttctttgttgttacttcaactatttgattctctcaattgcttactgactagtgttgtttacttgttgaaaatctttgtcccaatgctttgatgttatgtcttcggctcaacagtttaccttggtaagtaataaacagtatttaatgtttcagtagaaagttcagagctttttgttatcagatactcaaggccagccctcgaaattgtgaaaaattaaaatattaaataataaaaaaatacgacaaataaagagattaaaggatcaattccaaacatttactgaaatttatatagggccttaaaatttaattttattttaattcttatatactttaggaccgacctgatgagacttagtgttcttgtttatacttcaggagcttatgatgaagaagaatctgcagcaagagcatatgatttagctgcacttaagtactgggggacatctactttcaccaatttccctgtatggaaatggttttttattttttatgttcattatgtcttatctaaatttatgaacatagtaaattaatgaaaaatctttggttggtggtgatactgttttaacagatatcagattatgagaaggagattgagataatggtaactgtgaccaaagaggagtatttagccactttaagaaggtacttgtttgtataaaggttatcttgttactcaaataactcaaatagttttggccatttttcttactaaaaagttacttctttctggtgttgcagaaagagcagtggtttttcaagaggtgtatccaagtacaggggagtcgcaaggtgattatcacgactcgatgctatttaataaatgataaatattattttggactgtctgttttgtaaaaattatcgatcaaactttgttttgttaaatgacatattaaaccttgtattttcaaaaatagtacaaaaaatactctaagctcaattttgatatttgttttaatataaccaagctaaagtcagattcttctatgaacaaattcaaaaaatgtaattagtttttgctcaggtactattttatacaattttgaaaaatacaaagtctgaattgccatgtaataaaacagaaagtcaaattgataacttttataaaacacgggatttaaaatagtatcaaccatataataaaacaaattctcaaatatatttttgataattgttgtatgcaggcaccatcataatggtagatgggaagcaagaataggaagagtttttggaaacaagtacctgtatcttggcacatacagtaagttgttgtacaaatcttcatactgtatatcatactatctaatatgaaatattttgttaagtgccttagctcttgctgatcataggtacccaagaagaagctgctcgcgcttatgacatagcagccatagagtacagaggaatcaatgcagtgacaaacttcgatttgagcacttacataagatggttgaagcccgaagcagccaccaacccggttagcggttgtgaatctttacccgaggttataacagaacctcaaacactccaatccacagccaactacaatacaccaacagatcaagattacatgaagtctaataatgattacttgaataagtactctctaactccaccgaaacagcaactagtttgccaaaccaaaagccctctaattggcagtagtatgactcgcagcaagtcttctccttctgctcttggcctccttcttcaatcttcgatgtttagagaattggtggagaagaactcaaatgtctcagagtacgaaacagatggagatgagccgaagaaccagctgcagggtggctgcagcagtgatgatgatgagtatggcgggttcttctttggtggaatcagtgatatcccgtttgtatgtgatcccaacacgtcggatgtcatacagatagaacaagaaaaaggaattcactttgttttgtgaaagatcattcatagcatctttggcattattgtgaagtattcaggttttcattttcagaagaaaaaaacagaacagaaaataattttcatcacttgtaaataagagtttggtccatcaaaagtcaaaactagtaatgcagatgttaataaggctttacttaaattatgtagactttttgattcaaatggaaaatatactgtctcataacttcacctcgtactgttgtctttagagtaggagaaggttacaaaaagaagaacagatgggataaaatagccttttttttataagggtttccttatcacacggcgagcaatatatacttaagattaaggtatagcacaccacatagtaatttaaaccaatatcgattaaattaaaatatataagatccaatattaaattatacgaataaaagtatgacactttatatggttttggacaccattaccgctccttagcgttattctatccttaataagttgggagagtaaacacaagaatagtgtcttcaatttggtgcacttgatgtttcccttactgatatcgatttagttgttctgttttttaggctttctaattcactaacttttacctctttaacaatgttgagttgtctatcttttgggaagcaatgtctggtaatgtggctagttgtctgtctttttgggagctatgtcatatgtcagttaatatggttagctgtctctctttttctgtgaagtagccccagtgtggttacttactactactatctctagaactaaatgaaattttcttcagaacagaaaataaatggttaattctggaaaccaacgagatagagaattgtcagttaggaacaccataatttgaccaaacaaagtaataactttttggtagtgaacaattatgcacctgtttaaggaagttcttttgagtgatattccaaaaaaaaaggaactattcagaagtaaataccaaatcttttcatcaagtgatacaatgagttaaagaaaataaacaagggccaatcaaacatgcaaaacaaggttcatatttcatagctataaaagcgaaaagaagaaaaaaaggacacagcaaattggttcgaatttcgtatctgcaagcaagctaataactagcaatacactggcaatctttacattcaaagaaacaagatttaatctatggtgttctaattgaaaccagttagtcatttaaaatgaattttcgaacaataacgagttcgttacataggaagtcagctcagagaatatctcataagtatatagaaaatctaaattagaggcagaagaaaagcatattacaccattgaagttactctaagctgcatgttgttcagattcaaaattagcaaatatgaaaatggcatgatgaaataagcaaatatcaaaatctggtcagccaattgattaacagtattaaacagctaacaccaaggagagatttgagcaaagtgaattctagtttctgacctctggcttagatttctaacagaaatacaagtgttctataattgtcttaaaatgatacaaacttccgttcttctaaacccttctcaaaattgctttctcttatttctgaaaagcttgtctctttttagataaagataaaagagagcaatgaaacaacccatggagaaggaagctgaaacccacggaaatggtggatccttgaaacaaacaagtgatgcctccaattcctgggatgcaatatagacaagagagtggatgccatataaatcatgatctgaagaccttaggtaatacaaagccatctcgaaatccaaacgagacaatgcagacactgccttatccagcttgtacttcatcaagttccatcgttgcacgaactcaccttgttgattatgtttcaaaagttttctctccccaccatgagctgctatggattcaagcacatcaattgcacttgttattgtattatttaatgatgtcaaaagaacatttctccgagcagcatctttctgcacaaaagacaacgacgaaatctcagagaatggaccaaacggagtttgtccaatactccatgtgtaatccaccaatgtagtattgtgcctggggctccataacaaatgtgttggtgaaactccccacatactctgtaaaatcgaaccaacaaggggtcgctcaagctcccgtgcctgcataaacacatgacgaccattgcagctatattcgctcactgtctgcgtgttctttgttcttacagcgacaaccatatctttgaaagcaacagactggtgaaaccgatcaagcaacaagatcgaatgaaagtccatatcgaacacataaacaggaagaattctaccaaaatcctcctctgggattgctgccaccctcctgaactcctcagcagagtctgaaagtatttgatgcaaacgcttcgagtccaaatactcgttcacaatcatagtatagttatcaaagaggaaccttgatgtgtatgaattagtagacctagctatggcaaatgcacaaataggacactcattgtaattcactttataagtcctaaatctcaaagattgatcagctaacaacaacccattttcattaacctcatccataaaagttctctcaatagctttccaatccaaaccatttgaatcaccattctcagccccatatatatgtataaattgaacaatcaatgaattctcaaaagggacaggaattctcaaagaaggaacaagaagaacctggtaagcactccaaaccaaagatgacaagtccgcaagcaaagccttttgcgatttgggtctaccgtgcaacgctgctaatggatgaaactcgcctctaggaagaaccccatcacctgttagagccgggccataatcaaccggtccagcacccaaatcaatccagatatacctctcttttccagtccaaacactccccaaacactttgaataagcaggtgaggaatctccatggctatagctataagcataaggcttagactgtgctcctaaatctagaaaatataaataaaccccatgaacaggtttatccttttcaaagtcctgcttaatgatctggtcaatggaagagtaaggaactgaaattaaaggcgaacgaagactcgctggggttttggcgatctcagactgaatagcttgagatagctgcgaagccaaagaaggagaatgagaaacatcgagatggagagagtgcttaacggcgagtttgtgaaggagattatcaaagggagtgatgacatgaaaatgattcgagggttgtgaggcggagagaaaagactcgaggagagtatacgaagaggaaggaaaagagttacccacgagacggacatggatggagattgaaacggagagggaaagaagagaggagatgaggttatgggtcttgtgtgaaatcggagtggagtgagagagagactttttcaggaaggaagagagagagaggaaagagtcgttggaggcttgtgggtcgagacgcgattgctgcgagaggaaggagtctagccctataattggagaggcagctgagacagagctgattaccaagctggtggcgatcagaaccaagaggaggttcgtggcggtgccggccattttttgtcgccggggccaattttcgggagatttgagtagtgagagagatcggagagagttgcagaaatggttttttaacgatttttttgagtttgtagctgttgagtgtgactcggccgagtcaggccgattcggatctgattgtgagcacgaaatagaaacagagtacctctcatttctacctctaaattagttactagttactacttctactttttcttttgccattagttactacttctacttgtttattaatttttttacaaaattcttacatttttccttatatttagatatatagcaatgttcctcctcacttaatacatttgtctaattttctctcctaccttttattttgttgcaaaatcaccccttaaattatttatttatttatttgagataaccccttaaatttatttattatatatttagaaaatccctcaaattattattatttattgttttcatgacaatagacacttccaccagggtaaggtagagcggtcatggtcaaccaagaccctttaacccaaaagacctctcaatctctttttttctcttcctaagaaatattcttaacaatagtctaaggcactaatttatttatttgctagaaaaatagtttacaaatttattataattttgttttatttctcaaataaaaaaattattcttaaaaattttgccataagctctataaaaattagaaacggtcatgcttacttgattaatttacgactagtgacaaaatacaaaattaaacaaacaatgtgaataaaaacacaaccaacaaatagataaatgaggaaaaaaaaagttggattaacacactaaataatagtagtaatatgaagattttttttttttatatttgaataaaatgtgtataattactattttgagttggatttttttatatttaaagtgtttttttttgtactaagagtgtcaccgtcaaaacttaaataatttgttatgtcaaaatgttgaagttatatggcatacgaggtacaatattagtcaataaaactcctacaactatgactaagcaaattagaggtggattacacactaaaaatgaaagtgataaaaaattaatactattaagagtttcaattattagaaaaatattatgtgtgtaattgaaatttatcaaaaaataagtgaaaaaaaaaaacgtttttgcaattttttttacataaatttaaaatttattatttgaatccaatttttgtaagtttttttttttctt

SEQ ID NO: 16512 - DNA, 7162 bp, Cannabis sativa
  modified_base (7090)..(7096): a, c, t, g, unknown or other
  modified_base (7122)..(7124): a, c, t, g, unknown or other
agaaaaacaaatttcagtaaaattatgatatatctctcgatattgatccgttttcaatgatttttgtatcgttggaaagcttattcgatgatctacaattctgtgaagtaactattcaccaattcggtgatattctatgttgaaaattatcatctttctgatgttgttgtaattcgttttttttatattcctagaaaaaatactttcacttaaaatacaataactccctcaattcacatccatatttaatgatcttatatggttttaaagcttattcgatttcttataagttttataaaaaaaaaactttttgttaattcgaagtcatattaaaaacctatttctaaaaataagctctatatatctgctaattctcaaaataaatctaagcgataattataggaaatttgcattaatatttcaaattaagatgtgtaacatcttttgacacacttaatataggtgataatcgtggagattacatatagtaacatgtaactccaccatacgttacaaaatgatgaaatctaatatagattttcatatgtaacatattatttgtttattacacatatttaatttatacattacactattcaaaaatgatagaacaatcctcccctagattttaataataaacttgtaactttgtaacatgtatttaattcaatcaaaaatattgtatcaaaatataacattctcccactttgattgaataaatatacacttttattaaagtcttgggtaagtgcattgtaaaatatcttttgatttgaatcttacattagtttagttaccacaaagtttgatgaaattttagttactgtagcattaaaccattattctgttactacaagtcagtgataatacacacacccttattaatactcacttgagaccgcatgtctcgctcttgcactgttaatgaccatgtaaaaaattctaattcatggactctttagagaataatcccatttctcataagaagtggcaccacctctagtctatataggtaaaattttagtatctcactacactttagacactttataagcttaaatgagttttcttaggcttaatctctattaaaaaactttctaattttaaccctcaattttcaccacatatactcattcttaaataggataattgattaccacattcactttattgacttattgttacctattcatgaacttaagactaaattttactagtgttaagataagttaccagtaatgagcaaaacacttagggagttcgggttccatccctcaaaaattcatgctttaatctcatactaagattaagaaatttgttataaccgttcactattgattccaaaaaatatttatatagaaaaactcaattctctttttacttttttctacaacttaataccttaactatatggtgttgttggaggagtttacacaatccaacaaatcccgagtactcgaactaaataagaacactcatttatagaactgcgagtattcacctaaaatggcaaatactcaaaataacacaacgattaatagaatataaacatcaaataaataaataacaccaaaaaattatagtggttcagctaaaatttagtttgcttagttcactttgaaaagattattgtgttagtcttattcgtattaaatcaccactgtatatagaacgtaagtgattattcagttacataacttacaacattaattatacttaattgtgataaaaataaaacgttcctagaataaatgaatgaatagttttaaccgttctcaattaataattcgaacgggtgcgagtactctactcgcacattggatgttcatattcttagtaatggtgaacatacacattcactttgtgttacttacatattgggtctctggattagggacgcgattttgtcacgtgatgtactttcacggaatgtatatcgtggtacattagatgagtctcgggatacattaaatgaatgtcagagtacgtttctactttttaaccctaattacccctagatcaatctcagctgtaagatcaaataactccctcatctgacggctgccgtacatcacgaaatgcattccgtgtatcacgggacaaaatcatatcccctccggattattatgaatgtgtataaatcccttgagagtttttatacatacaaatcgtccaaaattatagtagaatacttgcgattatactgattatatgatggacattcatgtaccgatagcatagaattttctagttcaaaatgatttatcgcgcactttaatcattcggactagctgttgtaaagacacagttttaacataaggcgtggtagaattagtttttatttatttatttatttatttattgttttgattaatggtcccatgaaccgcaagaaacagaacaacaaggtccgaaggcaaagaaaaaagaagcagactgccaatccagactaaaaagacaaacaaaaggcaaacgccaaactaaagccaagcttaataaactaacaaaacataaagaaaagaaagaaaaaacaacaaaagttaaactcagagatcaacacgaccatctgcagcaacatgttgcaggaaatcgtcaaaattggacaaatcgaaagtcccaaacctgttattccgatttgcccaccgagccaccgcatgggccacaccattgcaatcccttggaatccattggacctcacaaaggttgagtttgccagccaaaaaggagaagttcctggccaattcctgaatgttgaagtgcatactcagaatatcaatgtgatgaggattcagcgcctcaacaactctagtagaatcacactgaaagatgacattattgtatcccatttgaatcactgcctcagctcttttgcacactgcgtgggtttcaccagggagcacttcactacaatttgtctgaaatgttatgatcttgaggatggttcctgtgtgatctcttaagacaatttctccggtcgattgtgtgtttccaatagagacgtcagtactgcaggatatccaccccaaggggggcggtttccattctgtttgcagtcctattggagcatcgcgtaaggcgttcatttcacctagacggctgttaattgttcttgtgaagagttcagctggagtggatctcccttcatgaattcttttatttctctccctccatatgtgctctaagataacagttgccccctccaagagatgattaatatcgagagacggtggcctgttttctccttttgagaaccataacagccattcctcccaggattggagatgaaaagtatccggtctaagctcccatctacttccaagccaagtaattcttgcaaaattgcattcccaaaacaaatggaaggtgttttcattctcagcatcacaaagggggcacttagtatcaggtaaggcaatgaaggtgctaagtttgtctttggtgggaagaaaattggaaagaattttccaccacatcatcttaagcctattatggatgcttgtcccccaaatgatcttccatttcctctccgtttccgagctaggatcatggttctttaataccctataggccgatttcactgaaaacttcccacttgtctcaggtaaccaaagccaagagtcatgtgttgggctgctaggaagggagatgttaaggattttcctagcatcctcttcctgaaaccattgcatgatcatgtcactattccattgattattttgaatcaaagtactaaccaggctcactccttcgacagaaagcactcgcggagatggttgacggtgggttcccgatacccacggatcaaaccaaatgaatgtagtttgtccatatccaatcctacgacaaatacctttctttaactcctcacaagcacgcagaatagccttccaaaggattgtatcagttggtttggcatctaggtccaggaaattcggcgtcttgaagtacttttccttcatgagttggctccataacccttgctcctccgtcaaaatttttcaagcccacttcataaggaatgccctgttcatagtttccgttgctcgaaagccaagtcccccacccgattttggtttacagagcctctcccacgcgattgtgtgcattttctttttttcttcagtatctccccaccagaaatcacgaagaagcttatcaatcttattttctatggctaggggaattacatctgaggaggccacatagttggaaatactcgaccccacggccttgatcaaacacgtcttgccagcactagaaagcattttcattttccaaccctgaatccgctttagaactcgctctaccaagggttgagtgtcgtccgttcgccttactgatctgaacagtggaagtcccaagtgagttgcctgcctgttcattctccccatcccgagtaagtctgcaatttcttgggccttcctactcggtacccctttagagaagaagaccgtcgacttttggaggtttatggattgccccgagtagttacaatattgagtgaggcaatccatgaatcctcttgcctctcgaactgtagcttggccgaatagaataacatcatccgcgaacattaagtgcgtaataggggtcccatttcgagcaagcttgaaaccttttatgtgcccttggttctccttttcaataagaaaccgcgataaaacttcagttgcaagaatgtagagagtaggggacagcgggtctccttgtctcaaacctcgttccggactgaatttcccaactatcgaaccattaagtagtaacttaatttcctccaccttgatacaagctttaatccattccgtaaatgggctgctgaacccgcattgaatgagtaccgtgtggacaaaatcccaatcgagtttgtcataagccttctcaagatccagttttatgagcatgaccccacgtttacctctttttttgctcatggagtgcacaatctctcttgcaatcattgtatttttcgcaatgtgtctgcctttaacgacgcagcttggttcggggatattaatttatgtagcaatggccgaagtctagtggcaatgatcttcgagattatcttgtacgccacattgcagagcgcaatcagacggtagtcagtcactagtgttggagagtcttttttcgggatcaacacaattgaagtgtcgtttatgaactttggcaagtccaaatttgtgaagaagtgaataaccatgtcaaccacatcctcattgattgttccccaatggtgtatgcttttagttagtttctaattcccaatcagcaactagcatagcagtcaaagtgggtatttattttttaaatttaggtatttatatctataaattttaattaactatttaccgagaacaattctaatcatttgaataacaaatttcccttaaaattttatttacaaactaacatgtagttcagataattttcccattttttttttaatttcacgagacaagaatgatgagaccagcaatgattattacaatctactgaaaaaaaaaaaaaccaaaaataaaaaaataaagaattataaatttgtaagtttttcttttttcattaaaaaaaagtactgaagttgttattcttagtaatgattagttttcactaataattcctttgttttgatagttgatagtagcagtacatcgacttgtgggctttacaggtaaagattagtggaaagtggaaagcatttatgtttgataaattgcaccaatttgggtttcgtttagtcttttcaacaacagaacacaaatgtaataatgttttgttgctttgacaaattgaatgtttttctttcccccttttaagggaagaaaatatgaaaagcagaatatgtatgaaaccaaattattttattaaacttcgattcgtcattgtcatgccccttccaattagtcttgtcaaatggtaaacaaataataataataataataataataataatattgttggattataatagaataatcaggctagagcaatccatttttaccaaatagcatagccataggtggaccctgaattcaagttgaggtaaatcacactttttgttgagggggtatgttttttacattattatataatatgttaaaaattaatacaaatttatattttagtataaaaaaaaaaaaaaaagtaacaataaaaatattagatttaataactaagatactaaataaaaagaaaaatttatatattcaagtaaacatatttttattaggattagaactcatgactgactttctttatgaacatgaaaaagttttagcattacaccaaagtttgtattacgttcttaaatatcacttttatatagaaatatatattgtaactagttaaaatacatatatatcttttttccaatttttttttcaaggagggcgactgcctcacctcgcctctatgtaagtccactcatgagcatggctactatttttctttttaccttttaaatctaacatataaataataaaacatatttttaaaaatttataacttctctaactagttttttttttaaaagcaaatctatgttatattaaatgtgattatataataaaattatcattttttaaaaaaaaaaattagaattcaaaattaaacttactacttatttttttatcttttattttatattaatgtgtatattaaacataattttcttttaatagtgcaattcaaatttaaatctattacacatatatatttgaaaaaatatctttttattattattttttaccaaaaaaatatatttctattatttttatgatatttcaaaaatataaaaagtactataaaattaaaaatattatagtaattaactataattataattaacagtaaattttaaatattattatgtttttttttataaataacacataaattaaatattttctaataaaaaataattttgtttattgaataacattaaaaaaaataactaattatataactaaaagtatacataactaaaataaaaactaaaaatataactaagtatacgtgcattgcacgtaatattaacctagtatatatacatatactaagtatagatacgaaatactttttaatgggtattacnnnnnnntggttactaaacaaatttaactatannnattaattttaaaaatatcaaaccatcgaattttgatct

SEQ ID NO: 16513 - DNA, 7890 bp, Cannabis sativa
aataaaaatgtaataccaaacatgtttgggttgggctttaaattcccaatcctcagtaagcaaacatgtataccaaacagcccattaaacggcgtgaggcgggtgttggtggatctgaactgagccgctccattgacatccctacacttttcttgtttgtcagtatctcaaaaagcacgaactcccttttcctatatctttacagtttccgccgaaactgaaaaatagacaacacagttcatagtccaagacttcatttaccttttttttttttcccctttgaaggtgaattgcttgtacagattacacattgctttactacttcaaagccttatcaagtcttttgaaacattcacaactgtgttttttttttttttttttttatgtggcagtgtcaaatgagctcttccacctcacgttccttttgctttgactctggctgcctatggaaggtctgttttacttccaacgtctataattttttgcgtctttagctttcttttagttttactttttatttttcgataaaattatgctttttttattatttaattgtatccattttagaaaattgactatgaaagctttttgtttgttcttgttatcatcgttttaaatgttggtggatttaatgtttttaagtatttttgtttgaatgtaggatgaaatgaaggtgactaaggctaagaggcgaaatgcagggaatatgtttgttaaatgttccgtgaataccaaagctcaaaaagcagaaaaacccattcgtattggggttcttggagctagtggttacactggttctgaggtagagtaattcccatggcagaaaaatccgttaagttttgaagatgaatttgttagaaaattaaaaattgaatttctaatactaccatataaggaggtatgtaagtaaagagaaaagttttcgcttgggaaaaaagaacatacagctcatattatttttttgctttacactagaagatggtaaagtagacagccaacctcttcgattgatcagttgaggtctctgtttgtgattttatagcctaaaggatcatattgcatttttattttggcagattgttcggcttctagtaaaccatccacactttggcatttcctttttaactgctgacagaaaagctggccaaccactcagttctgtgtttcctcatctaatcacacaagtaagtaagaaagaagattataaattgaaagtagcctttcaatgcaaaacattgatctgatcatcaattttcatttaggatacttcctatctggttgactttattgcctttatcttttatctttagattggtgtcaagcggtcgaatgaatgtcaatttaatgattttggctctaaattgtttgatcatactgtgacttgctttcctaacatatatgaatttgcagggtttaccaaacttgattgctgtcaaggatgctgatttttccggggttgatgctgttttctgctgtctgccacatggaaccacacaggtttgttcccattacctttctttctgttaatttcttgattgacaagttaccttttaatttttccttcccttcttgtagataggaagcagtgctttttaagcttacaagtaggaaatgactttacttactgaatatttgccttctatattttaattttcaggatattataaaaggactgccgaaacatttaaagattgtggatctttctgctgtatgttcgcttgacgaccctgtgctgtttctagttctttttcttctgttattttcattatgtaacatatttgaaagtttgaagtcattgcttgtggaaatttgtatttattgattctgtaggacttccgacttcgggatatatctgagtatgaagaatggtatggtcagccacacagagcaccagatttgcaggtgaggtaattattttcttctgtctagaatatgccaggtagtttgttttatacctgtcattcatagtttctgtaagggctctgaagttaaccatgaattatgaagagaatctagcacaacaggcattaaaaaggttatgttttaaatgcattcaatttttttactaaaaattatttatcttactggatccagaaagaagctgtgtatggtctcactgagatttcacgagaggcgataaaagatgcacgtctagttgctaatcctggttgttatcccacgacaattcaaattcccctttttcctttgttaaaggtgtgtttcttggttatttgaattcatttgtcgtgtttttacaagaatgtagcttggaatttcttactaactggagctggtaagaatgtaattttcttatataatgtacacttacagcctgacaagaaaagaatgtactgtttctatatagaaaatcttaaagaaagagaaactgaaatgatctataatctcccattaagcatggcttaacattatgcatcagggataaaatggaaataagaaataatcatgcctttctcgtggtagaaaaatattctattcacgcctatgataccttcagaaaataatccaattcaaatgaccttggtgcaaaggttttccttatagcttgagtttgactgtgatttctatggagtaaaatctttggttaatttatcttgcaaaatgaattacaataatgcttgagaaaatttatccttctgtgtgacatgtaggctctaagtattaatgctgtacaaattatttcgtagttaagggaaacattctagaataggcttttataccatgttctgtaatggtagttgtacagtcacaatgagacttgtttcgaagttatccttttgtatttttagggattcctgatagccctttcacatgcaggggaatctcgtaagagttgaaaatatcattattgactcgaaatcaggtgttactggagcaggtttgtattttttttatacctcctaacattcacatggagggtccaggatatgccttccagtgctgctatgttactcaatatttttacaaattaattaatttgcagggagaggtgcgaaggagtcaaatatgtatgccgaactagctgaaggcatctattcttatggtgtttcccggcatcgccatggtaagttttgtgttaaaaatcagtatgggaaaaggatttgattggtcacatatttctttatttattattgaaaatgaaacaaaaggcgatgatgttgtcaagatgttttaggaggtttacatttgctgtttcactttgaataatataaataactaaatcaagcaagccctcggagattaatatttattgtctgcatccttattgtaatataaattagatctgtttttgtttttcttttctaaatactttaacctttcttattggaagaaaaatgggagagagaacatatatgactagttttgatcaaaggtcagtattttgggttaaatttattcataaatgattccctcaaaatggatagacaactgtatagtcactttgtttcttttaagggtcacatgatattcaattgacataacttacatgcaaggctaaataggttgtttttaattcattgcgtattgtggtaatcttggttcttcttgaatttcagttccagaaattgaacagggactgtccgatgcagctgattcaaagataaccatcagtttcaccccgcatcttatgccaattgtaattattacacaaattgtattagtgattctatcctctgcaaactttttgttgctaaaatgaatctttgtgtcaatctttcagatccgcggtatgcagtcaactatatatgttgaaatggcttctggagtaacagttgatgacctataccagcaattaaagacaacatatgaggtcaccttttgaactaaattctcatagttgagcgcttttccatttcataataaaattgaatcagaagtcaatacttaaattcctgcacaatcagacattcattcaaattaaaaaaaaaaaatattggcagtgagtctttataaccatttgctactccttattcctatcaatatgtcatcttgacaggcttaggaaatatcttgatttgcaataatttgagttgacttaatgatgttcgacattttgtaaacatttctcgtgtgttagtttgatgatcaggatgttttaccttaaatcttccctgaatattggtgtacatcaactaaaaggaatcaatattaggaaaggatcttggttattcttttctaatgaattgaatgtgaaaaagttttttgagttctgtacagcccttggaattgtttgtggctgttaccttgtagaaatggcaagtcattgatccatgtgcctgttcaaacattcttatttgccttctttggcaagagaatatattttccttgatttattttcttttgcaattgaagaataattctgttgtgattttgttacaggatgatgaatttgtagtcttattagagaaaggaattgtccctcgcactcatgatgttcgtggatctaactattgtttaatgaacgtctttcctgaccgaattcctggtcgagctataataatttctgttgtatgtccaatctctaaatacttaattgattattaccatgtgctgcagcaaattcttatgtgtggcatcataagtggctaaactcttaaatgttggtgtagattgacaatcttcttaagggagcttcaggtcaagctatgcagaatcttaatctgatgttgggacttccagaaagcacagggcttctttccccggctttatttccttagcattttcctctttttatgtgtcggaagaaagagtaagcattctacatacgaactaaaatctccttatttcctatgtgaataccattttaatatttatagaaatgacacattgatgattacttacagtaacaccctatgtagtctagaaaagataaaaagcaaagaaatagttcacatttagtataagttgaacggtcaaaagtaaaagaaattgtcagatttacctaatttaagatcggtgaaatgtatcagttcatgggatcttgttgttgtagttttgacataattcagataacatgttaacgtcgtctttttttaggctcaatcatttgtattagcttctcctttaccttcattttttttaacccagaaagccaaatgagaaaagaaaatgttctcattttatcttcagcaagtgtttcatttaacattgtttttgctctgatattttcctgattatcacagggaataaaagatgcggaaaccctaccaagtccattaattaagtttaattttcagctagaaatcaatatttccagcacctatcactacttggctacattttattttattttatttgtattttgataatattagaaagtataatttgttgaaattgattatgggatgttatgtttgctgacatgttgtcctgagattttacgatttgaattttggtttttacgagtaaataaatataggctaatatactgatgcatacgccatgcaacccagaaatcaatatatattagaaacggctgagagtttaattacaataaaacattattgaagtaatcaattcattcagtgaagtttctgaatatcttaaatctacagagcatagagataaaatataactgttgaatcgtttttttttacaatctatgttattttattcctttattaataaaactagtaaagagaataaaaaagaaaagaaagaattagtcaggcaaaatcataaagaaaaaatgtatattattatcattaatgaataataatacaaattcacttttctctctaacttttcactttccactcttactacttttcacctaacgtaaaaatattagagcctacaaagagaagaaaatcagaccaaagaaaagggagggtatcgatactttaaaaaaaaaaaaaaaaaaactgatagataagaaaaaaaaatactataatttttccaagaaatcaagaggcttcaaggataagtattcatggaatgctttcatttctctttctttgtttgttgattatgatgttaattatctctcttattttctctctattgatttatggaatgccctcattttataaaatgaaagtggatgccctcatcaaaggaatgttctcattccaccgaaaaaaatgaatgctctcatccaagaaatgccctgattccgtcaaacaaaaaaaaaatagatgctctcatccaaggaatgttcattctgccaaaaaaaaaaaaaaaatgaatgacctcatccacccttattccactatagaaaaatggatgctctcatctatggaatactcttattccataaaatttaaatttatggaatgctctcattccattaaatttatagatgccctcatccaaaaaatgtctttgataaaaaatggatgctctcatacaagcttaaaagagaaagaagaagcagagatgaatttcctctgttttgtattgatactaaaataaatctcacaatattacactggtgcaaaggcacccatatatacacaaggaattaaatcacgaggcccaatactattggccaaaggataacagaaaaaatattctatatgggaccactgtcaaaatcaaatcatttgttgtaatcatttgcaacgtaggaatattccctttgcctcatcatcagtatattccatattttgcatttgggcagcatttagacctttcatttcaacatgccccctcaagctatgttgtggtgagtaactaacagtgagcttgtttttgagatagtgaaaggttgagattggtagggacttggttaatatatctgtagtttgttcatcagttggtatgtatctaacttcaatcattttgtttagcactttgtctcgaatgaaatgcacatcaatctctatgtgcttagtccgagaatgaaaaacaggattggaagccaattgccttgcaccagagttgtcgcaccatatgacagcaggactttcatgcttaattccaatttcagtaaataatgattgtagccaagtgatctctgtgcaggcttgagcaagggatctatattcgacttcagtgctggatcgagcaacaaccttttgctttcttgaactccaactgatcagattaccaccaaagtagacacaaaaagctgatgttgatttttgatcgtcaattgaacttgcccaatcagagtcgcagaaactttctataacaggtttagttgctttggtgaattggatgccttctccaattgttcttgcaatatatcttaatatcctcttacaagccagccaatgtttttgagtgggagcctgaagaaattgggttagtttgttgactagaaaagcaatatcaggtctgctaagagttaagtattgcagtgcaccaattgcacttctgtactgagtgatgtcttcaagaagcgcactgtcccgtaggtgtaatttattactttgaagcataggtgtaggacacggtttggcatccaacatgtggtattttttgagaagatcaagggagtatttggtttgagacaagtgaagcccatcttgccccccagttgtctcaaagccaaggaagtaagtgacagactcgagagatttcagagagaattgtttgtttagctctgaaatgatgtgaagcacacgatgagagttgttcccagtgagtaggatgtcatcaacgtaaacaagaacatatagacgagcatcaccctcggcaagatagaaaagagagttatctgaaactgagttgcgaagaccaagccgaagtaaggccacacgaagagtgtcaaaccaggcacgtggtgcctgttttaggccataaatggcacggtcaagtttgcatacagtagtgggaaattggggatcaacgtagccaagtggttgagtcatatacacatcttcttcaagagtgccatggaggaaagcattgttgatgtcgatttgt

SEQ ID NO: 16514 - DNA, 4210 bp, Cannabis sativa
taaagcctattcattgggatttgggagtagtcaatccactaaaaattttgaacaaattataacaaaggccaaggcagaaatgaagttaccagctcaaggttgacccacaatttcacatgacagcagtaaccaaactttacaaggaaaacaagacttacatataatattataatgaaaaaatttctacatcattttacaaagggtcacaataaccaaatgtgtgtatagaacgttatgccaatatattataacttcacgcgactcaggatagcagcaaggacatgggaaaacccaaacaatgggatcgagaaatgaaattaattcctgatattggaaccaaaatattcttagcaactcaagcatggcctctcttcttctttcagcatgttttgcactgatttttacaaacgagcagaatatgcagcaaggaaaataaacaagcccaaaacgactgatttcctcacaaaatatgacttgcaaccagatgaagttgccacatgaacaaaaccagacctctaagcattaccaaattatatcaacagactggcgaaaggcacgaaactcatgttgtaccgatcaaaaattacttcaagtacgcactctcctccagatgaaatcaattgctggaagactgcaaaacattatgctcattcagatgcctctgaaattgagccaactggttctgcaattgaagaatttcggcagccttctgtgaaagtatggagtttagcttcgagatatagtcagatagttgatttcctgggtgttcagcttcaaccaatagattcatttcctgaacaagaataatcataattagtccaagacatgtatcaaagacaaaaatgcatttgaaaagaaaatttcagacctccttaacaatgtctatggtcttctctacttgtcttcgatgagctgtcacaagatcttcctcttcctggtggcatccacataagaatttcttagaaatgagtgtttaattctaaaaatagaacttgaatgctataatgtggttaccttgaggagggcaataagatcctcatcagaactagaattgctagccccaaagtcctgatcattcctctgctttatatgtgcaccaatcttcctcttttgttccagaagtgatttttcattgctctcggcctttttataattcaactgcgatggtttatctttttcataggcctgaccagtgtaatcaaattcatcttcattaatgccatttggaccaccattttcacctttataataatctgaatattcggatgcagcaaaatttccttcaatcctcccgctaagaacacgatccaccataaatggtggtgaaggttctttttctaattgtttggaccaaccaaacctgctcttttcattggtaacatacattttgttatcctcaaaggctggttcagttggtaaagtggaagataagtgcagtgtggtagattctcgaaggattgaagatgaagacaactgatcccttttggagttgttccctttagataaactcttcaccctacattaaaaagggaaaagtgaaatagagtacgacatatatgagaactaatacttcgaaatcatccatttccttgctcgtactacggttaaaagaaaaaaaaaaatacctgtctgcatatcttagtgtattgagtgtgtgttcacatgatcctgaactcggtgagatgcatgatatcataacagttcgcgagtcaccaacaaatgagtctctaagaacttcagtcaacttacttcctctaaatggaatgtgaccttggtcattgtcgagagctctaatgcattctttcagcgccagtaagcttttgttgatttcagcaccttccattctgcataaataaaaatatttacttgcaggttctcacaataattgttgttgatacataaggcaaacaaactgaacaccaattaatcatgtccttggtcctcttcctgaaatgaaagacctcttgatactgcatctcctttactctataaaggttagactaagccgtaaaggtctatgcaatagaagactactacaagaaaataatactctaccttgtctgtttgtcattatcggtagtatctgcaccacgctcacttccagcaagatctataaaggatagtttgcctacaactcgagcaggctttgattcagtgccatcagctgatctcttgatgcaaagctgaagtatggcatgtgatcttgaagattcctcatttgcaccagttgtacctgtacttcttgtattgctgcgcccttctcaataagctccttaattgtctccacattagtcacaccctgtattcttgcaagcccacaatacaaacctgctgtctaccatcctctctcatgcaaagctttctgcaaaagtaaaacttgttcagaaaataagtatagaatggatatgttttctgctgacaggctgaaacaacttactttcgatcatttaagagatcaaaaagcttccctccatatatctcaaagaagcttacaaataactgaaaaccctggttcctgtatgtttggtgcattaatcttaagatatcttgtgatgctttaagtggcagtggctgcatagtataagtcttaccactccctgaacaagcaaagaacattagttcaagctaatgtgaaatgatgtacaatgaaggaatgcgaaagaaaaatgaatggaatattggggagggggggttgaaaaaactgagtctcttcggagtatgaattacaaacttttagcagaaagacatgaaatagtttagtatactacttggtgaaaggtgatgatcagcacaagtaaaaaagagagaattgggaggctttggatttttttttttaaaaaaaaaaaaaagaaaaagtgacaagagaatcttatgaggaaagtagaagaagcctttccactaacagaagcctagtttctgtaccccattcttcatattaaaaatgttaaatcttcaatttctgaatgcatgggtgagatatgagggtaagaatgtcacaagttcaaaaaaaccaaagtgaccaccactagacttgtttttctaatgtgaagttgtcaataagaatatgaagattcatgagttggggaggggtgcattcatcttcgtctattttaactttacatattgtacagtaagaagatttagttgcagaaaatggaaaagatagtggaattcaatatgcctaagttataagcacttgcctgtttgtccatatgcaaagcaggttgcttttgttttgtggaaaattagtggaactacaggctccacactctcagagtatacctagcatggaaaaatgaaactcatcaagctacccaaggagattagccattagacatccacgtgcaatgaacttaagcttgttgatatactcacttcatcatttgaaacatcctcgtcaagcacagcatcaaaaacaaattcatgcttctcaacatactccgtcaagtcaacctgaaggggcagtgaatcatcagacctttcttttcatttatatctacatatataattatttatttcttcgatcaagaaggcagactttggagaagatagtaaaatagttgtcccataacatagaaaatttaaggaaacatagtttaagaaaactgaaataatcattacttacagttagacttagattcaagactctcacttttaggcaaattttgttcacattcaatcgaaagttaatattccgtttttgtttagacgtaagataaagagacagagcaggtataatgagtattagcatagattcatgatgttaaaacaaatacaatcatccagaagtagattcttttaccttgagttttgtttcatggacagtaagacaattagaatttggtgctatcgttattatgtcttcctccttttttgacatttcccttttatttaaaggtctcttgcgcacctgtaacaaagattgtcaccaaatattttacaccaaaaagaaaaagccagtaaacaggaccacaatttcacggtttacttctttgcagtgatcatatgactataaaggagggatagcaatgttgcacatggaagctttaaaaaagaatatacatggcatgatggcatcaaagagacctaccacaactttgatttttgcaacattgttggctctttctttatcagcagcaaaacttttaagaagagcattatcatttaaacctcgtgctctgcctgtaagcttgttgttggagagaaatga

SEQ ID NO: 16515 - DNA, 3358 bp, Cannabis sativa
  modified_base (26)..(31): a, c, t, g, unknown or other
  modified_base (155)..(186): a, c, t, g, unknown or other
acgcatacctaattattatatattannnnnntgttctatattatatacaaattgatcttgggtttattattaatttttatcacacctagtatattggaaataaaagtatgatattatctttgtgatgaaatattctattattattattattattnnnnnnnnnnnnnnnnnnnnnnnnnnnnnnnntattattattattatattttgttaaaataaaaaacattaactaactttcttgtttttgaattcggagctcatagattttctttaaaatatctttatacataaaatgtggctatttaacaatttttgatggttcaacggaatattttaagaataaaaaaatattttgttaaatttaacagggttagtaggtttagttttataaatgcatataaatattaatattgtttattttagattgatttaaatattaatattatttgtttttttttttaacaatgaataacttcattgaaaaaagaaatcataatctcatacaaactttaagtcttaagaaaccccaataaaaaaatgaatctcatcaaaccatactagttctctatccacccgaagagcatgccgagttaatccatgtgcagtcccattagctgttcgacgaacatggattagggatattccaagaaaattggacatcaaactagctaaatcctctgacaaggaaccaagttcatcgaagaaagaagagcatttagaaaatacatttataatcgctaaacaatcagattcaacaaaatgtaaagaaagacccatagtatgagcctaatccaatgatacaagtaaaacccaacattctgcctgaacaactgaaaaacaacctgcaaaaaaataccaacaaaaataacatcaattcctaaaaaattgagaaaagataaattaacaatatttgttctatataaaaagagaaaacttatcttatcaaatgcagatgatgccgacattagatcctgaacactacagactacttcaaacaatttaataacttaataactcaataactttacaactctactaataaccaagaaacaaaattctataataattaataccactaatggtcataataaaatctacctcatataattaataattaatacagtttaatatgaaaattttaaaataacataagctaatacaacaaaaactaacacctttaataataataatttatttttaaaaaaaaaaatcataaaaatagcagcatatataataccattgatatttttttttttaaatgtaatgtaagggggttgagttttgatattattttttaagaaagaaatgattagtggacctacaaatagtgtgtagacgttcacagatttatagattgtttccattaaatgaaagagggaaagagaaaaagagaataaaagaatgataaaaaaaatgagaaatgctaaagggcactggtggtgcctagcaccggccctcctatgtgtcaatattgttattggtccaattaagtattgggtctcatataatttaacataataacttttagggagtatcgctagtcaatcgtaacgcaacatgtcgcaaaggtgctaggcaccactggtgcctaataacaatgctctatatatatatagagagagagagaaaagaaaagagcaaaaatgattaatagtgtaattatagttatgtttctttgggttgcccaaacaataatcagtgtgttcttttctttttccaacttttagaaacattgaatttttattcgtaattaaaaagtagatttattattaccaactaccaaatttgtggtttagcagataaagaaagttctctcgggagctctgctagggcttatttcctagcttttgtagttttcttatttttttactttttattatttcaggttaaaaatcgagttgtcattgcacagtagttttcattatgagatctttagctgatagtactgaattgatgagtgtgattagttaaattttcatttgagttaattaaacatttagtatacttcactaatttgatgtttcaccactagcacttactagtcatcttatgaaggtgttaccaggttttctttaggagtgtttaaagattgatttggtctgaatttttaattttttcaaatcaaaccaagagtttttcaaaaatttaaaatcaaactagatcaattaaataatcaaaccaatctactcaaacatattgctttggttcgaaactatagttggtattttttaattctatttttttttacaataattgtttatttttttgggtaatttttttttttttacttttaataaatttataatatataaataacaataaaaaattattatcataacaatataaaggtaatataaaaaattctagctacagttgttcccaaatattaacatttcgtcaaaaaaaatacatactaagtatatataaaataattattagaattagtttggtttgaactactatcgaggtttctaaaaccgtgactgaactagagaatttaaaacggtccaaattgatcaaatcattcacaatgaattcattttgtccgatctcaaatggtttggtctggattaattaaaatttaaaattacagattgcgaattatatgaacacccctaattttcttaccttttattatataaaggttaattaagatttttactccctaaactttagcatgtactaaatcatacaccgtgaacttttttggacgtttaaaattcttcctgaactattgagattgttagatttaaggactttttatttaatttcattcaattttactaaatcatgctcccctgactttgatatctaccaaatcatgcctctcgaactttgacatatactaaatcatgcccactgaactgtcatccatgttagattttttttttactaaaattagataaaccttaaatccaacaatctcagttgttcagggggtatttttttttttaatcaaaaagaaaacttcattaatcgaaccaagcaaatacaccctcaagccccttccaatggatagactcaactcacaacaattaattacatatcaatctctcaagagtaatcaactccatttttgagcaagaacaatatatacttgacatccttctttatatccttaactatactatttacagtttttgaaaaatttaaaaagatatagctatttctattcctccacaaatggtatattgttgcagccaacaataccatcaaaattctccctatgaaaccggttggtacgcacccgattcatttttaacgatcttaaaagttcaaatggcatgatttagtaggctgtacaaaaaaattcgtaaaccgcccaaaccgaataacccgtccaaaccaaaccgaaaaaacc

SEQ ID NO: 16516 - DNA, 4480 bp, Cannabis sativa
aataggcacatcatctataaaagtaggtatatcttaaagaatatgaaaataaaagtaaaaattaaaacaaataaagtaaagtgggtatacaatgcaattttttctaaattagatgagtattagattataagatcccatgagatttaattttcagctaagcatatttgatcaacacaggactcgtcatttcaaattgttgccatatgactgactgtatagcatttcattgcaagtcttgcaaattttacatgcctacattactagtcgttctattttgttagtataaacctttttagcccaaaaaataaatagaaaaaaacaatttttttttctttttgaaaaagaggaaaaaaaaaacaaaatactttaatcaattatatgttataattgaaatgattggaaatagacaaaagagaaaattgcattataaattacttcttttttggtcacttaacttattattattattattttaagaatttacatattgattttaagcttaatttatataaaacaaaaaaatattatatatagttttatataatttgaatgattaaaatcgagatgaaacgaatgaagtttattaattgttgtaacactcttttaatatttttcataaatattgaaaaattattagttcatatgtttctcattttattatgtgggcttccattttgtgttatttcatagataaataatgagtttccaaattttaagtaacttggaattttgtttaaggtgttactcagagttgaatattattataaattcgatatttttttatcataacttttgtatatttattttaaaaataataaataatgatagtcacaattttttatatttgaacaaaaaagaaaaataagaaacatgaattagtaatttttctatcattttctatttttcaaaatcataaaattaaaaataaatataaaaagttactaaacatatcttgttcttaaaaaataaaaatagttaccaatcacactttttatttttcaaaaataaacaataaaattgtatttttatttttgtgatttaaaaaaaaaaaaaaagatgaaaagtgctaccgttaacctcctattacaatctctacgtccgaaaaatatgtcggaatattttttttttaattttttttcacgagggcgttcgttatgcttacaacatcatccttgtaaatttttgaaaaatttcaagtttacagtgccgaaaatacgtttgaagttttttgaacgcgcgtggtaaagtgaaatatcaggaactctgttttccgtatggtaaactattcagaatttttcaaaaatttacagggatgatactgtaactataacgaataccgttataaaaaaaaatatttcgatgtgagttcgcacgtagagattgactaaaaaattgtaattagcactgttcaaaaaaaagtattaccgaacactaattttgaagcaactttaacttctaatatatgtcccatataattaagtaaacaaaaatttgatcgaacgaacacatgctctattattttgaaactattataggagaaaagctatggtttgggtgccctatttttctaaccaaaaaaaacaaagtcaaacatatatacatgaaaattatataggcttatttggcattattttttattttttatttttctttttatgttgtcttaaatgagaatgcaaacgagttttgttgttttcaatttctttttttcatatgttttctaatttttcttttatttacaaaacattgaaagaaaaatctaggaatatattataaagagaaatattttataagttttgataaaataataagatagagtaataccaaagggaataaaatgataaaaaaaaacaaatgatagaaaatgagaaataacaaatgatgaaacatatttcaagcaaagtaaataaataaatgatgaaatgtatatataattactgaaatacactaattatttcaatataattgtgatgagacaatatgtatttatagagttagagaggaagattaaataaatagtattgcactatcaaattgtggtaattactataaatcaatatacataattgttatctattattataatgttatatattatatacaaattgatcttgagtttattattaatttttctaatataggatacatgagagacatgtcccaatcaagtttcagaccttagagataagtttgaacaaaaccccattcagagacaccaggtgcatttgggcgcccaggttgacattcagtcagcatgggcgacgcgacgactaggtttaggttttcaggaacttttttagataccgattcctcaaatccaataaagaacaatgacagggcatgagtattcatcaaagatatcctgaaggagcatattccaagtcatgggcacctaggttgacattgtaacctgggcaccaattatgctttaccaagtaacaactgtgtgaatttgatgaaattaaaatctagtgaacattttttacaaaaaagagattggacatcaatgagacaactttcgatgaccttggcccccacttgagcccccaatgcagactctcagaacactatggtgcccaggtgaatgaatctcaactgggagcgctttggttctcctttatggagaagcctttcgggcatttttcttatttttatcaacaatgaaggtacaactacttttagaaagcaaactaaatcatctaaggcctgaatgaaaatttgggcgcctagcacactagttgcatgtgcccgaggtgcctaggttgacatattccacgtgatttgtggttctgtcacatagaatgtgcttccgtctcgagcattattcttgttttgccctcaaaataacatatgagacttgaatcatgaaagaatatcatcgaagtggtggatcaactcccaagcatcagctaacaccacactggcatccaggttaacattcaaagcttaatgttccatccatcaaacgacagttttgtccgacatcgatcttattttgcctccaaaataagaattgggtgctttggaaagtcaatatctcatgtacatgtgtcacacataaacccaccaacaccaatgcaaattagtgatcacccggttatcacctagttgtcactgtgtgatcacccggacatctcctgcgcacaccgtgcataattaccatgagacggtgcactggagtcaaagaatgaactaaggagtgttttcacaacactgatgcatctcaaaacatgcttaaagcccaagaagcagagttttaggcgctcaggtcgatgttttatgtacaatctggtcgcccatcaacttgacaattttttagaactgcacactgctcagtattttttccataactcgctcaatttttatccaaatgatgttgttcaagtggcattggaaagttcttttcaagatagatctaagcttgtctaatgtccttcccacgattttgatatttttggcctcaaaatcagtctgcgagctcggcctcaatttcctaacaaatttcatgcaattttcccactattttattgtaatttaattgaaccttattctctataaaaggagaactcatctgactcgttattcacattctcaattctctgtaaaaggttagaggttatctctctttagttatttttctccagttctcttctaagctgagtgcttttcgtgataagctcaaaggagacgtagttccattactatcacaatatggggagtgagctactataaattatggttttctctttagttcttatttttcttataaatgttattttggaccttgtgttttgtaaaagttaccaattggacattctattatattaaatgagaaaatatactttgtattttctaaaatggtacaaataggatcctgaactgattttttctcaaaataaaacttaataatagtccgatctagagatgttatgtatttgtatattttagaaattgtcttcaagttggttatattaaataataaagttttcgaaaattaagctcagagtcttatttttactattttaaaaaatataaagtctattttgtcatttaacaaaatagatgattcaatttgtaacttttacaaaataaagggttcagaataatatttacctttttttttaccgttatcgcttatcagacgatacggaattgatcgtttttcaacatcaacaatattatttccaatacgatagaaaaaaatatatatatataattttaaccatttttaattttattgtattcattcttattcttgtcttttctttcatctctagtaaataattgtctactattatacacaacaactactacagtaataataattaaatagatatctattaaataattaatatcaaaatctattaatatatctatatttatctataatctataactactataaaagtgagaatattgttttgggcttccacatattaaattactaaaaagtcctcacttctcacctttaatttattat

SEQ ID NO: 16517 - DNA, 2251 bp, Cannabis sativa
acgaaaaacttatcacccacataagagaaatttagtacctaacattgacacattaaagggtagaatcctcaaatacgatttcaatccctcctgacaactgattccgcttcaagcgaatagggaaaagttcttttttagatagcatcacagaacttaacaattgaccataatactagtgtagtactgatctactgctaatattgcaggtaaatatgacacactattaataagaaaacatttcaatgacagagaagcagaaaaggagcacagacatccacaaggattcctacccacctaggcaaagttaaggtcacctttacatatgtgcagcaaacagcaatagtaagcattagtataaaaactttccacaaccacacgaatggtaaagaaacaatcatacaccaaaataaattgtaaagaatatagtgtttaggaatcaacctcgttaactaaggaggactcaaatgagcgagctttttggagactcatattgtcagtagcagccgcaatatagtatcttggatagaacctttccttttgcaacacagctaacaggttcagcatctcagcagtgtgacctcctatgaaaaataaaatcccaaactttgattgaatatcccacatccatgaaagaaagttaccattgtcagaaccagctttcaaaaacaccacctaattttgagctcacctgaacctaagacaatcagggtactgactggttcactgcgttttcctttcaaaggcttaccactttggcatatcacgtaaatgacacgtatcagcacaacaccgatcgttaaaagactgataactactaccagcgacatggctgcaaaagaataaaaagaacctcagtgtaatttaccaaatttagaggcctaaaacaaaacatggaaactagtctagcccaaatataattcaagaatgttagggtgataaaattaacaaggagaaacttgattgtgcctagaattttcaacaactaaaagtagtataatccagactcgaatacattggccttgatttgataaatgcaaattgaacattctattaactgggtccctaatggctaagaacttgatagacaaaaaaagaaaaagaaataccactgactaaattgttaacattcgaatattaatgctaaaaaataacaatgattactaacagataatttggagagaaaaaattacaattaacaataataaataaaaatacaaataagcacattagaggttaatccattcctaaaggctagaactccatttaaaacatggaggaatgaaaattggtttatcaaaaaagttcactcactaattaacatgacagattatcatcaaaattcaaaccacaacctcaaattaacagcaacacagattcaaattaatgagtaacactaatcagaacataacaatactatttcaaaaatttcagattcagcaataatataatgattaactgattaattaataatcgagaaagctaaccagtgacagagctataacagagcctagacaccacaataatgccgtaccaaaacagattagttcgaaaaattccgaacaaaatttcagtcactggtaacaaacagattataatttcagatcaaattttcagttattagtaataaacatattaaaaatttcagatcaaaatttcacaacaaacggattattaccgtgaggtagctgctgagattaatagcaagggacggaggagctggcaggtcgacgtcgacgtcgcggcaggcgtgcagctgaaagtgtcgccgtcggccgagatcggtgagagagagaggagtcgagagatgcgacgctagaaagaggtgaagaaatgttaggaaaaataataataataataacaattatcaattcgttttttttttaattcataatttttgaaaaaattaataatgggattattttacataggcacaaataataataaaatgataaaaatatgtttgactgaattttaaatatttttatattttttttataattttatttataaaaaataatcttttaatgtatttttatattttactcttattaatttattgttgatatttgttatatgtatgttattttttgttattgttttgatgttatttttttattaattttatttaattttcttgttgttttcgtattatttttatatatatatatatttgagtttttaatttgtcttacatcataaaaatataatttaaaaatactataattttcttttatcaaatgtatatatatat

SEQ ID NO: 16518 - DNA, 5620 bp, Cannabis sativa
atcgctagccaatcacaacgcgacatgtcgagaaggtgctaggcaccactagtgcctaatagcaatactcttattaaaataatcactttttttgagttaaacatcaataacaatacactaataagtggttgaaacttttaacaaagaaaactttttgactattcaaaaccaaattcatgtagcctttttgtgaccagtttcaattagaacacaatcaaagcctcgggaatttaacaaagatatgaagtataagcaatgaatgaatgacattttgttcataataacacatattaaaaagtaattatacaagaccagaagattgatgctagctaggggtacagaacactaaggtggctgggtacattataagctagctgatctgatcataaagataccaaacacaaaaaaatagtgtcattggtgccagtgataagggagcacgaaaggactaacagcacagtacaggtgggcgccgctgtggttattggttaaaaattggttcctcttgttttgggctatccttttttttacacacttggctattattaggtcactcactatcactttggacttttacctgtatcccccaacccaatgtcctcattttctgcctctccccccaactacaacaacatttttgatagcgaaataacaatataacacctcccatatatgtcccacttttttttttgtaaaaaaagttgtcttagttctgattcctttttcttgtttaattagatcatctttataagtcttctaagttttaatatcactctctctctctcactatactatatatagatataattaaaatctattctctttacttcatttccttgttttaagttaggtaggggctgctcaccttctttttgtcacattctctatttctctcaaaataaaaaaaaaaaattaacaaaaggaggaaagaaaatcaatcacacccaccaccaaagttttgattttttttctactagtattactactaccactacttctacttcttattcatagtcatacccaacattttgaacaacataatcccgtcttttctttccacctctttctttctctctctctgctgggtttgttttgctatacttaccccaatcatgaggacaatcatggcagctaagacccctcacgactcttcattctcattctccagaaggtacttgaacttcaactggaaaaagaagttcgaagacgaagaagacgacgacgaagagatcttgaacaatgcttacatcaattcctcttcctctcaatacttcttcgacgatgacaaagaagaagctcagaatcatcatcttaaaattccaccaccactgccgccgagaaagaagctttccagagtttcgaaactacgatcggcagctctgacggttttcggggccaagtcccgagcacccgaccaccatctagggacccgggtcgtcgggacccttttcgggtaccggaggggacacgttcattttgcgtttcaagaagaggcgaagctgagcccggcttttctgatcgagctagccatgccgaccagcgtactggttcgggaaatggcttctgggttggtccgtatagctttggagtgtgagaggaccaaaacgacgtcgtttgatgagagtggtaagagcaagaagaaagctactaagttgcttgaagagccactttggaggacatattgcaacggaaggaaatgtgggttcgcggcccgaagagattgtgggcctgaggagtggaaggtcttaaaagctgtggagcccatttcaatgggtgccggagttttgccggaatgctgcggcggagacggcggtggtgggtctgacgttggtgagctcatgtatatgagagccaggtttgaacgagttgtggggtcaaaggactcggaagccttttacatgatgaacccggatgggtcgggtggacccgagcttagtatttacttgcttagagtctaatcaaaatcacccctaaaacaccaaattttatcttaatattgattatggggaaggaaaataattcacttactcacgtggttatttcacttccatattctaatctttatgcttggctttttcctttttggtttatatttatatatataattatatcttcagataaatcttatatgttgtattgttattgtgccatgcatattgcatattattgagttgtgtgtgagtgagaaaactaatggcatgatacacaagcttggttggctttaggttgtatttatgtatagaatttattttataatctatctatctcttctctttaatatttttatcaatcttttttggtgtgtaagtggaaacttacacggtgtgaattaaatgattaatgctcatgttttcgagctatatagggttgcaattgctgactctcctgatttcatttttaatggcaaaccaaataattttgcttgttttgattaaatttttcctggcaaaatcattatgttgtaatggtatgtcatggtttaggttcaattttaatgcatggtaggcgccattatttattagtgctgtttatccatgatgaacaatatgttttttaggtgcacgagtattttcatcactaacaaaaagtgtaatttttttttctcaagagataatatattattagtaagagcaacagctgtaattaatttttgaagatataaaatgtagtgattattacatacacaaagtacacaacaacaccttaaatctattatctatgtatgtaatgttccaatttttggagacttttacatgcaccaaagggcgtatttttggatctagcaattttaggcgtgccatatgttatcatttgtttatttttatttatttatttattttttttaaaaaaaatagattatcacttaagaatctagctttgaattgaaagaaaatatatattaggaaagtgtgaaaggaggttttgttgtatatttcttttagcctaggagtaaggaaatattataaaatgacacttttgtagttccctcaatttttgggaaaggaaagataattttttttaacatagtattgaattaaaagcttcacttttctccaataatatctaatttgtgctgttatatgctctggttatcattgaaaatcattgtgtccagaatgattttgtaatcggactaaccctggattagagttagtgaaaatgaacataacttatataccacttttcaatcttttacaacataattattttgtagtatccaacaccatatcctaaaattattacttccttaatgaatataataatgataacaaaaatgttataataaaccaggttattaatttataagtttatatcatacattattatataattaatttgtttttatagatagcacacctgcaaaaggatattctaatatgagtaatgatatgtacacttataattcacacactttacacacaattacttatcaagaacttgtatatatatgtttatttgtaaattatgtgcgtgcatatcattacttttaataataataattgtgtacgttgttgtaattatttataattacttataaatttttaaaattcttaatagtttatagagtcaaatattcaccgaacttttgagaaaccgatttaacaaaggaataaagttaaagaagaatgattaaaggatgaaagacaagaatttttacgtggttgagacgttactgaaccttagtttacaagttaatattattaaactcagaggctatgaagtattttactcaagttgttcttgcaaaaatttgtaactctttgcatgaagggatacaactttatttataggctaaaactgggttctcgggtgaacttggacccgttagggtttcatacataaaataagttcactaatggggtaaaatacattataatacttactttgagttgggtagaggaccaacaaggagataattgtcgtccatatagtaatttaccacgtgatggtgacagctgggcgtacgctgctgggtgaatagtagatgtcaagttgtaatatctccagattagtaaatagataagtaatcctaattaaaatagattaatgataattgagtaattgtattattatacaattagttatgtaaaaattatttgagaagtattgcatttaagatcccatttatgagttagggatatttttttaattttaactcgagaggggtaaaattataattttgatgtttattttgatgatggaccatatttttatgtagtatgttcgttttattgtgttacaggtgaattttgacaaattagcgcactatagtcttaattgggtatttttgctcagaccgagttcgagttcaaaatttatgaattatgagattatggcaataatatgtgatatatgtatttatttgggagtgtgcatgattggaaatgatgaatatcccttggtatttaattacgtgagtatttagccttgagggcaaaatggtcatttgactaaaatatagtaaaatgatatattaaagctttatttctaaattcaagatttaaaactctatttctttgctttgagaagtaaccaccaacctcctctctctttctttacaaaaattatgcatttttttttttaatttttgagaaagaattgaagcatagggaggggtttttgattgtgaaattattggactgattggagaagacaattaaggtagtaattttattttgttttctttcttttcttgatctaatttctgaaaacctaactttgttttgaagcttttgtagtcttcttgcttggtgttcttgaatggattttatgatgtttttagtgttagctgttgtatgatcctagagagtttacgatttgatttttgggtggtctatgattatttggagcttgtttgaactttaattgtgggttgtatcttgtgttgaggaagtttaaatttgagaactcaaattcgactcaaaaatggtaaatttaaattcttaataattttgatttgtttagcttgtggtttatatttagaatatcccaatttaatgttctggaaagttttgtagcatttgattttaattggagcaagttgtgggagttggaagattaaattttttgagcaatttatgcctagacaattggaattttggttggttcagggctgttccaatcgaaattccagttggacagtataaaatagatccattttgtattttggccataactttttactttgaactctgttttggacgttctttatatcattagaaagcttatgacaagctttattacttggtctagactttgagtcttaattgtgaataaatatctgatgtgatttaggtttatattgtttaaacttgagattgtgactaggattactagtacttgctcgagatcacctgtggattgaaattctcctcatactttggaaatgaagtaagatattgaattgtgcacatagagtatagtgtagtggcacagttcacattatgtgattaatttgattaaagtgcaagttggggttattaccctaaatttatatagtgtgaactagggttattaccctagatatttatattgagaattgaggttattaccctaagtaaatatactgtgaaataggattcttaccctaaatatatttattgtggattagggttattgc

SEQ ID NO: 16519 - DNA, 2183 bp, Cannabis sativa
attggggactaaatatacacctctgatacccagtttcaagtcctgctttcaggatcatgcctgatacaacaactccagctagaggatccagaaacttaactccaagaatagctccacctaatattcaaaaaccaaaaataattaaacacgtacatgtgtatggtttgtcattaatctctcataatggaacatgaactggtgattcatcccaatatttatttggagcacaaatatcaatataccaaacaaaactgtaacaaagagttgaagctcctcaccaacccctatgagagtaaccactgatgaaatggcatctgaacgatggtgccaggcatttgctatcataagcccactgtttgttctttccccagctcgctttgtgatccagtaaagtctaatgaggaattaaagaaaagacaatcaagcaaaaataaccatgaaaagataaatgaacatgtttaaaaatctggtgtaccataagggatttgccctttctattgattctaacagattgaaaaaaaaattaattcttgaatggggtatacaactccagggatgaattggacgaggcttaacttaggcccctccctcccttcctccctcggaagccaggggaaacattgagaagatagaaagaatacataaaggaacataaactttatttgatttgcctctaaaataagagtacacaggttcttacccttccttgacagatattgacataatagtcacactcaaagctagaatagggtgattcatgtcaattccgtggtgatgtccaacatgatgatgaccgtgactatgatcttgtatcaaagactgattaactatttgatgatctactgacaacaagccctgcacaataaaaccatctcttttcaggacatatacaacacaaggatttgtttcgatatataatgtccttttggcaacaaatattcaaacatttaagaagatactgccttttaaggctcaagtagaggaatagagcacaggcatacatgcagaagatctaaagcatgccatgcaattccaccaccagttgccaaaagcatacaagagattcccaatgctcccaaagtctcaaatttaccatgacctgtacgggaacaaaagataaagcaaatgaaatggcaagcattaaatgaacaaatatcacatgtaaaacttcaatttatttacaagcagcatgacaatgtacagcacatgaatccactggtaattaactaattttgtcatcacaaagataacaaaaatccttacaccaaaataaatttaaaagaaggaaaaaaaaaagaaagaaaaagtcaatatccaagtctcaagacagcaatcaagggacatgtatgaggatagaagtagtaaaagacatttttatctaggctcctatattaaagttgaaaaaaaaatgataatgaaaacaccaacaacaaagactttaaaatacataaatgagattaatggaggagcatgtaggtacagattaaaagtgaccatatgggtgttctttatctttaggagcatttgcaactttaaatgacaccaaggcgatgccactaagaacctgaaaataacagaattcatcatagcagaatgataagataacgatctcataagagcttatgcacaaaattttcttttaaataataatgcaataaaataatggaaatgatgtggggtaaagagcagtgcatatcaaaaatcaaattcattgaactcagaattaaaagagccagatttgcctacacttaaaccaatgactgttacaacatccaactctaaagaacatatacaaactgcacatgctcaatggtcattgacataattgtaagcttacttaacaaggaaagtgcagtaaaacagattgctttagcaaataatcgaattaccagttacatgttaccttttctcaagaaaaatgcaacaagtgttatttatcatttatcattttcaaagttagattaacaaacatcaagttcacattttgtaaacctagtcgaagtggagtcaatccaaggagtacatacagatacaaaactaatttaggaacttctttatttaaaactaattttggaaagcttttctgaggtgatcttagaagatttgcatatgggagaggggacttttcctctcaaatatcttggggttccgttaagaccaacaaaatggcgaagagaagattg

SEQ ID NO: 16520 - DNA, 5465 bp, Cannabis sativa
  modified_base (5233)..(5233): a, c, t, g, unknown or other
ggtctattctgaggttaatttagtttcagtacctagaaacacttggtggatagattctgttgctactactcacataagtgtttctatgcaggatttttatggtggaagatacatctttgtgggcgatggacaatcgatggaagtggaagcaattgggcatttcagattgttattgggaactggtttttatttggatttgaaagacaattttgttgtgccgtcttttagacataatttagtttctatttctttgttggacaaatttggatattgttgtttatttggaaacaatcagtttactttgtttttaaattcaaatgttattgaaattggttatttaaattcttatgacaatctttatttgctagaaacaattgcatcctataatgaaactttgcgtgtgaaatcacgagtaattaagtatcaagtctcatataatctaagaaaataatttttataagaaatatcactaaccaatcgtatgatgtcacttataaaatattttgggctccactaatacccaataagaatgctcttatatactagggcaaaagggaatagatgaacggtggagatagaaggaatgttaaagagagggacaaggcaaaaagagagccaaacaaatagacatggcattcctctctctctctctctctgcatgcatttattgttatgtaagactctgcatgtggaattcttacgttctccacagtcattttatagattatttcaacccttcaatttttcactattaattatataacttatctatacctacacgcgctttatttttatatatatatatccatcttatttttctaatataaaatccattaatgtatatagcattaaaaatcaaataaagctatataaacgtactatgaatattgttgaaaaagtacttaaaattaagaaaaacagagttttattaaaaaaaaaaaaaagacaacaaaaaagttggtttgattgtaaacagttttaagaagaacagttttatagaaagatcatgagaaagtagtctctttggtaaaggtgcatgcaatatgtatggaattcatgtttggaatcactgcaaatcttcagctcaatcacaataatgaaagtatatatatatattaatattgtacattttttatcactagtcacacacacatatatttctcttttacttgtctctttcttaccagtatataatgccatttgtaatcacactgtataattaataccccacgccaaattaattaatatatatatctgacacaaaatattcaaattgtgaaaaacataatggctatatttgaactttattatttttttttttttatatttcaacgagtaaaatagacaataattgcatgtatcggttttactagtggaatcttacaattagttagttaagtttttataatgtttgcttgatattgttatgttttaatgtctattagttagttatgttttactagccaaaaacttataaaatatatatttttttctcattaaaagaatttcttttttcttaaaaaaaaaaaacatatttctgttaactttgtcaaaagaataaaataataaataaaatttcccattaaaacatgtgagcttaaaaatgaatgcatcaatgaccagcatagcatatgacagctcacataatagtattcgttaacaattttcacatattaatctcctttataatcctctcttttcgaattaactcgtgttttttttttatttaaaattaataattttcctgtctaagtttcttatttcaactcttttatagcgactggactttgcatagtcttaatgagctctttaataattaataaatacaataatactgttctttatatatatatatatatataaatttattcaatcttaaagcaatttgttaattaaaaaaaaaaaagtattttgacatttgtttttataagacaatgcatgcatttaaaagcactacagtaatatatataggtagagagcgtgtccaacacgtgccatagatgcgagtcgtttagatagaagagtagtgtacgttcattctggtctgtgtttctctctgaagaattccgacttagttgtgtcttattcgttctgctgagaattcaattctcatcataaataaataaataaataaataaataaatattaataataataataataataggaattatacggtgatgatgacattataattcaagctaccacactccacacaggcgaccatttttttttttttgactaaaaagataaaagtactgttattcagatatttgaatatacaatttaatttaaatacaaaattaatattatatttataaatattaatttttgttacaaataactaattaaaatgtatattttttttagagactagtgatcttctcatctttcttctctttcatttaccacttattcactgtgagtattactatatatttgtcactttaacatcacaccaatagggtgaaaatcggtctgttattagcggtttttataattttataactaattgatcggttacattttttattttacgaaaatcttattttacgaaattcaactgaccgtttagaaattataattgtataaacccgacgtacaatttttagcattttttggcagtttttagcagttttaaatgatttttagcagtttcttggtttaaccttttttaattttaaaaatcaaaatcgaccgcgccatgttaaaaaaaaccgaaaccgaaaccgaatgccaaattctgtgagcatgtagaaccaaaaattcaattacggtcaggtcggtttaatggtggattttagtttattagtttgtatgaacaccccttataacaccaacatgatataccttacaattagttaccagttaccagttaccctaatatatattatgtgttgtgctgatagaaaataaataaataaaattggcattataatgaataataattgaaggactgaaacccctagaattgaatgcctctcagagggagacatatgcatcagcatgacaaaactgttgctagctatactactattctctctctctctctctctctcttttaataagttaattttaacctctcttttttttcccttctctttgtctctcccactcatcatgattattcttgattaataatctcaccttttatcatatatatatatatgaagcaagtagtactacttgtatagtaattaataataacttcctctctcactctcacttcttatataaatatatatagctttatatacctttgtctttccccaaatcaaataattgaaaagagaaatattatgagtccagcaccaaattcttcatcatcatcaacatcaagatggtgtccaacaccagaacaacttatgatacttgaagaaatgtacagagctgggacaagaacacctaatgcctctcaaatccaacaaatcacagctcatctctccttttatggaaaaatagaaggcaaaaatgtcttctattggtttcaaaatcacaaggctagagatagacaaaagcttaggagaaagctttataaacaacttcaacaacaacaacaccaacaccaactagctgctgctgctgcttatcataatcataatcataataatactcaccaccaccaactcatcactactactcctcctaatgatcataatcaatatcatcatcacttttcatctgtaccaacaacttcatcttctgcttctagtgcttttcttcatcaaccactttcctttatctccccccaggtacgtaatattacttgtacttttaaaagagttaccatattatgatgtgtttgatttgttatatgtttaatatatggagaatattctcttttgatgaagtcactaatttatttgctaataattaatagtatatatatatacgtacaacttttgtgaagcaatagagctatatatttcttgtaaaagacacttgtttttagttactatctaagaaggctcccattagtttctcctctaagatttaactttttctattttacattaaactttctctatttgtttttctcaaaaccatttaaataatataatatatattaaccaaatatgataacaaaatagtatttaaataagcatgaatagtctttctccacatgtggagaagcactatataattctctatacctttcttcaaattaatataacatagtttttgaactcctcttctttattttaaggatttattttttttagagtagctattgtgagtactttaaatccatgtatatatatgtgtacataagacaaaaaaaaaatctttcaaatataaatataatatatatgcatttgtatgtataataaatttgagttgaagtaatgataatctttaatataatcaattaaatgcagggagggattgatgatgatcatctgaaccactactcatcatcatcatggaataataaagtagtggaaattcctactaataatcatcagaggaataataatattattcatgatgagataaataataataataataatgatgagagtggtaattcgatgatgatgatgagaatgtacgatcgtgattggatgaggataatggatgatgatgatgatgatgatgatgatgttgattgttgcaacagaaagcctctcaagacacttgaactcttccccatcacctctactcctaataataataataatctcaaagaaattaagcgtacggactactcaccactactttctcacccaaaaataaaagaaaatcattcagtactcaaaatatgaatgccttttctttctttgattctctgatctctagctagctagacctatatatagctagctaggatgacattatataaggttttaaatgtgtctgtgagttgtttattttcttgggtttctgctcttattattgtttgtctttaggttgagaaagatctcaattgtctaacgagtaataggttactgttcttactgtcctactctctatatatatccactatttatatctatatatctatattactatatatgaaaatagacaatgccttgtttgatgaagaagatgctatatgttgatcactatttaaataataagttattttggatttgtattttgtaaaagtgtacttattaattaaattttttgttttgttaaatgacaaaataaactttataatttctaaaatggtaaaaatagaatcctgagctcaatttctaacatttatttttaatataaccaactttangataatttctaacacgaacagataaaaaaaatataatcagttttaacatataacattattattaagttttattttgataaaaaatcagtttagggtcttatttgtataattttaaaaaatacaagattcattttatcatttaataaaataaagggtccaattaataacttttacaaaacaattaacgtctaaaataatatttaccattttttatgttatatattttatttaa

SEQ ID NO: 16521 - DNA, 2557 bp, Cannabis sativa
aaaataaaatttttaaaaacaaaaatttaactttcattttataattaaaaaattaaaaaacaaaagtgttaccaaacggcatttatttttcaacagaaaaagcaattggagagagatatagtataaaggaagagaatcacgtgaggtcacatgcataagctgaatctgaaccatgaagcatctattgccacgtgtcgaatatgtgaatgaaaggcgaacgtgaacggcactcattgaaagaaggtgtaatgaacgggtgagatgagatgatgagatcaccgacgacagtaatgataacggtcgtcgagttccaccaactaggccccacaccccacgttaattgatttcctccatcttcctctctttaaaccccccaaaaaacaaaattaaattaacaaatcaactgtgaggactgaggtgggggaggattcaattcaatcgcaaaataatgtcttggcaatcttacgtcgatgaccatctcatgtgtgatatcgatggtcaacatctcaccgccgccgccattattggccacgacggtagtgtctgggctcagagctccaccttccctcaggttctttctccattttcctctgcacctttttttttttttttatttctaatcagttcttgttggatgtgatgtgagtagtttcgaatttcgattaccagtaatatgattgattggtttggtgaagtatggagtgtattcaaaatcgcctctaatatttacttgaaaatcataaatcaaatggattgtgtcattttgtaaatttatacaattttttttatttctttcagtggatcattgttcaatatgattttgaaaattgaaatcgttatgttttttttgaaatcgttatgttaagtagataatttttttaaaacatgtatacacttatatgtgtgttgtcagttcggagcataatttattgaatttaatggtttttgcacctttcattagtagtaacgatgggtgttttgggtgaatatttattggattgtgatttgtgaaattatctgatcgtggacatgagagttgaaaaactcaattttacaaccaagttgtgataactttattaattcaactctgattgatacagtcagtgacgaaatttatttcctttatgcagtttaagcctgaagaaattgctgcaatcatgaaagattttgatgaacctgggtctcttgccccaactgggttgcacctaggtggcatcaagtacatggttattatgggtgaacaaggagctgtcattcgtggaaagaaggtttgtcctattcgttggtgtccaccctacaatcgttttctttcattatgtgatatataactaattttcatattacattacatctgttttcttatgcctggttgaataggtatgctttaaagcagtcattcggtcattgtttaaaaaaattagctatttatataataaattgctgctttacgagtgacgagtgtgtgtgcacgtagattacagatcacttgctgctaaaactacaaacctatgccctcaaaggaatataacagatcttaatgagtcccacttgtggaccacttcatacaagcggctgacctttttttattccgtctctttaggagactacttaaaattaagcacttctacaaaacacaaacagatagatgccagttgaataaagttttattagctaactctgacatctgtagtgaattattaggtccattataacttatattcacactagcacaccccacctgggcggtggggggaagagaacagattataataagaaggcccatttttgccttgacatttgatgctgagcgtgaacaagtatgcaatgtgaagtcttactaatgttgttttatgattcagggtgctggtggcatcactgtgaaaaaaaccggtgcagctatgatttttggcatttatgatgaaccaatgactccaggacaatgtaatataatcgttgagaggttgggagattaccttattgatcagaacctctaaattatctcaggctcggcagctttccatgtttagatctttctttgtcatgtttgtgcttgcattgttttcctgctatggccttgaattggtactgaagttgttcttgaaataatcatttctggaccaaaggaatgatatattcgtcgtcttaggatcgttcgtcaatttcttcaaaatttcttattctttgatttgtgtatctgttattgctatacagtttgctcctgttgagtatttgattagtttgctttttttgttttataatttttgtaagtctttgaacactcatggcactcggtatagtaagataaactattttcttgggatgattaaatgaatttatattgcataattttgtacttttatagttgaggatttgataatattggtgtcattgcgatctctctttagagttaataagtctgagggcctctaaaattaattgggcaagagaccaatcatggggttgcaagccattgtagggtaaatccaccaatggtttgcatcatctttccttagcttgctcacaagcttggatgacagcaatggtttctccttccagg

SEQ ID NO: 16522 - DNA, 5260 bp, Cannabis sativa
  modified_base (354)..(366): a, c, t, g, unknown or other
tccaatgacttaaaaaaaatgtaaccatgatgattacaataaaaatgtaaccattaaaatctcttccatatatatatatattatgtaatattattgacacatactaaaaatatacttaaatgtacattaagtaggattgctcatgaattaatttggtctgaatttttattttttcgaaccaggccaataatattatattttacaaaatttaaaaccaaacaaaatcaaaccaaatcaatccactctaacaatgattattgtatagttttatttgaaggattatatcacaaatatacaaaaacaacaaaaaaaaaaaaattacaaaaatacggttgtacggaattttaaatattnnnnnnnnnnnnntgattttatttacagaaaatgcggttttttttatgttgtactctaattaatttgttgttcattgtttattatctgtatgttattttttgttgttgttttgatgtcgtttggatattatttttctgtatctttgatgtaattttattgttgtttttgtgttggtttataaaaaaaattataaaattttcttaaaaaatctttaaacgtaaaaatattttttttttttttacaaataaaagtgtttccatataattatccctatattttaagggtgcaatttttattacagtttttcaatttagttagaaagtatatatggtttgtttttcataattgttctaacttatgttttatattaaattatgttacgttttaaaatttataatacattcacaataaataaaaaagaaaaatgtcaaaataatattaaatcaatattactactatgtttgctcaaaaaaatattactactatgtttaagattgttcccgaatattaatattcaataaaaaaatatattaagtatattaaaaattaggtggacgatttgattttgtttgaaactgccaataattctaaaattgtgactaaattagagaattataaacgttctgaattaactaactattaacaataaatttatttgatccgattttaaatggttttcttcgaattaatcgagatttaaaactacaaattgtgaattttataaacacctctcctaatgtacaccatacacacactaattattgaacacaataatgtttattaaatggtataagcaaaaacaaaataatgcctattaaatggtagtggtatacatttttatgacaaatactaaaaaacatccatggtgtttagcaccgatgtgttagtatttttttcgatgtcgatcatatttttattagtacaattaaatgtcaagtcaaatatgatttaaggctttaattgtgtgattaaaattagttattattttgttgacattggagaaaatgatttgagtttgagattttattttaatgaaaaaaattgtgaaactactaaattatgtctataactacaattaaaattaattatttattatcattgattcaagtccacaatattttgccatcttctaacactttttttccatttgaggtttttttccttggttttataattttggtatttttttctaacaaagaaaaaatatgtaatttgggtgtgtgtagtgtaacggtgaaagataatgacaatagcataactaatgaatcttaaaaatatgaactaactatttgtatatgcataaacagctggatagctagttatgctcatattcacaatcaatctctttctttcttctgagaggcacattatcaggcagatatggtagttctgcctcttaaacgcacaagagttaaatatctaagctaccaccggcacctatccacttatttaattaatgcatctactacagtcaccattgttgttgatgcctcaatttcttttacttttaattaagcacttgccaattggatttttttttgacaaggcttggtagtcttcttatctatttatagtttattcaacaatttattttcacacattagtaatgtggaactaattctaatacactttttttatatttaggtttggatcggcgacactttgagctcacattagcaatcagctctttttatggctcgtctttttggattgaggatactttaggctcacaatagatcataagtacttttgatactacattagaatttgagataagatgaatttgagagagtagttgtagctgacaaggaaggggccgagaaaggagaagatcgagaaagaatagcacattctaatctttgatatccttcttattaattgcagatcaatttgaaacttaattagaaacagacatatcgaaaaggattaaaataatacatgaaaacaaacatactgattactttcataatttggtgccttttctatatactctaatgttgaagttttcaaattaatgccaatttacaatattatatttaattaaatctgcaatatttgattgacagtgcatttaatttgtacaaagtggcaagttttcacgttttagatacactctactttataaccaatctaatccatctttaaaaataaaagtacggataatatttccaaagcgttttttttttttttttattaagctataaattaattatgttattttcttacttttgttgttttatgtaactaagttctaaagtttaatttttgatttgattattttaggtaactaatttttatttattagttttggttagaatttaagataagatgaataaagttcaatctcaaaactaattaacaatagagcgagtagctcattcatcttatatatggtaatttattttcacattgcgctttatgaaattggtttcgtgttaaatttttaattagctaataaatgtaattagtttttttgtcggagattctaacatccaacttagttgatgactctaatgtttactctaatgatttttgataaagacttttttgactacttttttccaaggttataaaatctttgacaaatttttggtgactttttttgatattgatgacaaactataacaattttccggtagtacgtaatggaattgctctagcaactttcctctaattgtttttggaaataagtttatttgtagtattttgttggttctcctttatttttcccttaaaacaatcatattttgtgacattacttttgttttcaccaccaaaaaatacttcaatgataactagtgacaacttatattttatgtgtttaaatatcacgtttagttacaataaagattatttataattaaaatatggtatttcgatatgaattgtcagtgtggttaaaatacatttaccaaccataaattataatttttataatttatacttttagttatcattttttgaacgatgacataaaaatactcatttatgtctaacatatttttataatatattcatttttccacttcctaaatttcgcatacataaccctatacacaaaaaaaacactgtaccgtataataaataaatacggtacagtattaattactcaacacaattaaacatgtattaattactcaacactaataattatcaaaaaaaatactcatatacactaatgaacaacgacacatgcgatcagggagtgttgttagtagagtgttttattgttgttaattagtattaataactttccagtgtgtataaattaataataataattaaggtagacgtaccataggaagcagggttgtttatcatgctatacagaagaccataaacgctttctgtgaacaccaatatcaagccagggagctcatcattcagctttgttgtcatactctttaacatggcattaaatttcagagctaccttgttcaatttatcatcacactcattattcccaaaaatattaagggttctttccaaaggcaaacaacccattggaggaagccctgtaagggatattttcctagctccaaggctgtagagttccttgagaaaatttgtagaaatttcaataagaaaatcctggtactcgtctattgtgtacttcaaacgccgcctgggaaagatgtaatagttctccaaaaaatcattggttcctaagctcactaagtacactgcttgtttcaatattgtccttgccctccgatgccccacatacgctttcaacttgttttgatactccttgtagtactcaatttctttccatagcggcatcacattctgtcattacatttatatgttacaagtacaacaaaataatgagatcacaacaagacaatcaataacaatttataaaaatataattacttactagtacatcagaggtcgcagtatcgtagccagttccagcagaagcaaagcaaacacctattgcaaagtcggtaatgttgtaagtgggatccaaatatgccggtacgataggcctcaggccgaaagcctctgagataaaatcgggcgggattcgcccgttggagaaccggcctgtggggcggccgccagagaaatcacggccgtatggatgaaaattgctcttcaaaagtgtcaatatttgattgttgtttccagcatcaactgttgagtctccgaatacaatgatggcgggaatttttgtcgccatggccgaacagttggaggagtgctgctggactactagtattagtgctaatcctatagatagtagccattttggaacgagaataagttccatgttgttgtaaattctttacaatactttatccagttttggaactagaattggtcagttatataataatatatgtaggtatatattgacaaatgtgggttgtgatgttggagtatagtactcaaaaacagagcgaaataattatgagagtactattgaatgctgcaataacgtaatggtgtattgaatgtggtttctttattgtggggaagcagttagttggagagttatatattaaagtgtccactaatgaagcatgagagctctttcagcctttgagggcctaattccacattaaaatctcaattcataatgcataaacagatattaatatttctaactttatgtgtgcacgtacaatttactgttcttaattcctgttctggcaacaatttattattggtttagtgtctaaatgtgctttgtataagctttttttcaattattattctttttaagaaaacaacttatattggtgtaatgcctttaaactcaggcggtaggaaatttagctccgatatatagaaattaactttggtaattctagcttcaagatcacacttaaataacaaaagttaaatcaaaacaaacaaatcaagaataaaaaaccagcaaacacattaaaccaaaaaa

SEQ ID NO: 16523 - DNA, 4475 bp, Cannabis sativa
ctttctacttttcccattttattgtgctcaatttcttcccatattaaagctctcagtgcatcgtattttgtcatattgttgtagctgatatattgtttgataaaatgcctctgtgaagaatttgcttatattataaaatcaactgatgaaaagtttctgtacttttatgaaaattagtcatggtaggataaaaaagctttaatttgttgttattaatattttatatgtttaataattctttctggatgaactatagtgggttgtatcaccttttgaattagagctattttccagaaacattttctaaaactatttttaattgattaaatcactcacatgagcgatgaagtgtaatataaatcccacaaaatcactcagacgagcgataaagcgatgtgggagagaacaatcatgcaagaactttgaaaatgatgttggtagtactagtagtattaatgttgttcataaattaagtacttattaggaaggactgtagatattcgacttttacaatgatatatggaatgcttactttgctattattcaccttcttcttccctgtttttgaattaggactggtcaaggctgtatggtctcgttgtgattcgagcaacccaaaatgtcataggtactaaggacttcgattgctgatcacacacaacatgcatagacagtgatttggtatgcttgattttcgaagacatgtttttagtgtttaaattcaaactaaatacttgttttataatgctaggttgttgttttttcttgttccgatttgcttatgaaatctgagaaacaatggagaatgcaatgcttttaagttctggttactcaattgggtgtcatctttactcatcaagctgcaaaatttctaagtcccagaagaaaatcgggtttcttatctttgctgcaaaggtgagtaaaaaccaaacaatgagttttattacacgaaaaatgttgaacttggtagagagtaaaactaattttggttttttcatcccttttaggcaaacccttctcatggaaagttggtgatgaactcttcctatcgaaagaggtctagcaagcttagtggagagccacaaaccagctcaaacacaattgaaaagtcggttatttctcttgaggcatattgttctgtgttaatttgtgataatggtttgaagattgtaaaagttttgacatgattataggaggaaaacagtcaagaaagcagggaagagagagcatcacttatggaagaaaagagattccgctggttcggggcagaaggcactcaatcttattagaatagtgagttttcaagcatcttctctttgtataagattgtgtattgtttgaacaaaaaaatgaagctctagatttcttcttttcttgattgtttttacaatgttgggaaacccgaaaatggcagatatctgatcttcctaatgagaaagaggctgtgtatggagcattaaacaaatggatagcttgggaaactgagtttcctgtgattgcagcagctaaggctttgagaattttacgaaagaggagtcaatggaaacgcgtaatccaagtatgacatctttgtgtgatccaattattacaacattttggtggttgctaatgtttgtgtttcttaggtagcaaaatggatgttgagcaaaggtcaaggagcgacaatggggacatacgacgctcttctactagcgttcgatatggatcagagagttgatgaagctgaagcactatggaacatgattttgcatactcataaacgttctatctcgaagcaattgttttctagaatgatttctttgtatgatcatcatggcatgaaagataagataatagaggtaagataaattatttgtagataattagacagcgatagttctcaatcttatgttttcattttcaagaaaatcaggtattcgcagacatggaggaactgcgtgtaagaccggatgatgatactgtgagaagagtggcttatgcttttcaggaattaggccaagaagagaagaaaaaccttcttgtaagaaaatatggatgcaaatggaagtacattcacttcaagggcgaacgaattagggtgcgaagggacgcatcttctgaagaagaagacgatgaaagttgagggattgcttaggaaaaacttgtggttctttccaattttcagtttgatctcttttataagctcaacactagtaattgagattaagagtggtaattcgtgtttagcgtattgtattgtgttgagatcttaaattgaacatggctcatgaggttttacactacattgttgtttatagtgttattgtttcatgtggagttcttaaatttattttgaataatagttaacataaaatctcgagtcatgttcgtgtcaaacctgtgtgtcgttacctgaattgccacccctaattgcgatcacacactagttttgacatataggcctctcaacacacttgagccatgtacaaatagtaatagaactcttatgtaattgattttataataggattttttccattgtgatcaataagattactttattttcattccttatactaaatcttaaaactgctttgctgctgatcaatgcttttctgataaacttatatttggtagactaacttattgtgttttttgtccagtataatggcaaggatgataatcaatattccctgacaatttgtacagggaaatttagtttggtattgtttcactatgtccctattatctaactaagttgaggaaacttgaaagagagaaagcaactaagctaaagagactgcaattggacttcgaacaacatggtttccgtcgagccaagaataccacccgaaactgtactctttagtgctgtttttgttttcaagtaactcactccttgctttaactgtcaatgtgaagctcttcttctgaccgacgtgagtaaaggacaagagactcggggaagcttcaaccgagatacccaatggaggtttcgattcgaagaagtaaacgctcttggcattgcccacattggtgacagttcttttgacagtgattgttttaacaagtttagagatagacaaggaaggatagttgagttccattgctgagggcgcgtttggtgggcacttgaatgatttgtcagcaccttggagtccagaattgcagaagtggagaagatagtctacgtaagaagcatcgtagacaaggccgggatctgctgccttggctggacggaaataaccagcgccataggagaaggagtttgctaaaccaccagtctcgtcgcttaacccttcgcccatgttgttcgtcaggccagctgaaatgttgacatggaacaaaacgaggttagattaagaccctgtttggttaagcttctacttttgcttatagttagaagtatcgacttactttgctgtttggataactattaataaattattttaattttaaaaatagcttctcaaaacactactataaggactagtttagttctaagactaacatactttcaattggtacaagtattttcttggtaattatctgaaatgcccatctaagatatatgctaatttagtatgttgattctctcctaatatggatttttacaagctgggttaaaaatcacctgtggtcatgagagcagatcttatggctgcactgctccaagttggatgaatggccttaagaagtgctacagctgctgcaacatgaggacaagacattgaagttcccgaaagtatgttatacttgacaattcggggatctatatcgctcgaaaacttagaaggagaatctccaccactccatgctgccaagatattcaatcccggagctgttatgtccggctgccaaagatcaaaaacaaacaattagaacccgaaattctcacaaaggcgataaatagagaagaagtttagagtaccttgagaatattcggctctataacatttggacccctgctagagaagccggcaacagaaggtgctggtttggtatgtaacacagtccttgctggcatgatatatgctcttggattctttgttgacatgatgtacttgagaactttcatggcattgttgtaagtcaatgctgtcgccggaaggaagtgagcatcgcaaggtacctcgcctccactcgccttatcatttcccaatatgtaaccaactccaccggcttgcttcactactttgccttttccaactcttgagttgtttcctctattgcataatatgatctttcctttagccttttcaggtgaaagagagttctcaagacaaagtctgcaacacaatttatcaggtttgtcataatcttatgatgcattcttttatttttccatttcgggaaccaggttctagagataagagaattaaggataccaaccagaaagattaacgcaaccataaggggaaacaaatacaacgagttaactaatcagtaagattgatgaagtagcaattaacgcaaaaacaaccaattggaaagca

SEQ ID NO: 16524 - DNA, 4446 bp, Cannabis sativa
gtaatctaataacaacaaataagccctgcaatgctcccataccttaggatatcaaaaaaattcctttggaaataaacacaataatgaaaaagcaacaaataatgtttttaatgtaccaactatgactaacctttgaggggtttacttaacgcagtgtggactatattatcttttgacaataatataatagtacctaatccaattaaactcatggtgctcaatactgcaaaaaatttcttttgaaaatttttatttctcatgaaaacatggaacaattaattatattatcttaaataattagggacaagctataaaaataagcgcaaaaaccttgaaaggcaccaaagccaacataattgtggcgcttaatgattcatacttcaccttgtacattattatatgttatgactcattgtgcacgatttaacgttgtgtattttactaaatttagggcattatgttgtcacaattttgtattagtgactcataaattgatttagtatgttctttggtttggttagacaataagttttattagaagaaactctttctcttatttgtaactcaattctagtgcactcttaataccttattcttgacaaaaaaaaaatacaagaatctattctaagtactaaaaaatctgttttatggattaagacgagatacaaaatattttatccattaggtttcttcttcctaactaatcaaagaatattaacatttttttaacatatataagccaataagaccaataatttgatgtttttgtgctttttacggttgttgtgccatttattataaattgtccttaattatttagagtaattttgtagtatggtcataaggtaagagcagttatcaattttgtgctcatgacttttacttcaacgactttttcagttttgacaaataagtatttcaaatctttctaagtctttatatttgatatggattggttctctgtaggttttagtcagaatttcgttctttttttatagttgagttttagtttttcagttaggtgtttatatttgaatttagcatattaagtttaattcgaaatttcttggcgtggtttgttttttttagttagtatttttgtattgcaagtcgaaactttgactctatggtaacaactatcaacaaaaggagagttttttttaatgagctggtgttgttgtttaagaatgttataactttattatttaatttttgggtagttctgttccatgtaacttacgataagaattctgtagtccatgatttgacaaaatatgtcattcagttagacaataaactatccatatttgagaagatgccaccgccaattataaattgctacatcattaattataatatgtaattttaatcaccacataaaaaaaattatccatcagcatacattatacgaacttcacaacacataagaagataaattactgcatttttttttttcttttttccaatcacttcttatattctataataaataaaaaaaaaaaaagaaaaatccaaccacaacaatcttattaattatgtgtgcatgtgtacgagaagttgtaaaatatgagatcaaccctcaccgaagatttatcatcccattacagatgaattattaatttttatttttatcttcatgattttaaaatttgactcttcttatgttaggacatggaccccacattagggttttaggcaagccgcaaattacagttcctctcttcaccaaacttactttatctcatctccgacgatctctcggaccttttcttcctcattctttctcctcacagactaagccggtatgtccacacttctagtttgatctaatttgtatctgactattgttcataatgttcgattagccttacgattcttcattgcctgttcttatatatatttggaaatgaagattttatgttccaaaaattactgttgattgagatatcttttgtttgaattacgatttttctgtatatgttgtatgtttttatgtaaattatggtttatgggcgtggttgacattagaaagagtgagttatgggttttggtgatgtcggagatgtatttgtacttgcatttcgtattattggtgggttgaactggtattttaattcctttaggtggaaatggagaagaagattgagattgaagatcctgagaagaagaagaagaaggaggagaaggttttgttttcatttctcgaattttgtagttgttttcacgatatgtatgagtaatatttgagtagctattttattcttgcgtggcaggcaagagagaaagaattgaaaaagcaaaaggctttagagaaggctgccaagcttcaggtatcgatgctaattgttttatggcatgggtgtgaattttaattcttgtatgcattgcacaaatgtctataagtttatgtcttagtttaattcaagttattaaaatattgttaggcacaagcatccaatgctcccaagaagagtgagaagaagaatgttaaacgtacaaccgaggaggagaattcggcagatttcattgatccagtgactgcttctggtgaaaagaaaaatatgtctcctcaaatggcaaaacaatacaatcccactgcagtagagaagtcgtaagtttaacggtttctgatacatctttgtcattaatttcatttccccccaaaaagatattggggtgaaaaaatttatattatgtgctgtggggatatttatctgtacttgctttttccaggtggtattcatggtgggaggaatcaaggttttttgtggcagattctagcagctccaaaccaccatttacaattgtgagtagtactgagtattactgatcttacataggtttactggcactataaacacattttttctgtttgctttcctagtacattggtatggaacataacagttatgctacttaccttttgcaggtcttgccacctccaaatgtgactggggcccttcacataggccatgctcttaccgctgctatagaggtcagtctttcactttcttttttcttttgttatatttacaaatgtttagctagatcttctatctccagcatccattgaggtatgtttatttgatgttttgtatttgaatgtaggacactataattcgttggcgacgaatgggtggctacaataccttgtgggtgcctggaatggaccatgctgggatagctacacaggttggctcttctctgcatatgatgttaaaagttaacaatgtaacttaagactaataacatgacttcattaactcttgtgagggtggggaatgtgcgttgcatggtgtcttgtcatgccagtattatttctggtgttagatgtttagacagaagtttgtgcatcatgctgtcttctgaaatctgtcagatatttcatttatcaaccattaagaacttaaacatgtaatcaccttcgatgagctccaaagtttgttcaaaatgtggcattattttttattttattattttaagagaagaactaggtttctctagcttgacatgtttttgtatttttttcccgtggatgtgcatctatgtcaattatctttttcttgtctttgcattagtttgcatattcaaaaataggttccattagctattgcaagtgttaggcgggagtgttgtgagtggtctggggttcaaactccagcattatataatttagctaattcaagtaccaactataacgatccattagtgctgtttatttgtccaagtttttctttattgactgttatgtgtaaattcatgaagttgtaatttattttatatgacaacacgtctggaagttggtgatacattgaatttattctttactggttggatttgatcttccttggtgggctaaccttttcaatttttgtgtattgcataggtagttgtagagaagaagctaatgcgagaacgtaagttgacaagacatgatcttggacgggaaaattttgtctctgaagtgagtttgctgaacttgggctaaaaaataaattctgcagaacttttaaagtctgttctcatgtatattttatgttgatttggctgtatgactgcaaaggtttggaagtggaaaaatttgtatggtggaacgatattacagcagctacgacgcttgggtgcatctttggattggtctcgtgaggtaaggatgtaactttgcaatttactgaacttggtttgaagattatgtgaattgatatggataaaccaccgtatataatcaacagtttgtatcaagaccagctcactctttcttgttttaacgatctgctctattttcattttttatattattcagtgttttacaatggatgagaagagatctaaggctgtgatagaggcttttgttaggctttacaaagaaggccttatttacaggtatgctataactatccatttatttgtcaaaatcaattttatatttacatactgactataaaa

SEQ ID NO: 16525 - DNA, 6305 bp, Cannabis sativa
gatatatactattatttcaagtttaacattgcaagtatactaaaaatatatattatatactcttttgcagacgcaaattgatcaatcgaacattgtttctgctgcacaagctgtaaaccagttagcaggtgctgttgttaatctagcaggaaatcagctgttaacaaccactgaatccatagatgcatttccactagcagatcttttttccatggaacctctcgtggggccatctaaaaatttaaagaaggatactgtccccaagtttgatgtggcagattctgctgtggcaaccctgaaggggatcaaagcactggctgaactttgttctgatgacttttcttgccaggaaaagataactgattatggggtcttatgtttattgaaacgccttttattatctgatgactatgagaaactggctgcaataacagcgtacgatgcttccaagatccatgagccacaggaacgaaatggaaatgtccctaataagtcatctgaatcaggtaataacgatccatctagtgtccgagttccacctactgctcacattcgaaggcatgcagctaggctgttgactatcctttcacttcttccaaaggtccaaaaaatcatggtagcagatgaagcttggtgttcatggcttgagagttgtgcaaatgggaagatatcgggctgcagtgatcttaaaatacaaagttatgctagggcaacactgttaaatatattttgtcatgaagaatctgcaaatgatggtatctccaaatcggatactgcaaaaagaaggaaaccatgtcctcgttatgatgatataatctatttaatcaatcctgaactaccccattggaagtgtcctgaaaacagtgataaagacgggttatcttcttctgagactacagctattgacaacaatgataaatctgtatctaaaccatcaactgatgacgacgtgtctagttcagatgcacatgttaatagatcagaatcagtagagacacctctttttgatgttgtttttatccatgggctccgtgggggtccttacaagacatggcgcatttccgaggacaagtcatcgaccaagtctggcttagtagagaagattgatcaggaagcaggaaagctaggaacattctggccaggtgaatggctctcagctgattttcgtcaagctcgcatgttcacacttaaatacaaggtatgtgtttttagttaatggcagtattttaaattgtagctttcatgtggtggatctgcaagctagttccctggatttactaattacgtgctgtgtgaacagacaaacctcacccaatggtctggagctagcctgcctcttcaggtttgtaattttggctcacgaaaactttgtttctcagatacatttttgattatttaatccccagactgctcacactacttgagctaaacttaaagtggcagcatattattatcatcattatcatcatcattattattttctccaagtgtcatataagttcttgcgtgctttatgcaataatttacgggttgtattaagctttcattggcatttctaaagtgtggataacaagatcagttttcttaacagttggttcatgttaactgaaagtacatcttatcattatcagcgaaatgttttcttcatgattaaatttcaatttgttgtgcaggaagtcagttccatgctgttggagaaacttgttgctgcaggaatcggtgaccgacctgttgtttttgttactcacaggtttgtttggtgctcatacacataacagtattcgattttcctcttggcactgactgatgtgtgtttaattattatttcggtttgtggagggaatgtttgattggtcattatatatcagttgacaacatttttttcagtttagtgtctacaagaaattagatgattttagaaggtaatgggttgttctctgtttgcagcatgggaggccttgttgtcaagcaaatgctgtataaagcgaagacagagaatttcgataaccttgtcaataacaccattggagttgtaagcttcacctaaatcaccactaaaatcttatttcttgggtcgcaattcttctgttactaagattttgtatgtaaatgatatctctggtttcagatattctacagctgcccacacttcggaagcaaacttgcagatatgccatggagaatgggtctggttttgcgccctgcaccgagtgtgagtattcgtactcatcaactagctgtgtatggtcccctttctctaaagttgataacatttagtacttgttgtttctcagattggggagctaagaagtggatctgcaaaattagtggagcttaacgactttactcgacatcttcacaaaaaggggctgcttgaagttctcagcttctgcgaggtaagtcttaaagcgattcacttgcatgttttctcaattttctttgttagctttgattgatatgtatttcggaatgttttcacagaccaaggtaactccgatcgtagaaggctacggtggatgggcttttcgtatggagatagtaccaatcgaatcagcatatcctggattcggtgaactagttgtaagtataaataaacatataataaagtctgtatcttggattatagttgcttctaatttattatgacatttttggagtaggttttggagtcaacagatcatataaattcttgtaaaccggtcagccgctccgatccttcgtacacagaaacattagagttcttgaagaagctgaaggaccgctacacaccaccaccaccgaaactggacagaggatcttgacatgaactcggtacagtgcaccatgtagattagattcgaaagacggggttggtcgaaatcttgattattaaaaaccaaaagaagaaagattattgagtacattaacacaccagagcagattattttacttttagttcctctaatattctttcactattgttttcgttgtaaataatggctaagggcagtgagtttgaggagatttgtgtatactcaaatgattcaaaaacagaaaatagaaagaagtaattatattatggctggaatctttatcttatgttctattttgtttgtgaaataaataaaacattataaattaaaagaatataatttaaaggcatgcactttatttacattattttattttatttttattaaaagaaagaagaaaaaaagacttaaaattacccatgaaaaacttgataaatatagaacaattgaggaagaggttcaatgagaatgagaacatgactcttaaaaaaactcaaatttagaaaatgacactgttttctttacattatcattatattgaaaaattataatttatataattactcaaatcttaaattctaatatgttaacatactcacgagtaaccaagttttcaagtaaaattactatacctaggaaaatatagtgtcaatatcattatgcatggtttaataatttttcttagaactaaaagagctatgtaagtagtgaagttctataacagttaatcttactaaaataacaacattgtatacaaatgtatctatatctataaatataaatatagatattaaaacatgtaaaataatgtagcttaattaattatgtgctctcttgaaatgaatgggagcgagaaattgcagctggatttgcttcaaggacaggagaagaagaatatagtacattatcctttccttctattttactatgtgctaattttttgtaaacagaattttctttctcaaattcaaaccctaaactgccttgaatttgattcttcgaagcctcactcgatgccaaaacaccctcctcggattcttctctagagtgtttgccaagagcaggcaaaaccgaaacatttccccgtgcttgagctgcagcccaaataggcatacaaccccagtacgaggctgcttgtacaaattggatcggaacagttgttggaacagacaaaaccggcgcttcaaaccattgaacctggcttgaatcactgggatttgacacaacaaattgttgatgagaatgttgtgttggatcccatgacacaacaggataacattgttgaggaggatgagaccgagcagcatgttgctcggtcacatttccttccaacgatgaatcatcaccattatgacaaaatgtcaagacttttccatttgacggctcatcactactactagtgatgcgcgcgccttccccagatgccattatctgacgaaactgagaggctaagtgtttgttctttcgccgtcctgcccctataggaacattcctcatcgagccgccagctgtccaatatctctggcaatttttacaaaaatgtctaggttgattgacattgtagttgttgaagtaacaaaattttgtctccatacttttgcatcttggacatggaattatcttatctggtttcttaaacactttttgatcttgttcttctgaatttgtttcaacagagctctctatctttgattttgttatttgatcacttttacaatcctgaaaaaattcaattgaaaaaaacttcaaattttcatatatatattttctttctatgaaatattcatatcaaataattgaaagtacaatccaaaattatatattcaaataatttctttctatgaaattatttatttttaacattggttttatatatcaaagaaaacaaagaactcagacaaatgatatatttactcataaaaacacaaaaaatgaaaatattttttttttaaaatatgaaaaacaaataccttgaattgagaattggttggaatttgattatgtgataagggaattgttcttccaaagagcttaataccttgatgatgatgatgatgatccttactactaatacaattttgatcactaatattcttaatttgagacataattaacaaccaaatttatttccacacaaaactcaaattcacatctccaaaaacccataaccaaaaccaaactaaaattataggaaacaaaaataaatgtttcaaaggaaaaaactctttataacaacacttataaaagtactcaacaaaaagaaaagtcatacatacatatcctaagccaaaaaaaaaaaagcactatcaacgtgaaagcatatcaaaagtttgataacacaattaattattcaaaattttcttctttttttcaaaaagaaaaaaaaaaacaagcctttttccatatctctttttttctaacttttaaaagtcactttttttttgctttttttcttttcttttgtctttatcttttttccttttttgggttgaacgttgttgatctctcatttgtttaattggagggatcaaaagaagaaaggttgatggggttgtgccacgtggcagacaagtcagcagaggaaatgaattataaccaagagatgtctaattgttatattaatggctaagaaaagataaaaagatagagacatgaaattaaaggaagtgaggaaaagaaaaagtgaggtgagaaaatgaccttttgtttttggtttatgggaccctttaaaagaaagtaaaagaaaagagaaaaaggtgatgaggaacttgggtggaaagtgaccaaaaaaaggaaaagaaagaaaaaagaaagaaagaaaaaaaggtttctcttgcttttcttaagccgccttcaatggctcttttctttttgttgttccaccatttgtgcttttaacttctcaatcctttacttagctaaaaattttatggagtaactattggtaggggcattatggacattatttgaaaaaaagttataattcaaatttgttgtatggtgatcaacactataattataattgagatatttgtcgtgaaattcttttaatatttttaattgttacacatatgatcttaataaaaaaaaaagtgacagataaagtactttacgttataattttgttgcagttatatcattttttaattgttaagtaccaacttaaaaatatgtggcggcatattttttagcttatttaatacacactctaataatatgtcgtcacgtgtttttaaattgacatttactggctaaaaatggtatgactgtaacgaaatcgtaagataagatatgtttgccaccactttttttattagagttatatgtgtaacaattgtaaatgtcaagagaatttcggcccaatattctattataattaaagtagtattttatttgttttcaattttttttaagtaatttatgattaaaataattaattgcatgagtataaaatacaaacacgtatgtaagtaatttttgacagggatattggcggctaaaccacttgaactt

SEQ ID NO: 16526 - DNA, 4404 bp, Cannabis sativa
ggcccaaaacttccaattaacttaaggcaaagctaaataatattaataattggagagatagatgatgagtcgtttaaaagttattactttgaattaatgaaaagaatcattttctctctaaaaagaaaaattattgtatttactacaatgggaatggtaaaaaaaaaagttaagtttgttaccatggtactcattttttatttgaaaaatagagaaaataaataatagttgtctcttgctttttctagtaacaactatttgttttcattaatttaaagttgttggatgcattaaagagtgggacttatccaagagtttgtccccttcattttcacttcatcttttccatgcataccaaacacaaaaacaaacaaatataaaaacactctttataaacatccaataatagttttttttgttgttacactctttcatcatcatatattctcaccccaaattcaagccaagggaaacaaaacaaacaaagaaaatatataaacttagaaaattttagaattttcaagaaccgaaataaggtagaatcaattttgcgatggcaaatctaagtttgttgtggatgtgtggtcgagcaagtttttcggtttttgcagttgtcattatgtgaaatggaattatcaaaatttgaaacgttattctcagtatggttgaatgtattctgatcatgtttattcccttgaatttttttcaagtttgtgggataagaaactactcgaatttcccacggtctagcagccacccaacgctcaacccaactccatccccaatcttctttccctagaccgaaagaaacttgtccaagatattgacttgaattagcccgccactacaaaaagaagaaaaaaaaccatatatgtagtagggtaagattttattgcactcaaaaatagtaaaaatcaatttaatcagtaattagattgatcggacgattaaaaaaacctgatgaagaaatgcatatgccatggctctttccctcttgatagcagcctcttctctttgttgaattctgcttaagatttcctccatagtttcagacccaccacaccattcaacctactcataatttcaatagtgttactaagccaaaatgagaaatataaaacatatttttcaatatctttttttagtcactaaaatctaacatacaaaatcaaaaggttttacattcattatattgcattgtgttgccaaaaatttatttttctacaaaatgataaaggaatattgcacttctcttatagcaaatcacgtgactaaatatcttcatttgagtaagtcacacgataatatataagagattgttgtatggtgttaaagacatttcatatagatatcattatgtcatttctttcgtgaataagataatttttttctaattattccctaaggtacctaatcttatgttgattcactaccaaaacttaggtttatgaaagctcaagataatcttgtttccactcatttggaaaaacacaacccaattttgtttgtggacaaaaatcattttcttagttaattttgtcatgtttatagtaaatgtaacatgaaatatgttttttaattttcgttttatgaaattttttcatataagagaaattgatactaattagttactactacattaattaattattagtgtcgaattagttatttaaaaatttaatgcagtggtaatagttacaatcttatcatatatttacttcaaaaaatctcataaaaaggcttatttgtggtgaaacattcttatgctttgattttatacatttaattcttttatcttttttgtttgtgacaaaactcctttaagtaaatttgatgtatgagctgaatattactgtattgatttcgaagttttacttttatgtatacacaagtgtacacagtggttatctagttggtatttaacagtgatatttaattgatgcctcagatttacaaaaaaaaaaaaaaaaaaaaatcacaaaagaaaaaagatataggaattaagtgtataaaaattaaaatataatagaattttgctgccaattactctaaaaaaagaatttaattctactattattttatgtctatattttataaaaactaagtttgaacttcttattatagttttgtaattttttcatatattgagcatatttcattttttttaggctaattataatttttatcttttaaactttgatatttattaaattgtgtccctaaactttttaggttattaaaatttcttctaaactattagattttgaatttaagaactttcgtctaatttaataataaaatggtaccactttcaatttctattatgataatgttctaaatatgacattttttttagttcattatttatatgttataattatttaagattatttataaattttttaaaaaaattcaataatttaccatatgaaaaataaggtttaaatatttttttaaatgcatgactaattatcacaatcaaatgaaaaatataattatatatataactataacataaaaatatgtttataaatattatagctttaaaatttgtaatgtaggtctttttattagttaagagttaagaatatccttgacttgcatccaaaactaatttatctaaatttctatttatatatataaaaaaatctccatatttttcttatctattaaagtaataaatgagactatttattaaaaaaaaaaatgaagtcttgatggagagaacattcccatactcctttcttaaaatacctactttggcattttgtttaagtaggtcttatccaagaagaataaaatatatatgacaaaaaaaatatataaaaaagataccaattaataatagtgggaataataagtcatgctattcataaaaactttgcataaacctacacttacataagagattatgtcacactagaatcatatgaagaaatcttatgtccctttttaaaattaaaaaaataaatggatatataccttagttattgtctaaccttgggaagcaaatttaagaaggtgacaccatttaaaaagaaagaaaaaaaaatatttttccagcaaaaataataaactatttttttcaattattttacattttaattataattatcttatttttttttaattattttatagtttatttataattaatttatagttgtcgtgaggttgatttcttgttgtttttcgttatttttttactttttactaaaaaatatgtatttttgtaattttaaaattttaaaaaaaaacatttttataaataaaacataaacaatttgtattttaaaaaatttcctaaaataaaagaaaaaaaaataaatgtagtaaaactaaataaaagtaacaataattaagttactaatactagctagaaattaatacctcaagttggtgaatttttgcttcaagttttatctgattctccaatttcttttgtttaattcgagcttctttcaccatacaaagcctccgagccctaatttggtcttgtattctactccatgaatgtatgtgattcaatgcagacattgtttgatctttaactgtgtgaactccaacaaaatcgcgaatttggacggttccctttacgccacttatcgttgtagacgtggattcatcattaaccgtctgatcttgatcaaactcctcttgagtttcctttgccttgctctttagattgtgcaatactttttttgcctacaaatacaactctcttgtgtgtaatcactatgcctataatttatttttagtttccaaaataaataaataaatacaaaaataaggggttcaaaatgtagttggtttaagtagaataattagtcaaaaaaaattagtttgaaaaatgattttctttttgttcttgaaccaaagttgaatgttcttagaatattttcaatgaagagctataaatgtagtacattgctattttttttttttttgaatattttactaaaatttaaatgtaaaatatatgttaaatttgatacaaaagatattttaagttaaattcaactcaaaatatgcatcattaattagagatgttcaagaattttgaccttatgtaaatataatatggtatttttctaaaacaaaaaaatctttagtataaataaaatattataagatttttagattctaaacacagatttaactcgcctatactcaaagctaatccttaccaaaaaggaacgaaaaacagcttgaatcttagtggcagctgtcgtctcttgattggatagcgttaaactttcatcgacggttgtttcattggtaaccaaatcttcctatttcaaaaacacaacaaaacaatgtaattatctatctaagaagtttttatgtcaaaatccaaatcaaaccattatttacacaaaaatcaatttctatttacttaattgg

SEQ ID NO: 16527 - DNA, 4646 bp, Cannabis sativa
  modified_base (3899)..(3899): a, c, t, g, unknown or other
aaacaagtaatgaaattaaatctatttctttattgataattgaataaaaagattacattgaaatagagttttatttaggacacaaagcccaacagtattcgtgaaaagattaaatacccacaagtaaatttgcgaatattcacatagagtgacgaatattcaaactaaaataacgggtagtcaaatgttaacagttaatatgtaaagaaaaacaagagatttataatggttcagtcagagcctggtttgcttaattcacttttagaagatgtttgttattatttttattccaaaagaacggttttttacatatgaacaaagtgatcctttagttcatacaacctatcagacaggagctttattacatttaatttaaataaaaacgtttaaaaataaatgatcagaatagttttgatagttcttatttaatacccaaatgggtccgactatcgaagtcacacgttgatcgttcatattttgagtaacacaaacttacgggttctttgatactactcgagtatgaggtctgcttgaacctcttaggctcttttatcaaatagaatgcatgtaactacatcgaccgcatattgggcattcatcaactgtcaacatagaactcacaggttctaagtgagttgtcgtgcacattagttattcggacctaatgatcgtaaagatgtgatcttcacattgggcataggggaaacgtttttgcatcgcatataatcagtatatgcatgacttataataatttctctgtcatggttttatttatttatgccatgcatagtgcacggctaggccttgtctcgatcgcacattctcacaagtttttataatgcgaggatagccctactagggttattgacacgtcatccttttccaatcaagaactcggtccacgtgtcattcatatatgagactgcactcgtatttcaagatgaaaaattcatctcctaacacatgtccctagttgcatgacgacaattgtttgtcacaccaagaaactattttgagggacagtaaagttgttatgttgccagtgatgattaattaccttcttaaggtttataaatggcggttggaaattatgagtttatcttcccaaggcgccacgtaatcaaaaccatttggggtttgtgcagaattgtctcgcgacagcttttcaatgacgtgtctattggttttctaatgccacatgtcacgatcgtaatgaggggctataattcctataaaagccccaagtacgaaaaatgagagtttcattttccctctcatttcatcttccaaatctctaaaaaaatatctcaaattttccaaaaatctctcttggttttagaaagttactcaagaatttttgttgttgaaacttttggagttggattcaggtttatcttgaagggaaatatcaacaagcttttgtatttcaaggtagattttctttacttcttggttttcttaaaaagattttgaataatcgcatgcattttgggttttattggttaaaagtgcatgaaaataaatggtcatattcttagcaaataaaaatataactttagatgaatcgaaacaagccatttgttggaggaatttagacaataccaaataatgtaagtgctaacttagagtagcgactactcgaagaatataatataaagtatatatgtgagtatgtaaataatattaaataaacacaaaaattatagtagtttagcaggagctcgagctcgacccccctagtccattattgaaagagtactcttgctctgtatattttattatgatcagcccagccccatttgaatggagggagaagcccctacttataggtagtaggtggtggttataaaaattagtcataatgagaccgctacaaataataataaaattcctattaatcacattgattacagcagttataaagtacataaaaagcttgctttaatgatacttaaatgcatgaccgcttatttccattgattgttgtctattcgcaccttttatgttgatactgtagttttatttaaatatagggaagcctctttcgataccgcgaggtacctattttatctaatattgtaaggtctcttttgatactatgagttctctttaatgtagtccatcttgtggtggaggggaaatttatcccaatagcccatgcccctagttctttaacagagcttgttctgcgctagagaactaaaagttaaccaagcctgcatttatcatttgactattaaaactcacatgtttattatatgctcatcgcataataatgattatgtgaccctcaagttttctatatggatgcgtgaacctcttagggttcttatcgatgcatgaacgtatagaaggttttatcgatacacgaacctctcgaggttttatagacgtatgaaactcacatggttattaatgatatatgagcctcttaggatttgtattgatgcatgaaccttgtggggttcaaattgatgcatgaacttcttggagttgttattggtgtgtgaacctcgctgagtttatataaatggatgaacctcttgaggttcgtatatatgcacgaacctctttgggtttgtataaatgcatgaacctctcggggttcatatagatgtgtgaacctctaggggtttttagtaattcattgattgcttgcaattatactcatcacgtattggctacttatgtactgacagcatacaatttgcaggttcaggatgagttgtcatgcacattagtcattcagaccaactgcttgtaatgacaatctttacatagggaatggggagaaacacttttgtcgtcgtatgtttcctacatgtcacaactgtactaacttttctctacgtccaacttttattctattactatgtgattcgtagtgcatgattagaccctgtctcgatcgcaccttcttgcaagttttgatcatgtgaggatatattttgggaatcgctccctcatcatgcctctagttctttcaatgataggttgttgtctaattgttgagctttactcgagggacatttaggttgttgcctcacgggtgatttttggttttaccttattgaggttttcttaattattgttggttgttttttttttaagatgctttgtgagcacaacccattagggtttgtgctgcccgattagacaaagagacgtcttttcataaattgcctaaatgaggttgttgacctcacttttagccaacaatactgactcaattaaagagattaaaatgatagataataattaataataattatataaaattaagaaataagaatacagagatttatagaagtttagtctcgtgatagtggtaatagtctactcccctttcacttatattacttgtgagaaaagaagcaagaagttcttgatctctcttgaaagtttataattttacagcataagagctctcttgaatcatcgaattcggaaccctgaatcatgtaatgattctattatttatagggaagaaatacatcaattaggtttcgcaaatcaaagagaaataataaaggaaattaagaatgtttcctattttacaacaataagatccatgtgaagcaactctaatacttttaaagtattgatatcagcaacacttttgtgagtgatttttaattgtttaccaagttgacatggttcacacttatcaacactttctttacccagtttgagacgaccacgaacaatacctgcatttgacaattttttcagattttttataattaatatgtccaagttttgcatgccacaaatttgtgctgttgttgatggttgaatgacaagtgaacacagatgttagggtataacaattatcaatagaccgaaatccttgcaaaatacgttgattatcatcattaagtacataacaatgatcactntcaaatgagacagtatacccttggtcacaaatttgaccaatgctaagtaaattagcccttagtccttcaacaaacattacattttttaatctgggcaatccttcaaaatcaagagttcccataccaacgacttttctagctaaaccattaccaaaagtgacttccccacactgcataggcttgatgttaatcaaaaattccttgtcacttgtcatatgtctagagcaaccactatcaaaataccacatttgagaagcagcactttgatcagaaaaacgagctagacatttttttcttaatccatttttgtttcatacatctatgtttcttttgagatttttccaaattactaaaataatttgttttatacatattttgcatggtgaaacatttaggtctgatatgtcccttcgtaccacaaaaatgacaaataggcacacatctttttacctgagatcttactcttttggaaattccaggagactttgcttcagcagaaatagcttctgcaacgacaggctttgaatctgttgcagcaaacttcaaatttacagcatcaggaaagttcgttgtaacactagattttaccaatttcgtgatttcaaaactttcaataccatttgatctaatgccagcaaagcgtctttgacctgcattctgagcttctacaaaaatagaagattcaggattaagaatttggacatttttcttaaaattttcaagttccttctttaaaagagtgatttt

SEQ ID NO: 16528 - DNA, 14213 bp, Cannabis sativa
  modified_base (67)..(67): a, c, t, g, unknown or other
aaataaaacttcctaaacaaataaaaacattaaatatgggatttagaaacctaattacatatatatngcatatcaaataccataaaaaaataccatagaaattggtcaaacttaaatgtgtcgtatttatcataagaacttttaaaatctcatactaagtgtaatttcctcttatacaatatgcaaatataatagcttcctagttccaacaattcaccttatattttgtaacattgtgagaatttaagagggtaaatatcattttgtatgttgtatgttgtaaaaattattaattgatttctttgttttattaagtagcaaaaatagatcttgtatttttttaaatagtacaaatagaattctaagcttaaatttcgataatttttttttaaatataatcaacttgaagacaatttctaacacgaatagatgcaaaaaaaaaaaatatatatatgtatatatataatcagttttattaccacctctagattagttattattaagttttattttgacaattttagaagatacatggttcattatgtcatttaacaaaacaaaatgtctaatcgataacttttacaaaatacatggtccaacttaatatttacccaaattagaataatttacaatatacaaattagaaaacagcttttgtttgaacaatttatttcacatatttataaagtaaaagtggcgtgcatgtaactaaagtggtgtttggttgggagaaatgaaaatataggaacgggaattgaaatatgaatggaatagaataaaatttaaaatgccttaaaaaaattgataagaaaaattattaaattttttcaaatcttgcattgaaatgatctttccttccattttaaaataaagagtcattccaccaaaatggtggaaaggtcattccattagaataatattctaatactttaaaatgtaaccaaagaaaggaatggaatggaaattaatcttgctttttgaccaattaaattttttaaaattttgcagaatatcttaaataattacaaagtatacaactatgaaaaattagacaaaaaaattattctaaatgccagaacaaaaaagaatgcatcgatgtaacccttttgctaatttttacatattttcttcaaagaaccacccttgatgcaagaattctctatcaaaatgggaattatgatgaaaacaagtgggttttgtaacacttttttaattaaaaaagtgaaaatatttttcaaaaatatgttttataaaattattttcattttcaatatttaattcagaattaaaattttaaaattttgaataaaaaaaaattaatttttttaagcagttttttttttcttaattaatattttgaactctgaatcaaatttggaccttgggacctgaatctcagccccaactctggaccccgaccaaacccagactcggccagaccccaaccccgaccccagacctataacctaactcaggacccgaaccttagacattagagcaagacccgactaaacccttaccacggacccaaacccaatactcgacataggacttggactccagcccacattgacaccatgaccccaccctggacccgaccccaacctggaacttggacggctagacctaaatccggacccctgacctgatccgtgcccgttttaaataaaatcaaaacatgaaggaaaataaaaaaatttagaacacactacttttttttaaaaaaaataaattgaagaataaaagtagttatagaacacatttttatttttaaaaaataaaaattttgcattaatatttgtgattaaataattaaaaagagcaaaaatgttaccaaatacctctaaaattgtttccaaatgttaaacgagacaaaggcagggatctcattcttcattcgaatgggacccttctaaaaaaatgaaactcttaaaaaggccactcagtccattaccatggttggctttgttccactcttgaacggcccacttctgatttacatgtcgcgcattcaccatcttgtaatttgattttaagaagctcctctcttgcttctttgttcctctcacagaaaactttctaaaaagaattatgaggaaaacttaagaagaaggtatcaaaaaataaaataaggaaaaagaacgaaaggtgggaaaaaagggaaaatggtaaaagaaaattctagcctcacctgaatcctattcttcaaatttctttttataagaaaaagaatcagattccccaataactacacaatatctaagaaaatggcgacaaaggaggttgatagtgaaaattgaagcttgacataagtttttgccacaaatcttggttacatttaatactatatgacattattattgtcgcacacaaacgaaaaggttatttggtgcgaaatgcaagtgtaaagaacacataacaaagcagcaatcggcatgttattgagaaacatatatttttataatcagatgtttacatcccaggatccatttaaaaaaaaagaacaaaaacaatcccacaaacacaatttgtgggaaaagcaaaatggtgaaaattttcaagaataggaaaataattttaattgggtaattatggctagatcaattcttttctacattcacaatggcacaagaaaacttttaggatgggggaagagaaaggcctcaaagaatatgctaacatgcgatccgaaaaagcaaactaactgaagctatgggaaactattcatattgtgcccgtcgtaacgtaaattgcaacttgcaacaaaagccacaccacatggtaacagagacaatcggtccgcaaaatcacctcttcttcagccctttccaggaaacctgtcagtcaaccaatcaacacttatatcgcatcaaaatgagaaagtgagtggataacataaaataatcatccctcaaaagagaatcaatgagataaattgcatcacaagatcccatgacatcacagcagtatttacaacttttgttcccttgaaattccaattatagtattctagttatgtataaatatgtacaagggtatcttctacatgatatatcattgctcatacagagaaaaaaaagtctcacctaagtaagggatccatatggctggaccgaaaatcttcacaggaacctagtgatttggtgtcagcactgcaaaagtaaaagaagcaagtaagaactaatatgtatgagaaaattactaagctggctgaaaacagaaatctatccacaaattcccatataaataatctagggaacacagacgtatgacctactgccttagcaagcaacaagtcagaagaaatgaaaagatgttgaagcacttgatagtatataaaaaacagaactgaacaaatagttagcaatcatcaaatcaagcaaaatcaattagtgaaacatcataatagggtcagtatttagtgtgtgtgtgcgtgtgtcagaaatataagtctgtttaagagatttatttcattttggttagttgtggaaaaggttacaccagaaacactggaagagcatgggagttagaaatggcactttagaacaattaatcaccagagacaaaattggattttcacactggcccaaccaattccttttaggctgacgggattccttcattattcgtaccccactcttcgtcagcctcgttaccattaacgagtactgcaccatctgtagaatcagcatccaccaccacagcctcctcttgactcccatcttctccattctgttcctcaactgtatgttcatcattctgttcctcaacaatctgttcaccattctgctcagtaacctagtaatataagagatcaatgttagaaataaataaatgtgttattcctgtttcatttttttttcaagcaacccaataatagagaaatcagcactaaacaaacacatgcaaaagttggtatgtcataaccatttcatttataggaaggatattgaagaagatcaagtaactgaattgagtgtactaatcatctagaaaataatctataccataccataatccaagtaaaagaaagtggccgcagaaaaaataaatagagcaactaatatgaaagttaggccctgagtacctcgtaacttgcatctccgttttcaagaagttcctcttcttcaacttgcaagttcctgaaggcctccacaagggtcatgtgtgacttatcagcatggtgtaagtattcctctgcacctgggtaaacacccctacaaaacaatcagaaaggaaaattattaaatgtgtgactttagtgtatcctagaaatgggaaaacataaattgaatcacttgtacacattagcaagcacaaacaaaataatagctgcagcagaaagctaccttgtctgtgcagctttagactcaacagaaagagcaacttgccaatcctcaaacaaattaggatactcttcaggatcagccaacgactcagcagctttaggattaacctgcggaaattgtgttagaagttgcacatgagaaacatggtcatgcaaagtgtaaacataacaaaggtgagcataaaagttaccttgtttagatcttttctccaaatagctacaatctctgacaccttacttggaagataagatcgagccattagagcagcctcaggtatccgcttactgtgacaatgtaaacaaaaaggataagaacatcaatacccaaaatcatatgatttatattttcccatttctaggatacactaaagttacctttccaccaacagctcaaggcattcttccaaacgacccaacatgaataaacaaaggaatgcaacattgttctttccttgctctttggcaagaacagcaagttctgatatcccttcagcatctcctaaagaagaatagagcagaagcaaaccgcttaagtccacagcatgctttaaacaatcttcggccatctctaactgtaataaaaaaagcactgaataagaaagtgaacttcagaaagatataaagatatgactagcattaaatatggtccataccctcccagtagacattgctagctctcctaattgcttccatttagactcactttgaacttcagatgcaatttcctgaaaaagaccattgagaaagaaattatcaaggcagaaagcagcaaaaaatcatcttcataatttagtaagcagcattcatgatgctagttaaatatccttgctaacataaacacacggatttacctttgcaatatcaagtctactaagctgaatggctaagtcaaatctgtaatcagggtcagttgccacttcaagtgcttcttctaccataccacgtgattccaagaaatgtgccacactacaatcaagaaaatttccatggttagtattcaatagaaaatgatttgcagcaattgttatgattttctggttctaaaaacgattaggggtaagctaggagttcaatttgaaatatacagattttttctttgggagaaatttccaaggattgaacatcattgaaaacatagatttatgaaccttgcatcatacaaacagaagcattggaaacagttttgaaaagactagaaaacaaagccctaccattccacaagactaacagcaaattccgaaagaattatttaaatatataaatatattatatatatatatatctcacaggcaaaaggttctgatatacctattatggtgctctttgggaattgaaggcaagagttgattggctctttcaaagtctccccgcattacaagagttttgtactcaattaggctaaggagtaatgtgtaccccataacactgcacaggaaaggaagcagtataaatcacaaagcaatgaagataaatatcacagcttttaagaacaaaagtagaaccacacttacttgaactctttgtcgatcagataaaccctgctttgactagcaagataacccaacaagtacataggtctatctaaatgaaacatggtggttacctgaaatcatagagccacgatacattcagctttgaacattcatggactatatatgaacagactagactgcctgtaagaaattttcaagacataggatagatgatgcaatacctcaccaccaacacagtaattgagtctccaggaggagttgttgtaaatgaaacaatccccaacccatagaccagtcctaacacgttcattcatttcatgaagaagctcgaaagcatcttcaacaccttggtcgtcaatgggtcttccactatccaaataagaagaaaccacgtcacgctgccaaaaaaagatcaattgagcaaatcgcacatgcatatgtaactagtgaagaaaaagaaacacacgcttgttacaagattaagaaactatctaattcttcttacattatacttcaggatgtagaacgacgtatcacttgcaatggctaccaaatcaccactatcagcccaatagaggttctaaaagttcaaaagtagaaataaaaataatattaaacaagagtaaataaaatgttacatataaatatacacaaaaaagaagtatgtagtgctcactttcacattgacatcaattcgccgaatcaacctgcattcagtccaatcataaaaacaaataaaatcatttgagcacattgccaataaatttccaccaaaaatgcgctcagcagaaaaggttggccgaatactcttcttttcctgaaacataccaagtccgttaaaatgaatccctaggatccaataaagaaattttagcattcactaaatgacaataagacttagtcacataaagctcataaacaactcaagatgcaagtacagatatatgacaggaagaaaaataaatagaaggaaaaagataactaatgtaaggagaaaaaagtgctcttaaaaagttcacccctcattcatacaaactagggcaattagaagaataacgttaacagaaataaggttagtaaacaaacctggaaggttttactgaaaagcttaatctttgaggtactctctcggacagcatattctccatcagtggaccaaacgaactccaaagctgaaccaaaagatcgatttctccatgccaaggcagtataaataatgtactcaccatctccgcatacaacaacaaacctcccatttggattgtgttttagactctgacagaattatacaattggagtaagatgccaaacaatacgcacatgtaaaagggaaccaaaaagtctacagcatagtttatatcttatgatttcattttcagacaaaggaaaaaactgttaatttgaatactgcattaaaggagggggagaaaaactaaattatctttcaaaattggtaagagactattcttacttatagcttagttaaacatctaaaatggacatgcaagaacttatctctacttattttgataaaatttgttagagaagaaaacaatcataaagaaagataaatctagaatatccttaaaaatgtaactcatttttctgccattaaaataaaagttcaagtatataactaacctgtgggtaaagatcgcaggtacccaactccttaacagccaaaggtaatctctctccatcagtaacctagaaagcaaaacagccaaaaactctataatgtaaaatgtcaactaatgagtcaacaaactcagttgtctatttagtttgatgctgcagagataaagagtgtccaaatgagttcaaacctcaaaatctgctcccacactcctaatgttcacagtctgaatttcattatgcttagcccaaataatttttccactgttgtccatactagcaacaggcacttcacggccaagtttgaccataatagtcccttcatcataaccaatcacaaccctattgaaggtaaatgagaaaaacaagaaagaaaaattattaaagcatacattcagcagacatgtaacaaccggcatatattactctaacccaaagcctgaatgatggaattaaaaataaatgagggaaacaaaaaccaataaacttcaatactcaccgacgtgagcctttcatgtatccaatggcccaaactctctcgaggccatagtttaatgtgttctcaagcctgtgattcaataaaagtatattttaggatatcgaatttgacagtcaactgaagaagtaaaggcacaaatatagtcaatctaaaaaggatatacatatattttacagcaagagggaaacattttattgcccacaaataaagtttgaaatgtgactcatctaatcaatttaatgtttattaaatccaacatgtacttgttgtcttatttgaggtattaatcataaaaaataaaaaaataaaataagaactgatcaccttcataagttttaaacattatattaaactgtaattactactaaaaaaacatgttcatctagatgaaaccactagccagtacaacagacataaataagtagttatataaagcttatcattgactaacaaaatgcactagatattcattctccaaaattataaataacatgagtcatgaggactacaattttgaattcaagcgtaaccatttagatatgagtagattacaatcttctaattagcaactctttaattttagaacaaaaatacaaaatgaatgctacctataggtggttgagtgccaaatacgaactgttccatcctcagagcctgttataataattggaagatcaggatggaaacatacagcagaaacattgtgggtgtggccttctagggtctgaacacaactttttgtttgataatcccaaacctgcttacataaaatagtgtaagaatgctttccaaatcatttcacaaatgtataaccacaaaaatatgaagaaaaggggcaaattaaggaccttggcagtgtgatcatcagaaccagtgattagataaggcttatcaccccctgtaaagtaatcaacacaattcactcctttttgatgagcgtccaaagtaaaatttgggtctggcgagcccagattccaaatctgaaaaacagcacataaccagaccacacatttagcatcatcatatacagcccgatagtataggacctaaaggtagcttccaaagtaccatcctaaaattgcaaatataccttaatggtgcgatcgagtgaagcacttgcaaaggtgttggtgtcctttgggttaaaagtaacttgcattacataatgagaatgtccttcaaaaatctgagtacaaatccaacccttttcccaatcccagagcttaatgagcatatcatcagacgacgacagcacatatggaagtgtaggatgaactgccacacacctaatgtagtctgtatgtgcctcaaatactttaaccttatccattgtattgtaattgtaaacacgaatatacatgtcatcagctccagcaacaacccattgcctccgtgctataaatttggctgatctaactgcaaacacatgaaagcatattgtatcaggaaaattccagtgaaaattcacagaagaaatcaccatagaagagctgaaaaaggtagcagtaagaataagtaccaggtaactcagtgacctcaaaagatttagccatggtctgcagcagtaacaagtagatttgagttagcttctaggtgtcactcacattgacaatacatatatacatatgtatatataaattctaattcaaagcaaactcatcacggtttaacagtttcactaaacagaattaaatatgatcacattacaaagaacaatatactataaattaaagatcactattactaccatatacctgtgattggtaattccagatacacacagttcctgaatacaaactcgccaaaatcctgcaatgacaattgtgattagtacaatctagcaaaaataaaaataaaagaaattctcaaatcacttatgagaaacataaaatttattgtgtaaagccaatgatcttgaacagcattaccatggttctgtcgggtgcagatccacagactttactctttctgatctttgagcaagtttcctctgagcgaacaacagacattaagacgatcactcaacatttccaatgcaatcataatctttaagcgttcgagatctattaaacatggagaaacgaggataaaagaaacgagcaaagtaccttaatttcgagtctgagaggctggtagacgttccaaagacaaagttaaacagtcagtatcatagccaaataaaagtgaaaaaagaaatcccgataaattcaaattcttacaataacatgtttgtttcccggtaaaatcacaatgacagtttaaaatctaaatattcatacgaacttctaatcagtccgcaaaaaatcagatcccatcgaaatgtgcccaatggacggatcttttgattgcctaggagaagcagaacggagagctccgaaacactaactttcccaacaaccaaacataacacaaacaattccaactaacactctaaaatctaacgaaattgatcaaagattataaaattcgaatcaaatcaaagcaaaatccgaccagatctaagatgtagtaagacgcgattacgtttaggggagtatcatagatcttcaactcaccattttcgcagactattgaagcttgggagagaagatgtccaggaaaccctagcgatccaggtgattcgaactctgagaatgagaaggccttcgggggaagtggaatcgaagaagaaaggaggcttttttagagagacagagtttttctccctgtaaatacgagatgtagtagtgtgttgtagctttgccgttaaggtggtgaatttacgaaattacccctggatcggatgactgattttatttgtgaaaaaaaaaaaaagaaattaattaattgctgtgtggggatggacggacagtcgttcactgctgttgttgtagtttttcgagagtggggttcagttaacgtgttttccaagttatacgacataaaacttttgtatttaataaaaacgacatgtcgtttgtgtaaagaatttcaaaaacgaaaatagtgtttctttttctttacatttgcattcctatttataaatgaacaaaaatagtgtttatttatttataggaacgttcctattttacacctctaaaatgtacataataataacagtgtgacatgtatcttaatctctagtgttacataaatagaaagatatttacataatgaaaaattattgttattactattttgttggaaaaaaccttaagcaaaagaaggtcaaggacatcatgtcattgatggttggcatctatcaaaaacaagaaagataatccaattatcaaaagcaccctcctcgatagtaagactttagtgaaaaaataaaaaacccacgctatataatgagtgattttgttcgcagatttttaacaaaacataaagaaacaaaagacaaacgtttaagcaaatcttacaataaaaccaaactgaaaaagcatagaaaaagaactcaaaatagtttgaacacacactaatctatccgtctcaagaacgatattattccatgtattccatgtaaagtgatcaatccaactaagagcttccttcgtactaataacttctgccatctcaggatgaactcaacccttgaagcctttgttaaaagccacaattgtcttaccatcgtgtccacaagcaatgcaacccattacaaaatgtccatactactcaaaaattgtaccatcgacattgaccttgatatgattattaacaagtgtagtccaatgctcgacaattttaatattctcactgaataacaatataaaatcatcttttttagattaagaatatcggtatggatcaagagaacgtctaactgaaaagacaattgttgcagttgttgacaatttttggttccaaatcatggcgtttttagcttgccatataccccaagcagccatagctgcctcctctaacataccctctcctaccctgcttcatagatacagccaccacgatgaaaactcagtatccaactagctgccaacaacgtccacacacgaacaggaccaacaagaacaggcaaaagaacagccaacaagcacaaggaaaatggattctgcactactattacacaaagagcaactggtgcattagcacatgtttaatcactaattgtacacaagaaggcaacacatttgagacagcacgccagagaaagtttcggaccttaggagggattttcaaggctcaaagctttctccaataaccaacaaaattgttaaaagaaaaatcatttttttcagatcctccaaataacggtaagcacttttaacagtataaaaacttgatttttcaaaacgccaaaactaattatctttattaatggtagaattaagaggaataaaaagtataaagtccctatcctgagtttcaaatagatcattaatgagctcgacatcccattcacgaacgtcggtcttcataaggctagacacgtactaaagctgggtgtgtggagataacataaggttaatcctcatcagaaatccatagatcaaccaaaatactaaatgaacaacctgcaccaatacttttccgaaccccaacatccaccaaatattgagattccataatgttacgccaaacaaagctcggattagagccaatctcaatcgcaaggaatgaattatttttgtaataacaagccttcaaaatgtgggcagtcaaagaataaggtcgtgtcaataaacaccagtcttgtttaccaagaagagccatgttaaaattacgaatacttcgaaaacccaaacctcctggaatttaatgcttacataaacgcttccaactcatccaactcacacctttatattaaaacgggctgatattctaccaaaacttagccattagcttctctaattctttacatgtttgaaaaggaagaaaaaaacacactcatgacatagtttagtaaagtttgagccacagttttaagtaaaacctccttttcaacctgaaaaagaagtcgacccttcgaactttggatcctctttcgcaacttatcctttaagaagccaaaataacagtctttttcattcccattgtattcggcaaccccaagtaggtacaattctcatcaacttcataaattcccatcattcaacaaaggtaatcacacatatcatcctccaaatttgaactaaaaatcacagatgatttatcaatcttttgactagatgcctcttcaaacaaatgtaacaaagacaacacatcagagatctttggatcattagctttacaataaacattactatcatcagtaaagagcatatgcgacactttaggagctcatctagccacactacatccatgaatcaagcttgtcgattcataattcctaataaaagtaaaaaaaaaactctcagcacacaggataaaacaagtatgaagaaatcaaatgtccttgacgaataccatgacctggaacaataggtcgcaactctcgtcctccatgaactatagtgtaagaaaccgaacatacacactgcattatatgataacccaccttccaccaaaccccatacacagcaaaacaacccaaagataaccccattcaagcctagcatatgctttattcatatccaacttaatcgccataaaacgttattttcctttgttttttcgtttaagataatgcataattttaaaagaaaccacaatgttatcataaataagcatacctagaaagaaggcactttgagtgtctgagataacaaaatgaagaaccaccttaagctgattagccatgactttagagataaccttatagattacgttacatagtgagataggacgaagatcactcatgatagctatacacataacaaccaacagagcaatttaaatcacagctaaaatccacatagcaacttttatagaaactaccgaaacaacccaaactgtaaattttttttaaaaaattaaaaatagtatataaagtaattctccatgtttttttaacattttgttaaacattctcctaataaagtgtctcatttcttgataagaggctctaattttcctgtatcattattttagtgaattttctatttgttttgagtttaatactctattattagataatttatattaataatcttatttttcattaaaaaaagttgaaaataaatgttatttttttgtctaattgtttatttatattgtggacaatgtcccacatggaataagtggtagagaattgagccatatataagaacatgagctactctactcattgccaattggttttgag

SEQ ID NO: 16529 - DNA, 7337 bp, Cannabis sativa
  modified_base (2401)..(2404): a, c, t, g, unknown or other
gtatttttataatgtgcggtacggtgcggtttgaactgcatattaacaattcaaaattgcaaaccgcaccacaccgcgcggtttaggaaagattcaaatcgcgactgctccgcaaagaattttaaactgtatttttttgcggtgtggtgcgatacggacggtttgagcagtttgggcgatttgatgaacacttctaataacaagattgtctagatgatctctagccagaatgtcaaaaccatactttttatctctatcaaagaccgttgcatccacatttaacttgattgtattttcaatcagttttatccaatactcagaacaatcaccattgttgctgaaacatataggtgaaagtgagattttatcttaagttttcttccaatgatcaagagctacttgtgttgatgcaagaacttcagtaacagatgtacgttttttcttctaaacaacattgttcctagctttccatattgcctaacaaattatggcagtgttacagactatatcgtctgcaatattagtgaacatgtgatccagccaactttcaaaagtgataccgggatcaaaaatgaaggaggcatcgagtttctgctagcaaatgtatgcaaaaggaaatagaagagcacggttgatagtttcagaatgaaacttacaaatagggcaactagctgaaatattaacatacttagtatcaagttgaaaataagttggaagtgaactaatcatcactctccacaagaagttcttgacttttaggggaattcgcagatgctaaaggtgatgacagaaacttgagtttgcattcacggagcagttgtctttttgttcgtggatcaacctatatacttttttaattagagaataaaactctaatttttatttttttttttatttttatacattcataatttataaatattacattcttaaataatatttaccaatttagaacactcccaacaatttttttaaactcttacattttttaaaattatataacaaccgtataaaaagtagctccatcacatattcttcaaaatagagatattttaacttatctctactacgtatagagaagctttaaagcttctttatgtattttttaaaaatacttttttatctttttgtttatttttctctcctactaattatttttagtaatttttctattttgtttattaatttaagtaattaaatatgtaaagataaaatattttatttgaagtagagaataaaataaagaaattgttgtatagtgtaataatgtaaaaaattaatttaaaatagagaaagtaaaattttagtaatgcatttcaaaaaatagagtaaaaaaattgttggaaatactttagtgtggtaaatttattatagtcattattaatttttatatatttattaagagtagagtgtaggattggtctggcctaaagcgagttaggcttgcgcctaaggccatccagaccagtggctcaaaaaaatattttttaaaattttaaaaaatatcacatatttttttataaagtgtctaatatattttaagacttatccaatttttaaggtcggtcttaatgaagaaattatttgataaagggtaaatactattttagatcttgtgttttgcaaaaattaacaattggaccttttgttttgttaaatgataaaatggaccctatattttcaaaaattgtacaaataggatcatgaactgattttttgttaaaataaaagttaataataatttaatctaaagatgttataacaaaattagttcattttttactattttgaaaaatataagatctattttattatttaacaaaataaattatattcaattaataacttatgcaaaacacaaatccaaaatattaataaatcatattaacaagcttatgttattattattatagtcccataacgctagaaaaacatttatcttccctagtgatttatttattttatttcttgtcacttgttatatatttacaaaatgattctctcactctcacgtgctttatttgttacaaatacatttttacatggatttttttaaaaaaaaaaaaaaaaaaaaaaattgctttaaaccccaaatatcttcttttttacaaaagataataataattattattacttaattactttcaaattaatatataaatatactctgatagatctatatattgggttggtgaactagaagatgcctttacatgcatacatagttatttcttattatttcaatattcaaagtttaattatgtaacagattattggattacatgtcatgttgttgtatgggctggatttgaacttatatgaatattcattatcacattggagaacaaaatcaaaaagatttacaagtaaaaaatgttaaaattatattattattattatnnnnattattattattattattactaagagatattatactattattggtataattaattactataactcttacatattttaatttattatcataaaaaattattaaccattcataaaatatggaacaatattgctagctcaattcaaaaacattataataattaaaaaaaggcacatggtccaaattataattaatgttaatgtggaaaatgaagtccatgatttgaaggtttaacatcctcactaaataaaatatggtcatattatattatatatagatataattttatatgttcaattctctattagtactcctatagttagtaggtatatgatgtagaaaggtcctccaccttcatcatattgttatcatttggcctatataatcatcattttatttttattaatttcgataatataaaaaatcactcattattaatgtagactatagctagacaataataaactctattattttaagaatttaaatatgaaattatcttcttttggattttattttggaaggaaatcaacaagaatattataaattaataaacttgtgacaatagtattataataaataatagtccacaccataataatatttgttttatttattgtgtgtgtttatttatttttacttgggataattactaaactttatgagtttcatttattataattaataaaattaaaattgatggtaaaactcatatctcgtttcattaattttagttaactaattatatataaataattatcggcaaaattacttatgtaataacaatttaaatttaaaagattaattaacatctttgtcctctaaatttttaacactatttgattttgtcttaaaatatacagcttgttaaaattttccttaaaatataatagttatataattatatattttctgtttcttttacggttaaaaaattagcatttttaccccttaaattttgaccaatacaaaaatttacctacttttatttaaaaattataatattctattaattctgaaagaaaaaaattaataaaaattactaaaaatttaataaaaatattaaattaattaaaaaatagtaaacttacttaaacaacttaaattattccttaaaaaatatttttaaactttattttattttcaaacgtatcttaaaaaattaaattaaaattatttaaaatctaataaataatttaaacacgctaagatttttttgaagaaaaaatcaagcttatttatatttataaactcgtgtcttaaaaaataaagaatactaattaaaaattcaataaaaatataaaattattttgaaaaaaaaagttagaaattaaactgaaaaaatgttatgtttactaaataaatctagaattttcgagaaaaaaaatagactcaaacttattcccgtaaaatttagtttttacaaaaattaaatttttatattttttatatctcaatggattttttataacaagtaaataattttttaaatcacttattagttttaaaatgttaatttcttttttaattttcttaattattcaaaatgatttttttaagatctaattagtattgtaagatttactaaataaatattaaatttttttatttttattttgaggggatacgatttgatagttgtcaaagtttaatggcaaagttattaatttacaaagacatgtcaatatttatttaaataaaatattggagtacataacctaacaggatgactaaaaatttgtaaatataaaagttggatgaaaatttttaacaagtcttatattttaaggacaaaataaatattgtcaaaaattcaaggaacaaaattgttaattattcaatttaaaactactcatgacattagatattcaatttaggtttactttttttcacatgagtaattaaccgaaaaaacaatactacttttacaaaaaaaaaaaaaaaaaaaaaactatatcttaatatttttttaaaaaaaatcaaaaatttttattgcttcaaactttttaatctacgcaaaaattcttattaatcataaatcgcacataactcgcacataaatcgcaaaaattacgaaggcaaaatgtttctgatgtcatcgcacaaacatcgccaaaaattgcataattttccagaactacaattatatcgcacaaaatcgcataacaaatcgcataatatcgctcaaaaagtccaaactaacagaaatcttaaccacattgtcacatcgcacaaaatcgcacaaaacactaaaatccagaaaaaccaattccccctagcctagattcttctccaaacacaaaacttgcaaatctaaactttaataaactacatatttcagttatatatatcacagattctaaatttaaatgataaattgcaaaaaaaattaagggaagccatacctggttcgagtgttcgaatgggttcgtggacggtgccgggaacgatgctgaacagagactggatctcgtgggtcgactgggatcgagtgggtctcgtggattgactgtgttcgtgtgggtcgaatgggttcgtgtgggtcgacgtcgactgggttcgtgggtcgactgcgtggggtggttcgaatggtggggtggttcgaatggtgcgatggtgagaatgagggttcggtttgaatggtgcagtggtgagattaaaatcgagaaaggaagagagagaggagagagaaaggagagagagggaagttagagagattggggggaattgaaatgagggggtatttttggaactaaattgaaactaaagaataattaacaaatgtatattttgtgtgtataaaataacaccatgtgtatttttttagcataagatgtcaaatttccctttttaaaatgggaaagagcattgttattgggcacagtgatgcctagcatctctagatatgtcgtcttgtggttggctagcgatactccctaaaagttattatattaaactatatgggacccgatacttatttagaccaataacaatattgatacataagagggtgttaggcaatattagtgttttttttaacatttctcaataggaaaatgatcagttgcataaaatttattttggttataaatgtattatcaacctttattttatttttaaatataatttcttaaaaaaactattttttatatacttaagttcttcttacaattttctttcatttatgcccctcctcaaaattaaaaaagttgcccccaccctaatattatagttattcctattataattaaaagaagtgagtatattttttttgtgaagttacataattttttttggtaagagtacatgtacttagttccaataataaaagtaatactaaaattctctacacataattatcttccaaattattattgtttggatgagaagatatttttatataaatctctaaaacaaaaaggtccatatatgccatacaatgtgtaaataataacaaattgaaaacaacaacacaaaacacaaacatatggtgataattattaataacaaacatcatatatacataagaagaaaattggtctacatttgttgggttaataattgcaattgagaacctagtacaattgatgagttagttacatatggggttaattttcaaagaattgccttcaaaccatgcacatttggtcaacatcatcatttaataattctttatgcccaaggattattttgttttgtaacacggatattttgttgagtattagtaatgatcagtactttttataggtggcggtttacgattagttaatgatattttttaaaatatattttttaatttatatgggatctaatacttaattgtactaatagtggtatgacaccgaaaaggatgttagacaccaataatacattttaacaattcacatctcacactccaccatgtggcaatctcatgatgtactcatcaaaatcaaaaatatttaattatataataatatatataagtacacatacacttaaatctcttttctaaattaaagattagttaattattactaatttaacaaatactaattaaaaatatataccataatgggaactacttgcatatgcagcattgttcattagtaataataacaaataacaatgattcatgggaataatattaattgatcaaagtacataataagaaaactaaaaaaacaagcaattaaagtgaaattttattttattttatttttcccttaaatgacaatatagttctatatggcttatactcattggtcagtagtaaaagctgaatatatacttacattatattatatataaatatatatacataaataggtgttatatatttcttctttcttgaagtgaaaattacccaaaattgatgtttcttgagttacagaaaagaaaacttaagtaataataattccaccatgtatttccactattgcaaatttggaatatgtatgtatatactgtgtgtatatatacatatattttgtatatattattggtgaaaagttgttataattattacaacgtgtgaaactgtgtccacatgagattcgagaagcactacgaatattggacatttcgaattttttttcctccatataaaaagaattaatattattaaaccatatatactaattaagttttaactataaataataattattatgattattctttttctttttcactctcatatgtcttgtttttctcaaatatgaatatatgcatggtcacgatgagtctttgtcttttttatattgatgatattactgaattagtaagaaaaaaacactgtaatatatatatatatatatatatatcaaacaagataaatatatatatgaatgtatatacatatcttactattataaaagtggcttatttgtgtgtgatatttatagactattttactcttataagtttaattttattacaattctattttcttttt

SEQ ID NO: 16530 - DNA, 6256 bp, Cannabis sativa
ttgtttttttttttttttgtggggtggggggggggtacaataatagatgtttcatttggtccaattatcaactagaagaacatatttaagaacataactattatatacaatttaaggtcaataatgggtgaagggtgatggaacaaataatgattagcatgatacgtttgatagtacaaaatacacccatcatccttgtctacaatccaaataaaatcttcgtatcctggttcaccaagggaaaaaaacaatgataccattagttactgttaccatgtccacttacaaaattaatcacattggtttcaatagctcttcttggattaaagagaaaatcttaccttaaatcacctttgtgtgcaaacttctatccttggttttctcttttagaacttttaaaagctttgaatctgacattcatcaatttatggtaataatttaccaatttaatttagacagacttgacatgaattctaactattttgggttaatgcatttaaaaactgttaccactttcttttacaacattggaaaatttgaccaggtttgatggaacattagaaaccactgacctattattttttgaagttcatgtttctggttcatcctttagattgagtgaagctagtgaatttgataacaagccaacagaatccacaggccatttcattggaacatccaaattcctgttaaaaaaaaagagttgttattcaacaccaaagttaaatcattgcatgcctatgatacagatggacattatagtgtaaaattttagtatgagcctttccagaaagttactaaaaacagaatgacataaaaactgcatacctctctttatgtttgaacttgcattgactcattttatgaaaggaatagtttccatatagtaagtcaagctgttttgatagttttggtacttcagaatgagccaaaacattccaaaccttcaaaatctgaacttgatgagaattttctatgagaagatctacagtccaaacaatacacatttgcttaaccttataacactctactaattgggatgaagctcctttgcgccacccacatgaaagcttctccaataaagaaagtatttccttacaaagctcgtaatctttaactcttgtcatcgaaatccagaaatcgttattgaaacaaacctgtgtcaaaattataggacacaaacatggactcatggagtggtgaataggcaatcataagtacataaaacagacttagattgaaagaaaaaaggtctatcaaaatgagattataccttccatcttgcatctctaaacagatgtgaatctagatttggtaaaagatggatttgtttaagctgaaccaaggcagcaatgatagccaaagacaaattcttgtcctcattagcattgtgaaaacaactacgctctttggcatccatgactagcttcttccaaacacattcactatcacctaaagtttctccattgcccacaatccaaaggcagtgcctagacaattatgaatgtgtcagtgaacttaaatcacttaccaaaaatgtattttttcttctagaatttgtgtgttaccttgcacgagttagcgccacatttgctctttgacagttggaaagaaacccaactgatcctttagcattgctccggacagttgagatgattataacatcttcttcaccaccttgaaatccatcaaccgatcgaacactcaaagagaagtcattttgagcatccaagctgtattttgttccaactatctcacatattgcataaacttgtgccttgtatggtgatataacaccaactctaatctttttctttgtttttttaacttctgagagatcaaaaccaaaataataataataaaaaaaatcttcttcccaatatttgttcatccatcttattaaaaaaagaaagaaagaaagaaaataagagtatgcatcggttattacacacctttataaagctttgcaactatctcagagacaacaaaagcctcaattttgttcttgctactatgcttgttatcaacagtctcttttccatatggcacatttatgaaagagtaagagccatacatctttccttgcagaaaacattgactgtaactcctttgtttaacattctgaccatcaaaaatctcattgttataaaactgcttatttggaaaagaactgattaaagggtgcatcctgtgctggacattgagaaggtgtttctgatggccaaggaaagccaatctctcaaacaaacttcttccgaaattggcttttgctgaaacctgatacaagaagtttcataatggacagaatacataacatgaacacagttcacataataaacaagaaaaaagaaatgaaacaaattactaaagcttaaataaaacctggcttttaaccattgctggtaattgccgctcatcgcctataagtatagcatgacgagttccaagaagttgtaaaggaattgttgattcacattctttcaactgagcagcctcatctataatcaatacttcaaaaggaaccatttctgtcttgtgtagtttagctgagcttgagacagtacagaaaatcagacatgcattagccaagcaaaaatcttgaatctcccttgtatcataactgctattagtagattgaggcacaggaaaagtagaagggagtaattttagtagcaaaaggctcttttttcttgcagcattgagttttgttgaactaccacctccacttactacattcttgctcaaacatttccctaaagctccacttgaatctccagacaacaacttttgtaaggatttgagattatcaacagcttctgacatcatcttcacaacttttaatgaaataagagatgttggtaggtgcgtaatcaaactctcgacacaaaaatataatcgttctgcaatgtaagagaatctcttttggaaaaactcctcaaatgtcaaatgtataacatgtgttttttctttaagattttccttttcatatgaaagatcgttcactcccttcctctcctcctcatgctttgattctttttcctttttgttgtctttcatctttttctgattcttcttgttttctttcaaggtttctagtataacttgcttcaatggtttcttatttatcttctcttcattctttgaatctccagtttgtgtcaactcctcatcattgtcattttctttcaagtcttccaccacagtttctttcaaatacaattggtactttccttgaggatcctcaagcaaagaaatcatataaagcaaagtacttctccaaccactttctgaagcaaaacaataatcaagtacggcaacacggttatctagaaacacatcatgaagctcgtcgcgttcttcaatcttcattcgctccccatttccaaacaaaacaatgtcaccaaggccatacgtaccatacttagatgactccataactctttgtatgagcctccctgttacttccaacactgcaatatttgtaggagcacatgtaagtgtcctaaatttcatattaagcaagcaatgcaataaaaaaccgacagtcttggtttttcctgtccccggaggcccccatatgagcttcacagtattctgatgagagcataaagttgtctgaacacaacttaagactgctttctgttgggattcattcaactcagatgattgaattccaatcttcgcgtttaaatatgcagtgctgcaattttgtttaaagtgacaattcacacacttttctgcatcctgaaaatattgaaactaagatcaaaacataaaaagttctgaattcagcagcatcaagcaagaattgactaacatcttacaggaaattcaggccgtagaacattctcaatgatcttcataccgcggtctttaggatcagaagttagtgcttgccatattcgaatgttagttgtcatgttgatgagatatacagcaaaaagagatgaattattcttagtcctgtccatatagtcttcgataggctttgatgaaagtactgtgagaataagatcatctttcaccccttgaaccaaagcaacaacatatgacctttccaaatcagcaatgcttcttggtttaacactggttatggcaataagatctccatgttgaggttcatagaccatatgatcattcttgttttcgttacctttcaatataagtttgtaaaacaagtctttgggaggcttatatgcatcggtaaaagtgaaagaccttatctcacagcaaagggggtgagacaatgatttcacacttgataacaagtcagcatgtgtttcctccataagaggagcaatgaatgagtttaagtattctgtttttgaagagaatgtgtggggaatcttgttcacctgcacaaacaacatatttcccatgtttttttcttctcatattactcgaaaacaagcatatatcatcaacttcctattcattatttccatagaacaaagtttattaatcaaaagaaataaacaatcattatttttaacagagtaaagtttcatatgaaaaagagaatgataaacgtgatcaaattctataagcttccatattcctctgtataaactctcttctgaaaaacatatgagattcgagaggtttttacttgccaaaaatattacaaaatcgatattttttagggaacaaaaaaacaaatgggtcaaaagtacggtcaaaattaaaacgagaaaatgacaaacaatatagtattaaatacaaaagaatacagtatacaattttttatgtgaattattatttatattacattttcatttaatatttttatggaaaatttatttatatttatgacttagattttgaggatatatttttatcttttactattcctaactctttgttttcttttactgacaaaaaaaaaaaatagcaataatttttctatgaagaatttcacaattttaaaaaattcatggtacattttccaattcaaccaaaaagagatgtttttacaaatatccctcttatgatcagaacatgcatggttgatgacgtgtatatgtatatatatatatatatatatatattacatacctggtttttgtagagattattgttgagaacatctttgaaagaccaatcaaagaccaaattgattaaacttcttccgggaacatatcttatttccttcttggtggcgttatcggattgcatctctaataattttgttcttaaaaattgatcacagaccataaaagaaagaaaggaaagagagaagaaaacgacaaagaacgaaaattaagagcaacaaaataacaaggatcacttgccattgaagaaagaaagaacaataagtagtagaatcatatacccaatagttatactaaggacatcgaaaagtcacattctataataataataatatatatgattcttttttttctttattttgctttggaaaatctgattgttatttctttccttccgctagaagttggaatacaaaaataaatggaaatataaatgggttttagttattccttgcaagagaagttgtaattgtaaaaacaaatacattttccttgcatgagatgagaagaagtatatacattggtcgaggtcgtttgattatgacatatataaatatatatatatttatattattattatcatgtcagagtatgtcctttgattcctcggatcacaataaagtgtggaaagaatgtggaaatttatcataagttgactacaagtcaattgaaagaaaatatatgtaaaaaagaatcatgccatgtgatgttttttctatttattcctgtaaagaaaacttaattatataattctatacaaattagggctttttatatataaacggttatagttaacaattttttgcaaatatatgattctatgttttgttttgtaaagatatagtggttaaagaaatagatttatgattgggatttcacactgtgaaaagaaaacaaatggtaatttttttgacaactattatttgagctattggtcttaagaacccatggttgcaatttggattgtgattaaagttgtttgggttgcgatttgtaatgttaggtttattacgatttgggtttcgatttgtgtggtgttttcacatcttttagttttcctttttataaaatgggttaaaaaaagagaagctaaatgcccatattgtagtagtgtttagattttaattgggaaatttacacccactactgatttttcccattttattacatttatactgtgccacgctggaaacaacatttgtact

SEQ ID NO: 16531 - DNA, 10674 bp, Cannabis sativa
tattcatataaatttctatcagtaggagcctagccctcttctctaattatttgaacctcgcgtagggtcttatcatgtggcgagcaccatgctagaaggtaaaggtcgagttcttggttgttgttgctgatgttgcttttcttttttaggtgcgattgtgaactggatccccggtctttaaatgctcaagtagaaacggaggggaatggggtcatgtggggcacatgacccactcaacttttaataaattaattttttgcataacttttttatatatatttttatatttgcccccacaaaatatttttttttatttttaccgtcatatatttttatttttatccttgtaaatttataattttattttttataagaattttttttattaataaactacttttacaaaaaaaaaaaaaaaaaaaattgcccccactaacatttacggctggctccaccactgtactcaagtgcatattttggttgcttgggcaacttcaagcttggtatttttaattctagggaggtagaatcttttgtttggtggtttttacaaagtttctttcgattttttttttcaaaaaaagaggatagatataactaagtagaggttgggataggattactaaattttatcaataatatatatgtaattctacagtatacacactggaatgattattttagtatattttttatttgtttctatgtgatttttttttagttatgatctaattgtttgtagttgtttaaaattattttgtaaattaaaaaaattaataatttacctagccaaaaacaaaattcaaatactaattttagaccatctaaactaatcaaatgataaaagataaaaggtgtactaaaataggttgtagtataatagatttttctaatatttttctacctcagctttatattggatttcacgtcatggtgacatacttaaatcaatacataataatggatgatcgaccaagtgaaaaagttctaaaatcaacggtccatcccatcccaactaggtagaaaaggacctctttttgtcttttcttgaataatccaacctggattcttgaggccctttgtgctaccaccacacaatctggaataaaaatcagatttttctagatcaggcaattggatcacataaatcccagtttttagtttttggaattttctgtttatttttgggtgccacccaaaaggcttgaactatgaaaacctttgaattttgaggtccagggatggataagtttagggtgagttgagaaaaggccacataagggtagaattttggtttcagaaacttgttttctgaactaagttcccctttggcatggttgtcaagctttgtttgatggcttcttatggctaccctcctggtggagtcgttttacaccaagagcagggcatgagcagagccattcaggtaaagtctttagcttaatgtgttttggttttacctaagattatgaaattgttttgggtttctaatgttcgtgtttaaattctctttattctatctggttgttgtgctgatttattatttgattgccattattatcattaaggggtcattggattcatctgttttgtgtttgtgtatttatgtatgcaaatatgtagatgtttgctttgggagcatgcttctgctaatctgttttgtccagtccatgattaattgttttgtttctgtattgaattaatctggttttgttttattaacccaggatttccaaccatttttgtcgaattatggaccaaaacatgagaccttgagactaggatccctcaatctgagaccacaagagtctgaggacccatggaaacccataagcgggttatccgagtctaacaagtatgtcaagattgactctgtgggtgaaaggaccatgctttctgatgtgcaaggtatgaaaatgaaccatttcattgtgtcactcatttgttaaatgcttttgctgtttggatatgctttttctatagtattatttacctaaaataccacaaattctattggacttacttcatgtcccttgcttagtatatttattgttttttggggcatctattttgtggttatggtatgtgtagaagttgattgcttatatgatgtccatcatagtacaagaatgatttaagaggcttgcaaaaggaagatttaatgtagatttgaaagctgaagaaaaagaactaaacgtgagaaacattgttggcaagttatctcaaagtttctttttcagtatttaagatttgactgactgccttacaattgatttaggcagttatctcctattttcataatcatactattattttgtcttcttgcattgccttgtttgtttattttttatttatattttcttacttcttgttgcagatggctgtccaagttccatgcttttcagctctagcattgcagaacattgtagaaaacacgaaacaattttgcaattcctcatgtctgcagtaaatgaaccagagggaggtggagtggacttgactttgctttctgagatcatgggcttacaagcattaagaattgattcgcatcaacaagtaacacctcttatctaccctggttctgaactgtatgcccaaaagcctcttttggactttgttggagatctggtgggtagttcaaaaattacagttcaaccagatggtcaagtcctgttcaatgttacggggactgaggtgaaggatctactttcggttgttgctgagttttacttgcccaaaaacccagctaagttgaaaaagcagtcaatgcttgtcccgcactatagtaggtacgtatcattaaaaaaaacttaatttaatttcttttcagtgcagatatttaatcatgtgtatttaccctctgcacaattagatttataaaatcatctttggaattcatttttatgttgaccctttgctagaggtgatggttgtgaattcatttatctgcttactacagcatttgacataactttttgataatctagttgaaaacaattataaaaaagcatgtttctcttgtaattttatgtgatgcatttgttcatggaaatgcatgatgaaaggcatgtataaaaattggttaaatacagcaaagcattacttgttttgccagctacctccaacccctttttctcggagaatattttgtggacttgtgatcatactgcaacaatcttttgaattaacataatcatttatatatatatgtacatatatataaattttcttaaatttaaatgtattgttgctttctgggttttccttttcttctttgtaaaaaacctcacctgcaatcaattctgcaaaacaggttggacagcactgcagtgggggttattcttgatgcatcttctttaaagctccatgcaacaactgttgctcctatgaagaggtagaaatatgcacttattttcttcatttctgtctgtcaatcaccaatgttggctttagttttgagtctttactaattgaacttttgccgtgtgctcaacagtcctggaaaggtaaagaagtcacaaaaaaagaagagcggtaaaagggtgggcagagtacgagatctctacaaaaagaactatttccatgcatgtgaaaaccttctatctataatgactgagaagaagaagcatggaaagagtgccttcctttcattgaaaaaatctggtcccgagcttcctgagctcctgactcaattctcagtcggtattgctggtactggcttggctgtcttattctctgttgtctgtaaattagcttgtgcaaaggtaccattttgctcatcgagactcgtcagcactggattaggatttggcctggtttggctttcttgggcagttaataggctgagggacactgttgtctacgccagtaagaatgcagggaagatggggttgaaagaagatgaagtgatgaacaaagtggataagagtgtgaaagatatctatttcagagctgcaactctgatggcagtcgcgttgttgagattcgcttaagcgttagaggaagtaaaattcagggcgaaggtgaatcgtttgatgaacttagaagatcaggatgactagctgtgtatgtgagagtaactgtatatgctatgtatatgtatagctggttgatgattagattggggtgaagctcatttggaattgatgtggtggagatgaagaggctcaagttaaaaatttaacgaaacataagtggaagggggattcgaaagaattctaggtaagtttgagatgatgcagagttcgatcgaggatgacctgacctctgtctgatcagcaaccagtaagcaacatattaattgatgttttataattagattttgtgtattgtttaaccaactttggttaattgattaatagttttgttacagaccataatcagtaatatcagttttgagcatggtattcctccttacaggtggaacaatgttaatatatctttattaactaagatgctagtctaatagagtgttaatgtagggagctctataggccaatatggtgttaaaaaaattgagctttgttgtatggcaccctatgctgtacaaccccccaccgcatcttgattattgttgtagttgagtaacgagtctcacatattttaatttaaactaaaatatttaccactaatgccatcgcaatattctaagagttaaattatatcactagataataaatttgtgtacaagtatttatagatagggaatcacaagcttggctttctgtaggttgtataacttgcaacaggaataaattgaacaaggtcaatattatcgagtttggtttagaactttatgtatatatttatttctaagtaacaaaagtggtacgtccattaacaaatatgacccagttcaaaataaaaattaacaaatcaataaaaagatgatcaaacacaacaaatgccaatagactgttaacaaccaatacaaaaatggccgccgaaggagaacatcagcacaccctttaatgatgccacaaaagagatcttgagtcacaccaatcacaacccacctgatcacaagctccaccacacgtcaaaccagtgttggaaaaggagctgaaggactagcaaagccctagagcctaggagtcacaaaccgaaatgagcacatcgttgttgccttggaatcacttcccattaaagaaggaagcatttgatcctctcggtcaggccccggcaagtcacgctcccaggctggcgacatctccaactgagtggaaaaccctagtcacttatggaactaggtagagagaccgtacattacactgatctcattaaatttaaatttgaaatcactgaacaaaactttagaatgactagtaatataatacaaacgaatttcattttgaaagaaaaaatgagaatgatcgctctttttatatttcgggtctacttatcgtatctcatgtttattcaatcataatccaacacaacatacacttaaccataaccttatttaaaagtgttcattttattgccaaaagaagaagagaattttgtctctacaaataggattgttacaaagacaagtgattcgttgtgttactgaaaccaaaagaatataatttgccttgatgattacaccaccatcagtggcagtgatgattaataatccaattccaagcccaagagagctgttttctcacatgaaaacgttgataatgccaagtaacataaaaataaaaattatttgaatcttaaattgaattgcagatcccatgctacaagcaggtacaacaatggtcaagtataccggtaccggaaaattatttatgacaaaaataaccaaaaaagatgcaaaaaggtcatgcctgagattcctcgatccttcaatttactcgaatttgtaacatcaaacatcctctttgataatgcctagatctaacaaccgcatcaaatgtggactatataagcaattaccacatggcatgttgtccaactgaatattccattttgtttatcaacccttttttgctaatgaaaatacagacaacataaaaaggaccgggcacatcaaaattcttagctcagtacttttgatactactcctgcaccgacagttctacctccctctcgcaatgcaaatctttgtcctgtcaagttcaaccaacaatgttctagtccatcaaataatgtttcatgacaactgtatacagctcgagacataaaaagtatttaaaaagtcacaccacagaatggagatgcacccatgagaaaattgtgtgaaccatttaacaataaacacattcaagaagagtgtaattttcaggtatttaatgaacaaatgaaatatgacactaatcaaaggcaaaaaacagtgatgcgggttacatattagagtgcatgcagggtacgtcttttttaagaatatgaaaacatacctccttcaagaggaacgggttgaatcaactcaaaaacggcggtcacattgtccccaggcataaccatcttaacattttcaggcaattctacttttccagtgatatctgcagtcctcatataaaactgaggcttgtagtttgagaaaaatgcagtatgacgcccaccttcatcctttgtgaggacatatatctctgcttcaaacctctttgatgttttcaaagatcctggctttgcaattacctgggcaataaacaatcttacaatgttttacaatccaatatgataacaaagattagaaacataagatatttcaaatggtaatccttgtatctaacacagtagttacaagattcttttccactatatataatattgaaatattagtcctcttaacgtaatacaaactgatcactagccaaggttcaagcctaactaccagaaccaaaacctgccttacaaaaattatcaaagtagtcaatttctataactaaaattttatgcaataccacaacctaagatttcctgaggtgtaatttcaaagtagtcaatttctataactaaaagtttatgcaatactctaaataaattcctgaggtgtaatttcatgccatatacctgtcctcgctgaatatcttctcgttttagacctcgaagaagaagacccacattgtcaccagcctattaaataccaaaagcaattattaaatggaaccgcaagcaaaagaaacacctaagtataatgcgtatcttatttagccacttacctgtccttgatccaagattttcttgaacatctcaacaccagtaaccacagttttcagaggagcaccctaaagtaggaaaatcatgtcagaccagccattcttagaaagcacagggctcacggagatatcaagagaatgcttggcagcaccaaaaataatagaactagatgtaaatatgtccctgcctcaaccccagaatctcaacttcctcaccgactttaattactccttgttcaacacgcccagttgccacagttccacgtcccttttatacaacaaaagccaatactttatagtcaaaaagacatgatatactcaactgcaccacacatcataaataattttaagcaatgtaaggagtgggctagagccatgcataccccacccaatcctcaattgcaaacttaagatacaaatttagtggacattcgtgataaacttcggtaactgtttatcagaagtaaacagcagcaacagtagcattacaaaatagaaaactagatatgaagattacacccaatcttaatggaaaccatctaatgattacgcttcgaacattcaaacttatgaacacaattatggggctgctactttgtaaaaaaatgtcagtatatacaagcctaaataaagcacacgcaggttttacctgaattgagaaaacatcttcaattggcattaagaaaggtttatccagttggcggacagggtcaggtatatattcatcaacggcgtccatcaattttagaatagctttctttccaatctcctcatttgtgccttgtaaggctgacaaagccgaaccctgaataataggaatctcatccccagggaacttgtagaaactcaaaagctctgcaataataataagatgtaaatgattaaagggaagaagtatggcattgggtctggctaatatttttaaaagatacccaccacgcagctccatttcaactagctccaacaattcaggatcatcaacagcatcaactttattcaaaaagcacacaagtgatggcacgccaacctattgaatacattcagaaaatctttatatgcattgttgaatattgtatttgcatatcaaaaaacatgtagctaaactatcctctccaataaagtgataataacaagatacccacctgtcgggcaagcaaaatatgctccttagtctggggcattggcccatcaggggcagatacaacaagaataccaccatccatttgtgctgctccagtaatcatattctgtacagtaattatgctttattaaatagtcccattggtgagcatgagaatgtccagcggtaggacattcacactgaattacaagtttaaacaactaatggaacttgtaagttgtaacaataaaaacacacataatatatatatgattttttccaggaagagtttatagccatcatatctcaatttttgatcctcgacatgagtaacagttgcattaaaaaaaactgactgtaaaatcatatacatttcagttatttctattattgagcttaccttgacataatcagcgtgtccagggcagtcaacatgtgcataatgtcgcttagaagtctcatactccacatgggcctgcaaaatgaaggaacacacatgttgcaagagaaaatcaattacagaaaaataaaaatataaaaatatacactaaagtccagcctaaaaaaatagcagactcatatagatgatataatcagcagcagcaaaacagcatgctaaccgttgcaattgtaattcctctctttttctcctctggagccttgtcaatttcatcaaaagcaatagccttggctttgccttcttctgacagtacctaaggtaaatcacataaacatctcaggttttgtccatgaaagggtgaaaatttaaaactaaaaagacgactcacaaatgcaatacacctgctgatgatttaaacaagtaacaaaaccatcacatacaatttgacagacccacatggtgatactatcacaaacattaatagccaaacctttgtaattgcggcagttagagtagtctttccgtgatcgacgtgcccaattgttccaacattcacatgaggtttcctgttagaaaaaacatcaaacagaattagaattggcagtaatccacatttcttctcgaagctggattcagatacaataacaaaggtaacattgaccttgtgaatagtatttgggtaattctagttagtcaaaacaaaagaaaaattcacagtacacatccaatcctccattacaagcaactgttacgagtccgcacaaaagcaatcccattttaccattaacgcgagctgattctagttacagttaccaaaaatcaaacaattcactatagcgacaacatcaaaaacttttaataatccaatcaccatatccacacggttgtatagaggactgaagagtcagaagttgaacttacgttctggtgaaggtggccatggatctccaccagggcatcggagagtaagacttatcatttccagagatcgactcggacacagagagaccggtctgagccgatcccctatagcaggagtatatttgagatgaaaatgggagaaggcgcttggagttagggtttcggagagcgaccgaagccattgtcgaaaccaggctgaaccaaatggaaatggaaatgggtccgcgcgtagaggggcggatgagaagttggattaggggtttagggcttattgggatttttcgagggttttacacatgagaaacgacaattaccaaaatatccttttctcgcttcctatcctaaccatgaaaaacaacatgtcattcccgatactgtccaccactcccagaaaagaaaaagaaaaaaaaaaaaaaaaaaaataattgatactaataaactttcaattctttttagattagttttagttaaattctctcaattattattttacttttgtacttatttctttaactttaaattttggataaaactctctaaattgctaaatcctaacaagtttaaagtaatatctatttatctcacttaactattgacatgcactgtttacgtgtaccattatgtacacgttacacatttatattggtccacttaatataattatttaaaaaattatataaaaaaaatatttttatgaatttattttaaaattcaaaagaataatttaaatttataaaattattaataaataaataaataaatcttttatttaattttttatcttctcctctttctctctttttctcattgatctctcttttttactctctctcctcgagttagggttgtgtagaaatgatccaatttaatgacaaaccgactgattcaatgtcaaccgactgctaaaaattgaatatccaatcaagattggattggatcggttaaaatctaatattggatcggtctgttcttagatgacatgtaaatctaatgaatccaaccgactgatcgaatccaatagtcatccaataccatctaatattaaaataaaaaatatatagtataattttttttaataaaattgt

SEQ ID NO: 16532 - DNA, 4577 bp, Cannabis sativa
ggggggggaggggactattttaacccaccattttggtgggataatttagttccaagcctaaaggacaaattgtgttgagtggacaaaattatccaatcccccatatcttcaaaatagaagcaaacataagattggagagtctaatccaatcccaagcatcattccaatgtaacaaacatgaaacatgaccataatataaaactataaaattgcactagactaaccatttgagctaccccttattactagactaagaatgggagtttaagtctctaattatcaagagattaaccaacttactatgaaaatgaatgtacattttgtttacattatagttttaattattatattaagatatttataattagttaaattcaacatctaataaaaagtcaaccccacagcaaactttaaaaaccaaaattataaaaataaaaagaaaataatccaaaattttcattaaatatttgaacccatatttttatatttattttgtaagcaaatacatttgattaatagctagcaataaaagcataaggagaatgtagtgactaatcatttgtggaataagattttaatgacaactaaactatacattattaaaataaatacacttatttacctatcaatagaggggagaaaaatcctccctttaactttgcatcttcttttggttagtttattattgaacaacaatatgaggacaataaacctacgatctgcttttccaattgatcaaattgaaaattggagctctgtcaaccaagattcttctaccatctgtaggtctagtgtcatagtcccagacaggtccaagaacccaggatgctgcagccccgccaagcaagcctcctaactaaaatatggacacaagtgacaacatgaaattaacattaattattgcagaatccagatatgtatgtttggatagtgggattggatagaagaagacaacatgcaaactagtatttttttttttcaatattacccaaatttcggaatataataaagttatttggaactaggttacatcattccaaataactacattatattttggcatgactccaagcccaagaagggatacaagggctcgaatttgggagccaatttcaaattgttttggctccaaaatggaagccttccaaaggaaagacttgaaaatgggattgaaaatgcaccccgcccttatatcatgtatgtacgtacatgtgtaaatgttaaagtatcttgttcattcactttaaaagaaaaagataatgataatagctcatctttatgacaaggaaagaaaaatggtcagtttagttccacaggcatggttcaaaagtttccctataaactatgtttcttgttttctcaggtaaggtattatgattcttgtatacactgcctcgggtgtttgcatacatgaaaagaacagaatttcattatttctttttttccatcctacttcatcttctagtttgattttgattttagttggtttaatggcaagaaactaatgctgttatggaaacttacatgtccccagttgtcaatgccttgagatactagtccaataacctgcaaattatatcttattgtcattgaaaaaataaagaaagaaaaaagtgagaagcaaataataaaaagacaaatcatgtttataatttgagtgaatcagtcagaattaggtgagatcagtggagaagtaagcaaagatttaaatgacgcgcatccaaaagtgagggcataccatgtttaaagcaattacattcactatatgctgtaactgtcttctgccccctccaacctggcctctatgcctcatcacaaacacagcaacagatccaacctgacacaagagagcatgtgtaagtataaaagtactaaatattggcagaaaagaaccatgtgagttcttatcctgaaatagaattccaccggacaatctggatttacaattattcaataataataataaaaatcatctcacttcccttggatacaaagttaaacatcctatctatctatattttcctttttcacccagatgttatggcttttgaataagaggtgatgtgatgataagtacaggtttccatacaaactttctgaaattatacatttattaaatattcttgtgaggataaaaggtacatgcttactttaaatttttaagtatagaagcagaagatagaaaaatgtaagcactctagcaataagaagtatgcagaaacaatttctgttaaagattcactagtgactgtaaatttcaaatcatagcatgatactaccttaatctaaatgaaattcattgacatttcatatcatgaccaaaaagtgcaaccaactatggggttttttttaacaaaatgttcaattaacttacgagtccaaagattgctcctgatgcaccaactgcaggatcactgctgaacatacaactcatcgctggacctgattttcttgaaattattaaaccacaaaactagttggtactaaccaaatatgttgactattgcagaaagatcatgagcctttacttgaaattgcagaggcaaagtagatagcaagaaatctcccaggaccactaattttctccacagatggcccaacagagttcaaagaataacaattaacctgaacaaaaattcaaattgtagcaaacctttcaagatacattattatatacaattaggaagcctttaactggtgaagttcagatcagaccaagagatgcccaacattcgcatgcagaaatgcagatgtcaccaacctccacagctgcccttcctctatcagattattcacctgttaattgttaaataatgcttaaatcgcttgtgttcaataatcttaagggccagcttgtaacactaaattcattattgggataattttattaagaaacatttccagaaaatcctcaaacttcaattcactttcttttttcacctaatgtagaggaacataaaagtgttactaagtaaccaaactagctctgtacacattttctctggatcattttaaagagcatatttgaatttaccttggctccccaagatattaaccttccatttgatgcaatctgtgcaatataaattctgcccacaatacaatttcattgaattaaaccaaagaaacaaatcatttcatcatttgaattgatggaaaagaacaacactgagaaactaaaatactcacgccacattaagtgcaagaagtacattggtcaatcccctgtcctcgaatggactcggactagatgtgttcgacttggagtcagaaaaagaaatcccttgttttctcaattcctttccgttttcctcctcgccaaacagaaaaattcgagcccaacttgccgaaaccaaagaaacccctaacctgggcccgtgactgagacgacccagtttctgttcttgtattccataaagattaaccaaaaaaaaaacccgcttattacgagcacccatttctagaattcaactaaaatcatcaaaagatagcttctccgattcaatcatgggatggcaataacaactcaacaagatagaaatggataaagcaaatacctgaaagtaggagcggagaagaggcttaacggcatggtggatgaggtggccgagtcgaagggaggaggcggtggtggtaagcacattcattggagttgaaccgagctccgatgccggtgagccaaatccaaatggctgaggcaacggccatgaacccgatcgtatcataatggtaagtttcattactgaagcgaaggatggaatatggatgtaagcagtgagaaagtgagtgaggaaagaaaaagaaaagtaggaaaaaataaagtaagataaattagtgttttttttataccatttttatttctatactaaatatgagaagtttttattttttacactttttttcctacatttttccattttcgtttttttatcatcaaaagtcaactttcaaatataaggtgtaattagtagaaaaatactaagagaccccttgtggtgctaagcattacaacctataaaaaattattaatcatttacaacgcgctatattaatatggtgggcactttaagatgcctaataacaatacttgcaattaatattattagtgatataattagaaaaattatatttacactctgaaaacttataactaaacttcattactaagtttaccccaattaaatattatttttgtaatcacatcccatcacatttactaaatgaatatttttcaggttaccccaagacttaaaaaagaaagaaagaagaaacttctcaaagaacgggagaagaagttaggcttcaacataattgacgtcttctcctgagccaagacttcgcaccgaatccaccagtactccattgtcgctagggctgaacatcagacaggtttaccgagtttcgagtttgcgggtttcaagttcacgggtttcgggttcaaaaaaatgaaaccaaatctggacccgaatagggcacgggttggcaagttttggttggccgagttgaccggatcaacgggttgacccggtcaactcggtcaactctttaaaaaaattaatattttattcaaataatta

SEQ ID NO: 16533 - DNA, 9852 bp, Cannabis sativa
agctcatctttgtctcagtagagtttttcagtggcatgtttcggtcctcttccccattacttagaaaaagtgacccatcgatttaggtacaagatactattattaccgcctggacaattagacacccaacccatcattgtcctggcaatgggtataggtcatcaacgccgaacacatttcgaatctctctctcttcggtggtgcgggttgctgctctaagttggaccgcaaacgtcgttgattggggacaacaacttcaatggctagtcagtgacgacaaatggagaggagaagggagtgctgcgacctctggaagctggggcttccaccttgtcttggtctcattatcagatctttggtacaaaccccaaacattttcctaatcttgtttcattaatttagtgatgcacaatttttgttctatttatatattaaaaaaaaaaaagaaaagaaaaaagaaaggagaaatgctaaaacgtgatgctaagctaaaaaatatatatatttattcaaaaaaaaaaataatatctttaattatggatataatatttatattctttaaataattagatctaacaaccccgctcttttcaagcaaacaaaaaagtaaccgttttcaaatttcgtcaggatccgtagacaaccccttacacgctgcaacgaaaaatctcttctgttccattgtcatcaaggttttctggttaagcggagatggagaatttggagacgaagaccgtagattcatcgcagtgcgttcgagtcgcggttaacatccgtccattgattacttcggaggttttgtttggatgtacggattgtatttccgttgttccaggtgaaccacaggtgcaaattggttcacattcattcacatatgattatgtttatggtggtacgggatctccttctaccatttacgacgattgtgttgctccattggtagatgcactcttccacggctacaatgctaccgtccttgcttatgggcagactggctctggcaaaacatacacaatgggaaccaattataaaggagaaggaagtagctttggtatcatccccaaggtcatggatactgttttcaaaggagtttccggtaagaaatcgaacagagaattcttaattagggtctctttcattgagatattcaaggaagaggtgtttgatttacttgacacgagttcaacaacaactttctctaagaatgaaggcgcagcctcttcgaagcctgttgggcctgcaagagctcctatacaaattagagaaactgctaatggaggtataacacttgctggtgtgacagaggcagaggttcaaacaaaggaagagatggcatcgtatttgactcgtggctctctatctcgggctactgcgagtactaatatgaatagtcagtcaagtcgctcacatgctatctttacaataaccatggagcaaaaaaagatcgtaaatggaacagcagccactgatgattttggagatgaaatcctttgtgcgaaactgcacttggttgatcttgcaggttctgagcgagctaagcgaacgggtggtgatggcatgcgatttaaagaaggcattcatataaacaagggtttactggctcttggcaatgtgataagtgccttgggagatgagaagaagcggaaagaaactggccatgttccttatcgtgatagcaaattaactcgtttattacaggattctcttggaggaaatagcaagacagtgatgatagcttgtgttagtcctgctgatacaaatgctgaggagacattgaacacgttaaagtacgctaaccgtgctcgtaacattcaaaacaaggcagttatcaatcgtgatccaatggctgcgcaattgcaaagaatgaggtcccaagttgagcaattgcaaggtgagcttttattttatcggggttgtgatgctggtacttctccctatgaggagttacagatcctcaaaaggaaagtgtctttacttgaagcaagcaaagaggagcttaaacgggagttgcaggagagtcaagttacttgccaacatttgacgcagcgagcttttgaagctcaggttgagaaagataaattagccatgaaaattgaaatggctcgaaatggtaagtcttgggatgaagttgacttacattcagaacaggaacatgacctgttgaaaagttatgtatttagaattcaagagctagaaggagagttgttgcagttgaagaattcgaacagtagaaaacatggactcattgattgtgctgatgactcggatgatcctgatgatgatgaatttcgctctaagaatgtactgtttccttgtggcgatgagtattctgattatgattgcaaaattggggagatagcagctgatattgttgatcaagagaaggagcaagaacattcttctgttcaagaaaaattggaccgtgaattgaaagagttggataaggaacttgaacaaaaggaggccgaaatgaagcgagttgcagcagggggtaataatacttcggtgcttaaacaacattacgagaaaaaagttcatgagttggaacaagagaagagagttttacagagagagattgacgagctaagacacaatcttgcaagtatatcatctaccactgatgacggagctcaaaagttgaaggaagattatttgcagaagctgaatcttttagaatcacaggtgtccgcgttgaagaaaaaacaagatgctcaagctcagctgttgaaacaaaaacagaaaagtgatgaggcagcaaaacgattgcaagacgagattcagagaataaaaactcaaaaggttcaacttcaacataagatcaaacaagagtcggagcaattcaggttatggaaagcgtctcgagagaaagaagttcttcagcttaagaaagagggaaggagaaatgagtatgagatgcataagctattagctttgaatcaaaggcagaaaatggttttacaacgaaaaacagaagaagcctccatggctacaaaaaggctaaaagagcttttagaagctcggaaagctgcttctactggaagcatcaatggtccaggaattcaggttttgatgcaagcaattgagcatgagcttgaagttactctacgtgtacatgaagtccgctctgaatatgagagacaaatggaagagcggggtagaatggccaaggagattgcaaggctaaaagaagaagcagcagagatgttgaaacaagctaattcaagagattatcctgaaacgatgtctcctggtgcaagaaactcacggatttatgcacttgaaaatatgctttcttcttcatctaccacccttgtttctatggcatcacagttatcagaagcagaggagcgcgagcgggtttttagcggcaggggtcgttggaatcaagttcgatctcttgctgatgcaaagaatttgatgaattatctattcaatttagcatcttcatccaggtgcttggtgcgtgatacagaagttgtgtgcagagagaaagatttacaaataagagatttgaagggaaaaattgtgagtttgagtagtttgcttagagaattagagatgcaaaaagctgagcttattcatcaggtgaaaactcagaatgtagctctgaagcattatgccaatggaggacataattatgacttgcgcaagcttgatcaccgaagctcagtagttgtctcagaggacatggatacatctgactcagaaaaatcagatgtagattacttaagtgaagacgacatacctaagagacaacgacttaagaaaaaaagctttaaaatcagaaaccagtctaacattggatctcatttatcagacaacaacgatcatgagagcctaacattagacagttcaggggaaggaattgttgctgttggtggtgataaggagaacaatgcttcaggttcaggtgtatgctgttcttgctccaagaactcatcatgcaaaacaaacaaatgtcaatgccgctcttctggtgggttttgtgggttctcatgtggttgcatggtcagtaaatgtgccaatcgagaaatcgaaaaatctcagcagtcaaatttggctgaagggattgtaaatggtgtaagggctgatgaagcagagaaggatagacttcttgtttctcatggagccatgcttctacagactgcgttggttgacaaaactacagagacaaatgaagatggtggtcttggtccaagaagaaaagctctttctgacattggtaacacaactgaaaagccaaatgtaccaaagcctatgaagagaaagaaatggaggacatcttcgatacaactcgttaccaatcctccaccacgtccatctcagccagaaagtgttgaacaaccatcgcaaccacaaccacaaccacaactgcaatttcagaagctagataacaatgcaaatggggctgacattcctgtacaattaccgagggcaatgcggtctgtcaccactaatggcgggaatttattcaaagaaaggaatgttgagaaaacagaagaatcaagtgtcaacaaagaggcagctgagggggctctggctcctcccagaagtcctgttaggcagaacaggacatcagatgaaaaggagaactttggccattaaaaataatctttagtttactgagtttctcactcattgctcatggcattggtaacattgattcatctgatttcttattttatcgcattatgtcaatttttcattgttgtaacacttctcttatttgattgaacaaatgaatgacgatgctttgtttcaataaataaataaactaaatagttggcaattgtaagacccccatttgccctctccctattattgttatgttctttttaatataaatggcaagttttatgttgattagtctatcatgtatttcctaatctgtctttgattcattgtgcctgggtgacccttttaatgataaaacttttacaagacccctagttagaaattgtttattagtactatttatattaaggggccttgatttcacatccagaagaaattaattcacttgcttcatgaattcataatgacatcctaatgatgtcatgattatcaatatgaacaagcgctggaattaggtgctgtgattaattataatatatatatttttttctttttccttattagtttgcagttcgattgaaatgaagattgaagtgctctaattcgttttctggaatccctttattttgggaaaatcatcatatagccttaggggtgatgtcatccttcgtgtattgagatacaaaactggtcaggttagggagaaaagtaattgctgcccatagatttggctcattcatttttcccttgcccttctccacttcaaaatattattatgaagtaaacccactttcaggttaattttcaaatgaaaccattagtggtcaggacactcggtcgctctcctcgtgagacagaaaagacattcgaagaatcttattaataattttttaaagcacataaaaggtgggagacattattagtccactatgctggttttagaccctacaataaatcttgagtcaaaacattttctctttcaataatttattgcccattttcattaccaacaatgagagtgagggtccatcatccttaccgaaagtctcatcatatatataacaaggaatagctctggttaaagctgattgacatcttgtattttaaacaaattgagaaactgtttctgattttagggaatgtattaaagtgtcctttttttgtactgcttgatggatgaggtaatttaatcttcatgtgtaagaagcttgagttgaagatggcacttgttctgatattcaggtgataattatgaacttttacatgtgtatgtatattattatggacagagaaattattctgatagcagtggttgattcattgtctccaaaattcaaaattgtccttgttccatctcaacatgatcagcaaaccatgtcttaagccttaggtaggacatttggtattgtgcctttgttttgctttgcctgcatgagttacatataaatgtaagttagaatttaagatccaacaattcctagtactcttcataaatgtgttcaagctattacataatttgtagcatggttgcttgaatgctggatcatccatcagtgctggaggatcctgaccaaatatcatctgacaactcatatcttcaaaatctgcatataaaagtatgatgagattgggaagagttgtacgtggctctatttacataaaacattggttcatggggaaaagaagtacacagcggttaatttcttttccatctcagtcaacaatatggtggtttgaccctaatcaggacataatgtatatgctttgtggctaccatttcagacatcaatctatatagtattactattaattcatatgatggaattcccaactgagtttgtatggctctacttgcagtttttcaccctttgtggcttacacaggggaccctccattgacatgatgagcatggccctccacaattaaagtgcagctactgttaatttttcaagtatttttttcctatttttgttaatatatttactataagaagattatgagtgcaatatctctgttgccataagttttcctgtttcatttctttaaatgggttctaaatagtctgaaggcatttaagttctaagtatgaaaattcaatcaaagaaggaagactgcaataatgactgatgaatcgattactcacttgggaccatgttgactgacatccccagggattcctttatgaaattctgagatggtaccttacagagattactgcacaagcctacacaattggtcctctctaaaaatctgcaaaatagtgtcacatagagggaacatgagtatgactaatgttggggacgatataatgtcaagggtcattaaatttagattaaggatgattatgacagcaatcagatatggtcctaatgaaaatgtatgaccaaaatgcagggaagaagaatcaggctacagcacaatcattggagaagaattaggcatgaagtccctctttgttaggtgagatgggacctttttcaagtctaaaaaatttctaaaatagtgaagcatttatgagccaaatttacctgcatttgtttatgtggactacgtttttttctcttcttccatcgacctccgattccctgacctatataatatgagtcttgttagattggcttaatgttatatgtgcttaaagcctgtgtttatgtatgatagaaaaagacaaagcttttctcattgtgtggtaattatcaagcacagacaaacgacaaatgggtttatgctaaagaataatgctatagacacaaacattgtgaaaactttctacacacgagcatgagaatcatatcatttttaattgtgtggttgcgattaattgtttacgagattttagccaaagttggcatgattacacaaagtcaagaaatggcatgatttaaggcaattgtgagctctaaatgtaccatatttaaatactagcttattaaagttctcctaatttctccttccaacattttatttactgataagaaactaggagctatatgaaatattagagcaaaagtacaactttagtttattcccaaaaaaaaaaaaaaaaaacttaagttatatgtgcatagtgcaaaagtaagagtcagaaaatattaaaaaaaaatcaattacagaaagaagaaaagggtcttattgaaacttgaaatattagatctttgtagaagaattggggagtcttttcactgtccttaatggaaacataagcgaacattgcattaggagttagtagatcactaaccgttctgtttaaacaatcaaaaaagtaataggaaagtagccaaggcaagaaaaagtgtagcactaactatagcacaaaaatcatttgatttcacttcatttactcaagtgattttggtaggtggggtaccatgagtgaatcaaaaatagccttacgagcaatatagaaaaagggctaggatcatattaatataatataatatatatataatattatgatatatattcttctctaatctctatgcatatgctatatacctcacagggcccgaccaaccacgcaaaaaacaaggtagtgaagacagcaaagtactctcttgcaaatttagattgtggaagcagtgttcttatctgcaaaaatttgataatccaaataagtaatagtttccatatctcaattcaaacagaacaaaaataactaattaaacaaataaataatatagatacaaacttgccagggagaggattggcctgggaaaagctttgtcaagggcttgtatgacaagttcacgctgctttgatggaccaaagttcattgatgcagcagtagctgcctccaccaacccatcatatccactcttactatttctcagccctacagttcaataaaactatcatcattttctcatatctgaattcaaaaccaatcaaaaagatatctgtagacctgttgcagcctgaacactttgagagagatggtttatggcaatcctatcaaaccagctatcactgtagtctccaatggatacctccgcgggccttaagctgctcgattcggtcaaggctattctgttacttgcaggcggtgttagcaccgaaacaacaattgattttttcctcccaaggctgtggtttggccaacatgaagttgagctaaggttagtcctagttggtaaaagatgtgttgcttccataacaaggtaattagttttgtataaggagatgtactagtggtctgtgttttttgttgatgagaagaaagggagtgcatgttgagcattttattaatagagaagatttaaagagagtgtggacagaagtctgtggtttggaatcttggacatatcgaagtctcagccattctctcttggctccaaagatgccttttttggttgtttgtaattgtaatggccaattaggaatccacaaacaaagacaacccattccctttgaaagtgacacttttatagtagtgacggcaaattcataataataacgttagtaaaaatgtaattcatcacgacacgacagaatttatatcagcataatcatttctcaaatgtttattattattgcctaagttcacgcatgcgcaccaatagtgcttaacacccttaagacgtgtcgctttatgattggctagggataatccctaaaagctattatattaaactatatgaaacccgatactaaattaaaccaatagcgatattgatatgtaggagaatgctggggcatgactggtgtcttttagatttttttattagtaattacagacgtaaaattaaatgtatcattaatgtatatcaaatgtttattcaaaatataataaagttataataattcgttttttttaatttggaatgtgagctgttttttattttagcacaatgctacactcataattgaagatgctcttattaattataataattactcatttcagtctttcgctaatttaaaaaaaaaatgctacaagtttttttttcgagagaaaatgccacacgttttgttatttaaattattataaaataaaataacactagtcccaatattttgaaaaggtaaaacagtaaattagtaatctctgaatttgtattctttcttaaaattaatttgtttaaagacctacatgtcttaaaattaatattgtaacacgttttaaatgtgtattataatactagtggcaaccatttttacttttatttttttgtttttaaacaaataatctatactaataagatatttcttaatattgttataaaataatataaaataatataaagtagacgagaagaaagaagaagaagatgaaaagag

SEQ ID NO: 16534 - DNA, 2076 bp, Cannabis sativa
atataaattatatgtattctcatcattaaaataaatgttattattgttatttagccatgagttaccataactttatgaaacttagaggattgtacatcttatttcttacttattattggaggcatttatttttcgtttaatacaaatagagaaacaaactccaaagtagtacttctaaatttcttaacaaattatttggctaaaatgaggtgacaaatatatccttgcagccatgtccccaaatggaaacaaaattattaggaggacttgagagagtaaggaaaccaaacccatctggaaaaccgttgatcatagccatacaaagccccattgttaggtatcatccaacggcactcggttcgacacctgccgccatctctttgtggatcataaccatcaaatgagtaccaaatagttgaggtttttggttgcatttcacaatgaaataaaggcacacccaacaagttgctcccagtgataatccactccatttctcttccatcttcaatcaccacacttggcagatcatggtagtttgattggcaatgaacaatcatgctatcaccatatcccaaacggttcatcactttcactttaacttctcgttcattatcaatgacaacagttgcatcaaccaataacaccttattattaatgctcatgtaaacctcaaataccactagtaacagaatcaatttttttaaccaataatttgacttttctacaatattcatgctccccatgatattatgcaaaaacatgcacatagtatggtgtatatttatagtctataatatgtatgaaacactttgagatatataatcttttttcatcacccccttatttgtaaaggaaaagactcttgtttgtattttatttgcttaggaagatcatttcaaggatgtgactgattgcttatacataaatatatgtatctttaaattgcaaaggaaatgactgattgcttatacataaatatatgtatctttaaattgcaaaggaaatgactgattacttatacttgttaggcagatcattacaaggacggtgtggatcttgattatgatgagagaacttaatattaattttcaatacctcgtttaatcaactattttcttcttgtaattctttgtaaaattgtaaattaattataattaaaacgttctttattgtatatataaagagcatgtaggaaaaagtaatagtaataattgtgagcaaccttgatatgaaatcaacacagaacacattcatcgtctgattttttttttttacataataagtaggctaattaggatcccctctcccagttttgacatgtacaaaatcgtggcttccaaattttttatgctgttacaaattttttctaaattattgagattgttgaatttaaagaattatgtctaattccattaaatatatactaacatatgtttaacgtgataattgtccatatactaagttgtgcccccggtctttgacttgtattaaattattgccctcgaacatacatccatgtcaggcgtccgttagtagaatggactgagatgcaaaatgaccttaaatttaaaaactaagttaataaatgtccatttttttaaaaaaaagaatggctaaatataataaattaactaataaaaattataaaaatacattaactacgtacatattattttttttaaaaaaatatataataattaaattaagttatataatttttttagtattccatattattatattgtaacaaaaataaataaatatataagattattaaatatatataatttttactaaaagacatataatcatacaataataattaaattcttaattatctgctaattctcatgatttaacaatgcgatcattacacatattttaaggtctaaaattgatttctcatttttatcacaaataagatatattatttattttgccaataaataataatcaattaattcttattaacctcttatttcactagaattaaaataaatattattttcactaaaataatatatttctctctttaatattatttaagaataatattatatttaactaattaaaata

SEQ ID NO: 16535 - DNA, 9021 bp, Cannabis sativa
  modified_base (4462)..(4465): a, c, t, g, unknown or other
aagatacctctaggaataggcttgtaaacatcaagtaagacacagattcgaaggaataaaccagaagctttaaagagagtcattttatcagcctcaaggaagtctccaacttcatctccaatcattttggccagtttgtaagacttcatgccaaaaggaatggaatgaacttggatccaaaagggagaatatctaatttggttgggaagaagggtgtcaagaccagcagggttggcactagtgacaagggaatgatcaaaatgccacggctgaccttcaataactctcttcatgtccccctcacacccaaactcaaccatgaacatcccattaccatactcagagaaaatgatggaagcacgagtgatccacgcatttctcatagcttcctcaaaccactcaatcttaatgttcctagtagtaaagaccctaaaaaccaaacagaaagatttcccaagctcaacaccccctcccacatcatcaagatgctcatgaacagcagcttctctctcagtgagagacagcacattagccatattatcagcaataccctccatgaccgaagacaagaaaatcaaacgaaactcctagtaatactcagagaaagaaaagagaatcaagcagaaaagtaaagagcaccagaagacccagacccttaaatagataaaattagagaaatacctgcatgaagaaaccttaacagggaagaaaacatctgcaatgatcaacctactctgcagaaatcctagcccaaatccgaagctcgtaggtgtaatcatcgaactcctccttgagaaagtcaaaacgacgacttcaatttatgaggatgggatatacgaagagagagagcagaaaaattcaaaggaagaaatccctggattttgattctctgagagttttaattaagagagaagaagaagaagagggaaaaggccaaaagaaggaagcagaggattaaatgtaagttaaatcacattaattgaagtaagagaaagcatttacaacaaatacagattacagatggaggattgaaaattgaacaccacacgggagagatcaagctggaagggaccagaaacgtaacgggatgcaacccttagaaggttccagagagagaaaagtttttttctatgcgaaaaagttgtttaaaaaagtactactttaaaatattacattttggattaatctaatcagattttcaggctattgtgacaaatacatatcacattttcgattaatccgataacttttcagtagtagcaatatttttaaaaaaatttctcgataactttttcgataactttttctagccatatttattcttagaaatcatgttaactttatttatagaattttgttagagtttgcattcttttaatttttatttttatgtaaagctattatattttgtgcaataagttttatacttataaaaatgtaaaataatattttttccccatatatttataaattacccttaaaattatgtgagatgaatcaatgtgattaaatttatcacaaaaataattatatgagtaaggtgaatcaatgttatttagtcagtatagttttttttttttttttttaagaaattcatcaattttatttaactgcaatcattaacgattatatgaagcaactcagtagaaatattattgctcctaagggtacgattagcaacaaaatcggatgctcgaaccaaatagtgagcaactttatttgcagaccgtttaacaaaattaacagaaacatcacgaatttgttctaaacagttggtacagttttttattttataaaaaaagtatgaaaatatattaaatcaaatcaactattataagaacacgaatttaggataagcatcagcctaaatacgagcttctatcaaactagtaacagatttagtgcgtgagctataccatttacactaactaactaagtctattactagttcgatagaaaatcatgtttgaagtgatacttatccttaattttttgtagagttctcatcttaacttaaaaaagaaattaatatttaaaattaaaaggccggaccaaaaggagaagaaaaacacaacttggggtccaaaatcacttttcaaaaatcaaaatggattaatccgaaaaccgaagaattctaacaccacagaccagacaagaggtactcttcttctccttcttcgcaagtttatctgcaaaaccctaactatatcgccatagttggttctctagagcttaacatgtctctttcaatccaaacccatctccaaaacctctccttttccacgtctttaacatgtcccaacactctctttctcaaacccaagctctctaacctctctctccaaaccccaaacccctccattatccgaatggggggaggcccaagaacatatcccggtggtgtatcgaagtggcagtggaagcgcatgcaggcgaagaaagccaagcagctcctcaaagcaaggctctgtcgcgagcgccaaatttacgagatgcgcaagcgagccgagctcaaagccgccgtatcggagctagaacggccatgggagatcgttgagagggctgctccaaacttgttctccgtcagtgctgacgaacaggtcaaggtgttggccgatcggtttcaaaagccaggtgggtttgatatgtggagtgagaaagacgggcctcaattgttcaaaacccccgatgagttaccttcggcgaggtttttcccaaaaggggttgttcatagtttgaaaccttatcgaagaatcgatgaattggacgatggggctaagagcttggatgatttggaagacggtttttcagtgaagaaattgagtgaaaactgtgagaatagttcaaattcgaacgagggtactttagaacgagctgaggttaatgggaaagttggaaagcaaaacaatggtggattgaggaagaagaaagggaatagaagaacaaggtttggatctgataaattgaatggctctgaacagagcctcggcaggaagcaaagattgcataatcctaattcaggaaggaatgattataggtacagtaggagcaagttgaatgagtcgaagtctgaggtttatgatatgagtttggaacaagatggtagctatggattccaatcaaaggacggtcttttggagtcagacatttctactgattgtgttagccatggtttttgaactcattgaaacttgactgcaaagagcattctgtacagaaaatacttgctgatttttgtttatgcaggaaatttatcataacaacatgattgggacagagagagcagcagtctccaaaattttcctggtatacttaaaacttaattttaatgaaagtccttgctcatattctgctgtcaaattttggatgatagaataatgtaattattgttgtaaactggatttctttcattccatgacacactaatgtgacttttatagtataaactttgtatgtaatttgaaaaggtggatatctttccttgactaaatgaagaaaatgaaagaacatctaattgtttagaacttggtttgttatcattctatgacacaaacttttatggcatggatgacctgaatttatcatgattttgtgtgttggcgaattgtttgaaaaatataataatttggcattaaaaagtcaatagtgataattaatcataaggtctgctctttgaagctagtgtgaatttgcattggtttatgataatgatacactattgtgactagatagtaccttccctgaataaatgaagaagaaaacaacgtagaattgtttttacacttgtgataattattgtttcaaacttcatttgtaatcaatctattacatgtatgacctgaattattttaaatataattttgtcttaaaagccaaaggaatattgctacggggcaacaatggtttccaacagcacttgatgaaacatacgcagttggtgcaatctatcttatgttaaatctcacatattttaatttaaaatagaaggtgtgaccaatattacgtatgttgcatgaagtggttttgagtaccataacgatgctcagtaattaatcatgagggttgcttgctaaaactagtgtgaatttgcaatatagcctatagcatgttttaccatttgagttaatatgtggtacacatgttaaaaaatcaaatttaaacttaatcactagattttgtgtgagccaacacatgcttcaccaattgagttacccttttagcttattgcttaactttataatatttgagaattagataatagtagttattgtgtagatgcttaaagggaaatcgagtctatcatccttaagtcttaatcactaatttatgcaaatacagttactgaattttcggagagaatcaacaatcaagagcacttccaataatttcttactctatctcttaacataagtgccgtttgataacacttttgttttataattttttaatcacaaaatgaaannnnaatttttgtttttaaaaattttgttttcgaaaaacgaaaatgcattctgtaaccacttttgtttttcaattttaaaaacagaaaacaaaagtgtgttctgtaaaattaattttcattttttgattttatttaagttgggtctaggtcggggtcagattcgattttgggtcagcagccgggttcagcaccagggccgtgaggagatttgagttggggtctggtcggagtccaaaatattgattaagaaaaaaaactgtttaaaaaaataatgaaagtgatttttttttaaattttaattctcaattaaaaaattgaaaagtgaaaacagttttaaagaacatatttttgaaaaatattttcacttttccaattttaaaacagaaaattgattaaaaaaagtattaccaaatgctactatatattgctaaagtaatactctctataaaataatttttttttgacaaaaaaaaaaaaaacttcattaatcgttcatcattacataaatgaactctgagggagcattacacactcggtaaacacgattagaaataacacaagtagtttcagctaagaaatgagctactttgtttgcagatcgtttgataaattttaaagaaacatctttgtgatgaaaactagctaacagactcctacaatcatcaataattctgccaaaataagacaacatagcagacgaacttcaaatcgcttggatgactacaaggcagtccgtttcaatgacaaccttacaccacgacaaaatttttatccaactcagagcttcttgaatcctaatcgcttttgcaacttctggttgaacgtttcctctagtgcaaactgatctagcttcctctaacctgcctgtatgatttcaggccaccaaagaataattaaaacattgagattgtttaaaaattgcggcatcaatatttaccttaattatttttgcatttggagttcgccaatgcttatcaccatcctctgaattcataaatcctaaggatgtgtcttgtgtcttatcctgagcactttgccattgattaaggacaatatttgccaatgtcacaacttctctaacagatctgtttttgttatcccagaccagatcattttgacacttccataaagcccaaacaaccattgaaatcaacctttgctcgctgccaacaaatctggtgtaaacctcctttagccaagtggagaatgtcccattgacctctgttggaacacctatttccaatctattacagcaagctttcgaaaaaagaacatgttatcaacacatgtgagattgtttccctctcagcattacataaaggacaaagatcattaacatgaacatgtttagtttgcagctgggatttagttggtaagcaacttccaaaagccctccatagcaggtttttaaccttcggtggaacttttaagttctaaacttttcgccagaaaccagagttgtcactggtgtgcctctctcccttctcttcttgcaagcttctgtacccactcttcacaaagtaatgtcctattttttcaaatctccagtaccaagaatcattctcaccattagataaaggaatggaaagaattatattaacatcacactcaatgaaaatatcatgtagtagctcaagatcccattgaaattggtccggaaccacgaggcttgatactgtaacatcaatcaaggattcactaactgtatggatataaggatcgacctcactaggaatctaaggatcacgtagcacctaaactgtatttccaagcccaatctgaatcgctgcacctttcttgatgagatgttgggactcgaaaatgcttttccatatgaagcttggattacctccaagctcgacagacaagagagaaccatgtggataatacctaggtttgtacactttactgaccaaagcatcagatttcgtcattaatctccatccttgcttaccaagaagagctacgttgaagtcatgcatattatgaaaccccataccaccttttgtttttggatgacatagcctttcccaactcatccagtggatacttttttttttttgacgaggaacgccaccaaaattaatacaatattcatttcaaatctttgcaagtttctaaagggagcaagaatacatacatggcataattagaaagtgcttgtgctactgtcttgacgagaatttcttttctagactttgacaaaagtttttcttcccaactttgcacacgctgctgcgtcttatctttaagaaagcctaatattactattatttctatccaacaatattagacaaccccaaataagtagtgttatcatctgcttcatgaatacccaacaacccatagatttcatctcaaacttccactgtagtactgtgactataaaaaaatagatgacttatcaaaatttatctgttgcctagaagctttttcaaatattttaagcagttccaacacatgacctgcctctctttcatcagccttgcaaaagatgtagctgtcatctgcaaaaaacatatgatttattacttgtgcaccacgagcaacttgaacacccccgaggagacggtcattctcataatcctttaaaagcgcaacaaatccctcagcacaaattatgaccaagtatgaagataatggatcaccttggcgtataccgcgacttggaactatattgccaaatttcttccctgagtgtaatattctataacaagttgtggtaatacatgccataaataaagaaatagctttgtctgtaaatcccattttgtgaagcaaaactttaagatatccccactcaattctgtcgtatgctttactcatgttgagcttaatcgccatacaactattcttcccagttcgtttcctcttcatgtagtgcatcacctcgtaagaaatcatgagattatctgtaattagataccctgggatgaaggtgctttgagtttcaaaaataacttggtcaagaacttttttcaatctgttgccaaggacctttgacacaatcttatacagcacaatacacaaggaaatgggtctaagatcagccatagtgacatgatttttcttctttgggatcaaaacaatattggtatctatgagatgctcttcgaaaacagctgaatcaaaaaaatcttttactaaatcaataatatcttttcccacaatactccaaaaattttgaaagaaacccggactcataccgtcgaggtcgagggacttatccggatgcatttgaaataaagcattcttgacttcatcctcctcaaccgactgtaatcactccatattttgatctgctgtaatggcgaatacaatgaacaacatgatcccaacttgtatttgaagcttgaaacaagttatcgaaatagctaatcattaactcttgtaagttgttttcccaagtgactttttgactagtttcattgcaaatgctgctaatatgattggtgcgtcttcttgttttagcagtagagtgaaaatattttgtgttttgattgccttctttcaaccacatttgctttgccagttgcttccaaaaaatctctttctaagataacacctcataaagtttcttcttttgctcctggtatttagcaattgactccacatcctctcttccttttagtgctttgataattttcttacattgctttatccgaagattgaaattgcatgtaatttcctcaccccaacctgcgagtatattggcatagtgcgcaatcctatcccccaatggttgatgatgagtctaagcccacgaatctgctaccagctgcttgcacatcggctcgcataaccaagtattttcgaacttgaattttgtagtacgaaccacgactggatggttattaggatcaagtaagattggacaatgatatgatgtggaaactttcaaattcaataatacaaaattagagaaggaatctaaccaagatgcagagattaaggctctatccaatcttatttcaatccagttttgagtctccttacctctttcccatgtatacgggtatctcaccatatccatatccatcaatctacacctattcacaacgtcttgaaacccttcaagcaatcaagatgggtacggtcgtccacctttcttatcaccatgcttaagaatgttgttcatatccccaatgagacaccacaacagtttcgtactcaaagccaagtcttcaatcaaatcccatgtttgcttttgtttggatcgatttggctccccataaattccagtcaacctaaaagctctttttcctccgtgcaagacctcaacatcaatatggttctggctataagtattcaacatgacatcatctttatttttccataataaagtgatacctccactatgtccttgagagtccacagtgaacattcccgccaaagaatttttaattctatcaactctttccttcatgcataagatttcacttagaaaaataaaactgggtttcttttggagaacaatctccttaaagaattaaatggcccatggagtcccaagcccacggcaattccagctcaaaatactcataatgattggcgaaccc

SEQ ID NO: 16536 - DNA, 7397 bp, Cannabis sativa
cattattagcggcaaatttgacccgccgttaataagtctgttgtaaattgataaaattattatagtgttaagctgatttcattaaaataaaaaaaatatacataaaaatattatttaaagcctaataatccaacatacataataaatattagtttagtccaacctaattctcatgatctcataatgaaactgccaaaaaataaaacttacttattcaatacacatttacaatttattattgtttaggaagatgagaattaatattttagatttaattttttttttctttaagctgatatgtccaggtgcacaataagaataatatcaataaatattttttaaaataaaatatattaaatatataaaattataaacatatttcaaaaatatataaatttgattggatgaccattggatgataattggatcagttcgatacggttatccattggatcagatgtcccattcagcaatcgatctgatccaaactgatttttaaaatttacatttgatctgatccaattatgattgcatatttgattctattagatcagtcagttgtaattggatcagatgactttctgcacactcctagtagcatgtttttagttagcttgtgaaggagtttaaagaattgtactaaaaacacgctacagcaaatactctaaactctttcattttgaagttctttaaaatttactattcatgctttacaattataaaatactattcattgctctaaatatattttattaattattttttgttttaataattatttttgtatcaggatatgtatatatattaatattatatatttaaaatgaataaaatacattaaattttttaaaaaaatgaggttttgatgatgtatttcaaaaagttgatgtatggtttaatgtaaaagtgtgctgtaaaatagagaaagtaaaatttttgtgatgtattttaaaaaatagagtaaagaagttgttggaagtgctcttaagttccttaatattttagagaatctctattttaaagcatatgatgtgagtgctctcacattagatgagttacatttgagctattatagcttattctctaaaatataaagaaaaattctttcatcaaatgagctaaaattgagctatttatatatttttttagctcaatgatgtgcttctcgacatgtagagggtactattatattagttttattaaagttttttttttaatatatgtgtgtgatattattatattaatttatttaatttttgaaaaatattataatatttaaatgatatagataaaaaaaaaatatatgtagtaatgtaaaagtgtgaggtaaaatagaaatagtaagattttggtgaggtatttcaaagaataaaatagagaagctgatgagagtactcggatttgtcttattatgatctatatgttgatcatcacatgtttcatttcaaacagaacaaaagtgggacttctcagcatttattgtagatttagaagtggggacatagttcgaaaggtaaaaaaacatatattgtcttttttttttctcactcatgatatatactatgttaaaaatcataagactagctattcgtttaaaaatcaatttatactttttataaatggtttaatattttcatatatttacaatatgtgaacatatgtattacatactttggattcttgtatttattagtgtattaaaaaagaaaaaaatatgtcatatatatagtgtaggagttaacttttatttaattttgtttaacatttcaattgaattattgtattttgaggatcagcagaaagatcatgtaacacattaatcatgatgaagctaacaccaaattagcttaaatgtgtgttatattcaaattaattataaagcatttttgtttagcactttaaggtgtccaacaccacagctacgtgatgttgaggcttcacattagttagcgttattgtgttgttagtcaaagttagttaaatctagttagtattcagtttcagcaagtacattccttaaggcatcaatatcggcagttaattaagttagttggggaaaattttgtttttccaatactcttggactatgcctttaaataccaacctcttctacagtcagaaataattttcagaacttcttcttccttctctcctaaattctcactgtacagaaatgaaagcaatagaactctatccttttgtgagttcatagctgttggtgatcatcaccattgtaacaccagtgtgaatcaataaagattgaagccaaaggctgttccatccaggaagtagacaatttccactgttaagcaattgattgagcctccttaaattggtgtgatttgatttctattttgcatttaatatttttcattctcttgattcgttagttcatgttattgcactaattgtcatctctgttcttgattatttttcaaggtgattaaaacaccacatgtggtatcaatgcattgagattcaaggatcaagatttgattccttggtgatcaagaccgatcaagatgagttcagcgaaattcaaaattgacaagttcactagagagaatgaattctgtctatggaggctgaaaatgattgctatgttgatgcaccgggacatatcagaagccattgaaccagaaggtcttgaagatatcaaggaggataagaagaaggttaaggagattcaaaagaagtctcacgagatgaagttctttgagaggtttctggtgagacccctacaattggattgtggaacaaactgtcctcaatctatttgaaaaagactttggctaataacttgtatctaaagaaaaggttgtacaccttgagaatggatgaatctgctgagctcaggaagcaccttgataagttcaacaagatcattcttaaattcaacaatatttgtgtcaagattgaagaagaggatcaaggaattgtcttattgagttcattgccaaggtgtcatgaatatttcgttgatactatgttgtctggaaaggagactttgacaatgtttgaggttaaagttgcattgaattccaaagagactcagaagaagtttgatgataagagtggatcaaattgggaaggtttgatggctcgaggtaggtctaataaaaaatagaggacacaagagcaacaattcaagaggaaataaacaaagaaatcacagcaataagggcaatggttctagccaatcaaaatccaaattcaaggttggaaagttctgcaattactgtaagaaggaaggtcatctcaaggatgaatgctacaatttgagcaacaagaacaacaaggacaagagtaaagaaaagaatgacaaaggtaacaacaatgaggttggtctcactgctaatggttataattttgtagatgtgcttgctgttatagatacataatcaagaaaagattggatcttagactctggatgcaccttacatgtttgtccagacaaaactttattcagttctcttgaagaaaagattggtagaaacatacttcttggagacaacaaaccatgtttggtaaagggaattgaattaaaccatcatcatgaaaattcacgacaatgttcaaagaacattaactaatgtcaggtatgttcctgacctgaagagaaatttaattttattggttctcttgctgctaaaggttgtacaatcaaaattaatgagaattatcccaaggttttaaaaggatccttaattgtcattaagggagaatacaaacatggtttgtactattttgttgaataaattgttacaggtgttgccacactagccatctgttttgagaatggagctaataggaataaactaactgatcaaactagactttggcatcaaaggtttggccatgtgattgagagaggaatcactgaacttgagaagcaagggattttgaaaggtaaaatgtctgtaaaactagatttttatgaagagtgtgcctttggaaaaagtttcaaagtgaaattcccaactggtgtgcacacattaaaacaacatctgaattatatacattgtgacctatagggaccatcaagagtaaagacacttggtggagcaagctacttcttgaatattattgatcattactctaggaaggtatggatcttcttactcaaaagcaaggatgaaacttttgagacctttatacattggaagaaactgattaaaaaatagattgggaataagatcaagaaactcagaacaaacaatggccttgagtactgctttgggatgttcaaagaatattgtgtcaaataagatataccaaggcatcatatagctccaaagactcccaacaaaatagtttggtaaagagaatgaataaaaccctcatagaaagagtgtggtgtatgctgactggagctggtttggaaagatagttttggggagaagctatcaagacaacatgctacttggtgaataggtctcccgctgctgcaattgatttaaaaacacctcaagaaaaatggactaataggcttcctaattgtggtcacataaaggtatttgggtgctctgcctatgttcacatcaagcaagacaagttacaaccaacgctaatcaaatgctgatttcttggctaccttgatggggtaaaaggttataaactctggtgtcttgaaccaggtcatcttcaatgagaaggaaattcccttaaagctgctgaagaaaatagtgcacaaggtacatgcaataatgttaaaactcagactcaactctgccaggacacattttggtcataagtgtgattagatgcatctacatccactgaactttttacatctcaaggtgaacttgagacatatcaacttgccaacgataaggaaagaagagagatacaccctccagacgaattgggatttgctaaactcgtagacttcatacggtttgcattatcttttttaggtgagattaacactgtagaaccaacctcctacaaggaagccataaacatcagagatggtgtaaagtggcttctagcaattcaggaagaaacaccatcactgattaagaacaaaacttgggtaagagaccacctgtatagaagcttgtagattgcaagtggataatgaaagtgaaagagggcattccagggtttaaatatagaagaatcaaggcaagactagttgccaaagggttcacgtaaagagagggagcagactacaatgatattttctcaccagtggtcaaacaagcctttatgagagctataatggccaaagttgctgagtgttactatgaaattcaacacattttagaacaactttccaacatggaaaccttgaagtgaaaatcttcaggcatttcctaaggctgctaagtattgacaccagcatctaatgcccttaggggctctgggaacaatctattctttactagtttaacttcactaacgtcaactaaatgtggatttgtggtgttagttaagtctagctagtattcagtttcgacaagtaaattcctcaaagcttcaatctcggcagttaagttaattagttggggacaattctgtctttccaacactcttggacaatgcctttaaacactaacctcttctacagtttgaaataattttcaaaaattcttcttcctcctctcctaaattccctttgcatgcatagaaataaaagctatagaactcgaccctttttgtgagttcatagttgttggtgatcatcaccattgttacaccaaacgtgaatcaataaagattaaagccaaaggttgttccatccgaggagtagacaattaccattgccaagcaactgtcgaatcttgttaaattggtgtgatttaatttctatgttgcatttcattctcttgattagttagttcatgttattgtactaccatctctgttcttgattattttttgtagtaattaaaacatcacaattatttattaaatcaaaatatttatgagacttaatatttgaatgtacagtaataataatttactatctcttgtctctagcatttctcaaactcatacctacaacgaaaaagaaatactgtgacaaatttttagtgaaagtataaattttgtgtaactaaatgttatatttagtttacccaagctaatgaaatattatttgtgatgaaaatgtcatatttagtcatacgttacgttttcttttaaattaagtttatttagtcacaaataatttctgatattattttgagataattacataaagtatcattttgtgttaaaaaattacatttttacgtttaaaaaatttttttgcgatatttttacggtttttcataaaaacaacacgaaaataacaataaaactacataaaagtaacatgaaaataacatctaaataatatcaaagtaacaatgaaaaataacatacaaataacaaaaaatcaacaataaattaataacaagaatacaccataaaatgaccgcattttctgtaaataaaattaaaaaaatcgtaaaaatattttaaaattctgtgaaactaaatttttgtaattttttttgttgtttttgtttatttgtgaaataatccctattattttagtctcaactattatgtattttaataataaaatttgttctgactaaatatatatttaggtttttttgataaaatcacattaaatatagcatttatcaaattaccaaaatcatattttattatcaataacattttagtaaaagtacgaacactaaaaataacatttatttaattatcaaaaccctattttattattaatagagatcattgacatcaatattatatataattaattaatcattaataattctcattttattatatcgtcatgtattatattgtacaattatagttaaaatatatctaaccatgatatctaaacacacttattatatatatactttttatatatatgtgtgtacactttgaaaaaaaatagttgacctagggctaaaatagaaattgaggcttaaaataatgagtatgttatacgactatttctattaagtatgattagaggtaataaaatgaaataaaatagaacataaataaattttattttattcatttgtttagttttattggatttttattcgtattttaactatgttttcatttctttcaacctccgcctatgagtttgagtttgaaagattagacttggagaaagtatacttggaaggaatgaaacccaattaagtgttgaaggagattaacatgttaccatcattttaatttaaaaaatttgatccacttagaaatacaagcctcttggtcatgaaaatttaatttagtttgatattctctttctcattaagtctaaaccttgtattaaacaccaactaaatatattttgcagagtaatgggattatgggtcactcatccgctagcatttcagatttttttttttttt

SEQ ID NO: 16537 - DNA, 2174 bp, Cannabis sativa
tgcattttagagcaagatatctagtctaatttgagggatatcttgttttctgaatgcccttaatttaatgaagttgatatttcattaaaaaaaaaaaaaatgtaataatattacatatacgaaaacaatacaatatgacccaattaaaaagatatactacaaaccaagttgactaaagcacagattcacgaacgtttgtgctttctctatgagaaacacttacttccagtttgaaaatgacatcattacatgaaaaactaatatactaacatctaagaattattttgataggctcgcgtgttgaggcccacaactaggttgtatatctctactcttcagacaataaatgatcagtacctcactcaaatcatgataagtgaaaccatttattgatcaaattttttgtgcattgaattaaatttatgtttatctagcttgtttatgagcattggctcagcgtcatgagactagctgtacaggaactatagaatcatagactctgtctgttgccttctttgcctaaaccaaaatgatgagatcgagaggtcagactaagaagagatttcaatgccaaagagatagaggcaaagatatattacctcttgctcccagtctgtttttatggtgaatgtgaaaagagatatcacttgtacaatgagtgcacatattatccccaaccaaagaccctacaatgaagaaagaaaatgtttccaataacaaaaataaataatttatctcaaatctagataaagtatgtttaaaagaacaagacaagttttaatgatttatggaggagacctttccaccaacgtgcaagacaaaagccatcaaaacagctgatggaattcccactaagtaataggacccaagatttacgtatgctccaattttctgccatccacatcctctacaagtacctaatattgtaaaattaaccacttgttactaaactttatattttgtaaatctcaaataaatagaaattatactcaacctgttgttttaaagaaatgtactttccttacagacgcaggaggcaggggtgaaagtgttcttttcaaatcataacatgcaaaaatctttttatgtgttgatattcaggacttggttcaaaatgagagatgacactataaactactttctgatgtcagatttatttctgaacttgaaaaaaacttttagattgcctttaatgaaattgaatacagtctattcttttcaaataaatcagtcttcattctattagttacattttataatattagaatatcagtctaataaatgactttttttaccattttaaagaaatgactatttcattttgaaataataataaaaaaaagaccacccaaattcatgacaaaaaatacaattaataattttttttattattcttttttatgtttttcaaatgttacttttatttttatttcgattctcatgcttatgtattcattcctcccaacagttgacgctaaaaaatggtcaactctacatcgtctaataagtgatattggcaaacaaaaaaaaaataagaactaaagagagaataccacaatttatagtagtttactccccatatcacaatggtaatggagctgcgtttacttcgaatttttattatcgcaaaagccaattgtcttacaagagaactcaggaaaaaataattaagtctagattcacttcacaatttctaatctagagagagaagctctgaccttgaagggagaatggaaagtgtgaataatgagctaagggagctctccttttttataggcaaggatatctaactaaagtactataaaataatagaaaaaataacacgaaattcattggaaaatccagcattatcttgctagtcaagtttgaggcccaaattgtcagaattgcggcgggagtgtgagacacacttacatccgtcttgaaaagagcttccattgactacttgaatcaggtcatttggataaaaaattaaaagagttatggccattttagcgagaggtgtgcactgctgaaaagtgactgcgagatcaagctaacttttgaaagtccaagttgaggtacccagaacatggtttcttgggctttaggtatattttaaggggaaattcatatggtatactaaattttgtcatttttttccaaaaatactgccaggcggtattttttacttt

SEQ ID NO: 16538 - DNA, 5711 bp, Cannabis sativa
atagaaccgattcaatccaacatccacaatatggatgttgggtcgattggatgactacaattaattagatcggatcagatagtaaaatctaacatccaatatataattggatcgaatttggataggtctaaaaacattagatatggtccaatgaacacccctaggggcaaactaattctgcagcaactcttgaagtaataatttgatcatgcaagcaactttccttgtgatcaaaacatcaatatagcaatgccaaagttatctacaaatagaaagtctcagcattcctaatcaataaaagattataaactccccttgcgaacaaaaactagaaagcacaaatggaaatgaattcaaaccaagaaagcatcaaatatgcatcaattaaattggtttatcattttcaacattatttattgtagatatagaggataaggcgaacaggataggcactaagaaagtgaatcagtgacagaaaagaataatacctgtagcatctagagcacggattgcttcacaaaaggcattgactctttcacggcgacgcataagatcactggaattgattggcgtagctgtaaattgaaaaatctttgacaaaagatgtatggcatattaaggaaaaaagaaaagtggcaaaatatgagcaacaaatgttaagtcctagggaaatgtaagattatgtaataagaaaagtagaggatataatctctaagcctatcagttgtatgtggaacagcaatcaccagagctcgaacaacagcaactgtagcttcatgggatccatcttcaagaaaagcatccatttgaacacgtatcttatcaacaatctggaatttataaaattggtcagcatgataccttgcatcaactccttcaaattgttattttataatgtacataccatatcatttttgaaatgctgggcaacaggtccaaaagcatctatgcttgcatattttacattaaggtttgggtcagagcccagagtaactagagcaggcaaaatatgtgtggatgcaacttttgcatcaacatagggaacctaataaacaaagttaatacaaagtgttaagagtgcaacttctactatcagtaactaaaatctaaaaatgaatggccaaaacttactatgactttcaacagaccggcagcacagattttcatatttatatgagagcttacaaccatttcccataggatattaaatatcattgcatggtgttcttcaaaagtgctgcatggtgaaagatgcatactgagcaaacaacagaatgtagacaataaatttacaaggcatggtaatgctacaaaccaaaggaagcgaacagcatcaacaatctcagcattgcacttcattgactgagcctcctttgtagtgccttcaactaatagatttttcaagtattctgccaacttttctcgcatgtttgaaactcccagaacacctgccaagagaagaggtaggacacacatggtggccagtctctcagccacagccgtccttggtctcaaacctggtatgagggaacaattagagatgcaaccaaagcgcaaaagaattgtgtcaacttcaaaataattacccctgatttgagagtggatagcagatgggaaaaatttcaaatcaccatcaccaccaacagctattaagaacacaggaagcataatgtgcgtcaaataagaatccccaaaaagttctgatacagccaacaagatctgcaccaccactactgagattaagaactggaggagaactttcttaaaaaaaaacttatttacacatccaaataaaagaaccattaacatcagacaaaccttggtagttcgatttcgtaaactgtcttcctttggaggtaacaaacaggaaaactgtattaaatcaggaaagcaatcgacatgtatccattcaaattctggccattgaacatgtcccctagccaaatatagaattactcataagcattactaacacagagataatggaatggaaaagaaaaatcacccttgaaacaaaacaaaaagatgaaaaatacataaataaataaataagggaaaacaaagagcttaccctgcatataattcaagcaatgatgtagaaaattcagttccagtagtttcaggaatggcaggaaatgggcatgtttcaattgctcttgtatgcacataaggaagcaactcggccagaagtttaagtaaaacatcaacattccagcgttctctttcacctaaaacatgaagataagactccacagatccttcaacccctgatagtggtgggcaatgctgtaatatgacagccattttaacataaagaggttataggaagaagaatgtgaaagagaaagtgaaaacaaaaaaaaaacaagttcaaattaacaatacctgcacagaactcaatatatgtgatagaagaactcttaaaacatggtccaatttgtttccccattttaccactgcaggaactaattgcttcagagtagtatccaccactgctccagaaggatcacagaccaattggaacatcagttcctcaacctgtaaaacattaataaactattggagatccttgtcgtaatttacttcagtttatttctcttttaagttattgttttacgtggaaaaggctccatccctagaccatgtgttatcaacctgttctagagcttacattgtagccatttctgtcaagtcagaaatcttctccatgagagcctcgaagcatatttagtgaggctgaccttgaaatatttgtccatatttggaaagagcggtagcagcacagcgagattacgtgcagcggcctcacgaacaatagttgcagaatcctcaatcagttgttgaacaattgataaaataagtgaatcgcgaatctcaggtctgacaaattctgcaagctgtccacatgattgagcaaccagcaatctacgctcctcatacatatgatttatctgcaacccattaaacaaggaaaagttacatcaaaagtttaaaggatacaggaaaaggtcgataaacatggctgtaacttacttgttcccaacactgtggaagcaattctgtttcagttctcatttctcctacattcttagccagagtaacacatgcctgaaaggaagtttaaaagattcaaacatcatggcgaaaattgtatagccacatcacaaaataaatgtattcctacatccataattattcgtctttgctgttcatctggacgttttattagattaaacaaagtgtgggtcaaggaatcccgagtgctgctctctggatggcgctcgattgcacacatgattagaggaagaagttcctgaaagtaaaaaagatgtcttcagaataatagcctagtcttgcagattacaagaaatatattcaaagaaagcaaaaaacaacctctcggtggttgatcaagacataaggaacaatcttgggcaaggcatcagctagaatctgaattgtccctggaccctgccacagtacacacaactttagaattggaaagatatggagagcaacagagaaagctatagttggaggctttaaagctttcaaaaatctaatacagcttcaaaatcaggtataatacaggaaaaatggacaacttggcagcttttaatctgttcacgtgtatctgaggatataatgcctcatacagatcaatttacttgccataatttcagaagcagcttcagaattgaggacagatgactttggaagtagcctgctatcatctgacgaaagctcgctattgagcttagagacactctcactgttcaatgaagaactaatatcactggaaggattctctagcagccctgggacaagttcagcagatttatctttgctgacatcatagatttgagtaatctgtgattgagcatcatctccacctacaactctagaagctgcatcagttggactaggaatcacacttttatcttcatgtatctcaacaatattttctgatgtatggttattatcaatatcagaatggacagaaaccagagaattcgaagcttctgtagttcttgattttaagttttctatttccatctgcagggacttaatctcttctttgtatctgtctaaggactcaggatgggcttgatcaatatcagtagcagataaatttctcccagaacgaaaaccttcaatttgcattttcagtgccgtgatttcagctctgcaatcattaagatcctttctttggagatccagggactgctttaaattttgaacctgaaacaaagggtggattttgtcttatacatacaaatttcactttaagagcagcacatgaaataaaatcatattgtaacttactaagttctctttgtctttgaggtccttatgaacagcttctaaggctttagttaatgcacttatttgaccttccgctaaatctttatttttgagcaggcttgctttttcatgatttagcctctcattttctttctgtagtgagtctttttctcgaagcattgcaattttctcctgcagaaaggaacgaatccttaaatatgttcagaccagcaaaagttaaagataaaacaatgaataagtggtacagcagaatgctcagctactaataggcctacagtataaataaagtgtcactattagcttctttcaatgcaaaataaagaagacattccccatccatgtactttggtaaattacctcagcagcctctgttgttgatgaaagatactgataataataatgtcgtaaggcatctggtacacatgcaggcgtattctgccaaacatctaaattctgatctgcaacctgcaaagaaaaaagtgaggcagtaattcttcaagattaatcaacagtataagatactatttttggattagcaatatttggtaattcataatctacaatagtgtgcgtactcactttgaggtctcccaaataaaacgggagaagaaacttcagggtaaataaataaataaaactggtcaaaaagttctaatctgataggattttcctctcaaattagattagatcagcaagctcaaatgttttttagtgaactacaaggagaaggaataagaaaaatgagtttttattgaatactccagattccaagagccctgttctctcccaccaaaaggttacaaacccaacaaaattctagacaccctcccaaggagcctctcaacagactattttaaaactcactagactatcgtggacgtcagccacatactaccacaactcacataacaacttacaacctgtacacccataactaacttttaatcccctgctgctgccttgccatagcctctgaactcaacaaacaattacttaattgagcaaatgaacaatgccatgagcatgagtttacaatcccaaattcttccaaattttaatgtgaaataatacaatacatgccaaacagttggtggcagaaattcaaagctgatccaaattatctgtgtgcatgatgaggacctgcagcacaattcacaacaaccagcagcaacacaacaatacaccagcagcaacaatacacgataaaccagaaaacacagtaggattgaatcaataggtgagcttttattgaattaaaggtaaaatgaaacactctcccacactcggcagagagctaaggtagctctctcctgatgcagtagagatttctctattacaaaatgcataaccgaaaataacattccctctccatacaaaaggtagct

SEQ ID NO: 16539 - DNA, 2132 bp, Cannabis sativa
  modified_base (544)..(550): a, c, t, g, unknown or other
tagaaaatacagggtccattttgccatttaaccaaatacagggtctaatctgtaatttttgcaaaacacagggtccaaaattatatttacccttcttttcagacagtaacacatacagttgcaaaaataattttttaacattgtgattaattttaagaagtttgctataattacttaatttttttaaaagataatatatttgccaagagccaatttgaaaataataaggataaagagtatttctaataatttaatatgctccttcctaaatttaagaattattttcatgacttttttttcatctcgagataaaaagaaaagggtctcatattgaataagagattgttttaagacaaaacacaaattagtgcccatttcttctcgagaaaagaaaagggtctcatattgaataaacagtctttggttccacttatctcactgagtagtttccatgagaaggcctctgtcatcactatataatctcctctagtgccatgatctccatatatattaacatattccaccaataataataataataatnnnnnnnataataataataataatagtaacttagtagtttctctctagcaaacttgtactagtgtcgtcgtgtatcagaaattctatgtttcatatcaattatcagaaaatgaattaaattaaaacatccttaataacaatacaacattcactaatggccacacccatagtgaccgaacccaagacaaaaaccaataacaaaaacacaagccaaaagccaaaaagatgggagtttgaagttcaaacacattttatacaagacctcattttttttgttcaattcatcagccttcaaaatcagttttgacccactgacaatacttgctcttcatcctatcctccaactccatggccttaatctccttaatcttctctgcattagccatggactcctcttgaacctgtgcaatccttcggctacgctttttggctgctgcttctctctcagcctccaaaccctcatactccctcacccaacagctatgcacagcacagctgagcagaaacaccgccacctgaagaagaaacatggcagttaacaccccacactccagcctcacaaggagcttggcctctttggggtcccggctcgaacggaggagcaaaagggtcgaattctccttggcgaacgagactaggataccgagcaattgtccgatcagcgaggctaggagaagggaaacgtgggtgatgtagcagaagtgagctagctgagagtagaagccaaccaaggaggagagtagggagattgaggagaccatgaggaaagccattccgaaggaagttgggggtgttcgaatgaggattatgggagctactgaggtggcggagaggatgaagagagtgaagttgaggcaggagaggaggaggtttgggaaggagaatgagcttctgaggtgatgagctttggatgaggccatagattattgtgtttgtttgaacttggagtttggtttggtttaaggagtagagggagagttttgaatttttatagtaaggtgtgtaattcaaccgttgtggggatggatttttacaacggctacgtgggtaaaaggtttaaaggtcccacttttatcctagaatgagtaaaatgaatggattattaataatgataattccctcctcagagttttaaaatttttgaggtctgttctgtacctcgcctgtgccacttatgagtcatgactcgacttctttttttgggtgttttacacacgtgacttagctcaatcatttataatattggaactgttagtctctagacatttttgaagcaaaatactatataaaatagtcaattcccaaggcaacgtaaatgaactctacaaaatcctgaccgctaatctctcattgtgggaacaaatgtgtattttttgaacaaaaagttactaatgtttattgtttagttacgcatataataataaaataaacgtactttaatcagtgtggttccacatccgttaccgtctatgtttttttagtgagaaatgacacctagatttaaccagaagaaaagaaatataaaatattattaaacatgagtttagataaagacaaaacagacaatactggaattcacttggtgaaaa

SEQ ID NO: 16540 - DNA, 5291 bp, Cannabis sativa
aagctctaccgccatagccatattactctcaaagtgatgaactcagctccaccttacttctccaaccttttcttctacctctctctcctcaatgaacctctccattagggtttcaaaagctcaaccttttcccaccaattccttctctctccttctctttcacctcttctcttcactccctcactataaccactcctcactttcagaaacccattacagagacctcttattcaccaccattgataaaaagccctgggctttttcctcttccaccaaatgggtctcccctaaattcagacccattattctcaaccccgagttgttcgtacgagtcctccgttgttctcatcaaagacccagaatcgctttgagattattcagatgggttttgggtcaatctgaatttcaatactcagaatttgctttttgtgctatacttgaaattcttgctcagaatggtatgatgagctcggcttattcggttatggaaagagcggttagtgttaatatgattggaattgttgatgttttgattaatgggtttgtttgttctgatgagattagtttaaagcttcttgatttgttgttgtggatttatactaagaaatcaatgattgaacaatgtttaaaggtgtttgagaaaatgactcaaaggggtttagttcctaatgttaagaattgtaataggattttaaggttacttagagatttgaatatgtttgataaagctaatgaggtttatagattaatgggtttgttagggattgagtttactatggtttcttataatactatgttggattgtttatgtaaagaaggtgaagtgaagaaagctcttgagttattaccaattatggagaagagaggctttgttggtaatgatgttacttataatgttttgattaatgggttgtgttccaatggagaagttgagcaagccaagggattgattggtgagatgttgagattgggattaagagtttctgttcatacttataatcctttaatccgttgttgttgtattaaaggattggttgatgaggcattagggattgttgatgagatgattgaaagaggtgttttgcctagtgttgtaacttataatacgattgtttcgggtttttgtaaatgggcaagaatggatgaggctagacagtgttgtttcgatatgttgaggtgtaatttgatgccggatattgtaacgtataatactcttattgatgggtattttaagttgggaagaatgaaggaagctctccttatgtttgatgagttgagatgtaagaaccttgttgctaccattgttacttataattctcttatagatggtttttgcagaatggggcatttggagtctgctcgatcggtcaagaaagaaatgatcgatgaaggaattcgccccgatgtttttacttacacaattcttgtgaatggatgtctcaaggcagggtacttatcattggcaaaggaaatctttgatgagatgttgcgcgaacgcatagtgcccgatggctacgcttacaatacactaattgcaggcgagttttcgctcggggacacattgaaagcatttagcatccaagaagaaatgcttgtaaagggtgtgtgtcccgatttagtcacctacaatatctttgtgagcagtctttgtaaacttcgaaatttgaaagaagcttgtgagtcatttcagaatatgataagcgatcgaatcgtccccgatcatatcacatatacaagcatcattcatgctcttttggtaagtagacatataagaatggctatacaggtattctacgatatggtaaagaaaggcgtatcgccttcggttgtaacctatacggtattgattcacacacttgcagctgaagaaagtagtctaagacttgcttttatgtttttctcagagatgcaaaagaaaggtattttgccaaatgtgattacttacaatgcattgataaatggtctttgcaaaggaaggagaatgagtgaggcttatagattatttgttgagatggaattcaacaaagaaatagtaccaaataagtatactttcactattttgataaatgaaaattgtgacatgggcaattggcaagaggccatgagattatacaatgtgatgttagatagagaaattcaacctgattttcatacacacactgctcttttcaagaaactgaacaaagactatatgatgcagcaagctgttgagtaccttgagaatcaagttcttttgtagtgaagaaactgttgattcatcaactctaagatgaacccgaactgacaggcaacaatgtcgattattgtgttagttacaatgattctttatgagatgctaaattagatttttagtcacatttttgttatgtaatttagattttggccaacctagtaaagatcataccagcctaggtttctacagtctgttaatagaatatactaaaagcatcttaactaatttatgtcttttcttctatatagctctctgaattttgacttgtaaaattctcatcaatgtaataatgacaatgctgtccacattacatttcaaaacttagcaaaatttgaggtcatgttttctttttgtgcatagagatttacaaacaatttaagtggtatcctagtcaattttctcaagaaaaatattattaaattaataaattcattgaaaaaatgtcagaaaaatgaatcacatttgagatcatgtaatatatgagatggtttagtaggttgtatagtattgtataaaataacaaataatattatatttagataaaatattatattttgttaattattacgaccataaattttaatagaatgtgagtcgtattatttaatacataacaaatgactagtattaacttgtattataatatttacaaaagttctagggtcaacccccaccctaactccagaccctggactcgaacttcagacctcaaattttaacttggacatggactcggacctggacatgaacctggatccagactcggaccccagacttggaccccgaacccagaccttagacccctcgacccgcacactacgcactacatatcgaacccagacctagaactagccccaaacccaaactccgaaccccaaatttcggacccataccctgaacttggaccaaaacctgaaccccagacctagatttagacccaaaccccagacctggacctagacccagactcctaacccggacccagactcgaatcgcgacttgaacccagaccaaaccgcgacccaaacccgaactaagacctagacccggacttgaactagtacccaaaccccaacctgacccagcacctaaacttgaaccaagacctggacttaaatgaggactcgaacctcggacctggacttgaactaggacccaaaccccaaacttggacttgaaccagaacccaggaccaagttaggtttggggtctgggttttgagtttacgacccgagtccgagtccgtggtttgggtttgggtttagggttcggggttcggagtttgagtctgcgttcgggtccaggtacaggtcacggttcgagtccggtattggagtcgaatttattgtaaagaatttataattttacacgacttattagtacaaatcaatatcaaacatagcattgtattaaataatactaatacaatataatataatacaatataatccaacacaatactatacactacaatacattatgatacaccaaatgagccctaaaaatattattatatataaatatgcgtggattaaagataaatacaaaagtggcttaagaagttatatgttctcattttagagacataagtttttaagttactttgttttcttctaactactttgggttatgtccaaactatttagtccgaattctaagaaaagaaaagtcacttgacattagatcctactgaattttcttagtataaaaattattaaattcattgaaaaacaattatcaatagacagaatagtgaaaactctagttttcaccaccattataattgtcaccatgataaatatataaatgtatgatacgtaggctatttaggagttttctcatccgaattattatttatacttcttgaatttttcagtcattaaaaatggttcttgaactatttacaatgttataaattaattattctgtcaaattttgtcacacacgtcaaataaaataatgatatgactgtttagtcagttaccatatcagtgccatatcaatatcacatgtgtaactaatttgaaaaaaataatttaatttttttaatttagttttatgtagttttcttaattagatttttaatttaatgatttttaaaaatgcctaatttttatacttttcaatgttaaattatacacttggcgttgatatggtaattggttaaacatccatttaccacatgtacaaaaacttgacagaatgaccaatttacaatactacgaatagttcagggaccatttgtaacagactgaaaagttctgaggacacaataatatatatgtcataattcgagagagaaaaatcttaaatagccttctatatgtggattaggaataaagacagaaattttgaagaagtcaaatgttctaattttagagacaataaattttagagaaatattaaaaggcactaatattgccaagtattttcttatgtatcatatcgctattggtgctagtaaatatcggattctatataatttcatttattaataacttttagagaatatttctaatcgatcgcaagataccatttataaatagtgttggacactactgatacccaataccaatacaatgcttgaaatttaagttaatccactttacttacataacttaaacaacacactagagctttgtactttacaacaacaaaaagttcaaacacattgtccaagttttttgattattcctatgaaataccacttttcaacaaccaaaaaaaacaagccatatctttcaaaatgaaaaatctttcataaaatatctttctttactcaaattttcttaggcacttccgtccattgcttagctataaaagaacacttcacttcccattactctgttacaaaacccttctcaaattacataccaaaaagaagagaaaaaatgtctgctttgtcatttccaccattcaatgccataagatgttgttctaatagggacaatgatcaaaacccaagtgttcaaaagtttaataacatcaattttaatggaagttcaagctctcaaactgatcataaacttagcctaaaaattggtcctttaccaagctc

SEQ ID NO: 16541 - DNA, 4439 bp, Cannabis sativa
  modified_base (3359)..(3362): a, c, t, g, unknown or other
ttcaatcacaaacgaaacaacagcctcttctaccgccatatttctcttcttcttcttcttgtttcaagcttaccagttatcaaactaagtattctctctaatattatccactgcaatggtgttaaaatggtattaatttaaacatattttattttctcgatttccactgatgcacatgctgatttaaatatatctatgccttctttttcttattctttaagtttgaaagttgtcattaaatatatctactgcatttgcacttgtaataaacttgaatatttttatgcaaagttatcatctttcttttgatattttcaatggttattattataataaagtgggtggtcctaatttggtcttataggaaggagcactccatatggtatctttcttttaattaaactaattaaccataatatgtcgttttcttttgtctttctttaagttttgttattttaatctcaaactactagtggtcatcatttcacattgtgatcaaactatcatgaaaaaagttaaaaagacaaacttatcataagtgagatgtttagacatgtacattaatttatttgtaggtaaaattaagtagtacatgacatatataagctatagtgtcatcattaaaccatattgaagaaaatcataaaagaacatgagatgaattcatattcatattgtaagagccacatgtaatagtggcaaattatgttgcttaaattattgtcttttgatcagttagatgcatctgatttggtttttgggaacgttgtatagtttgtcaggtcagcttcgagtttcattgttttggttggtacagttcattgccaggtgcaatgagctggttttacagttggataagtcagttgttaatagagtattggtcataaatagcttgttaagctttttctaactaactcgtcatgtttgccagaatcactactttgattcttgctctgctacatttttctttctcctttgttttgttataggttttgtaaagaagagaaacttctggagagaagtgaatttcttgagttgcttgatctaaagggatttcggcagataaagagaaggggatcttggctcttgaagatctaaggggacttagattgatgttcttgaagcgggttcaagacttagagtaatttcatgtatgaatctctttggtttgattggagattgtacaaactggatatagtaatcactctgagtcatagtgaaagttattttaccctgattctaggaaacccaagcactatccagtcgaaatgtgttttcgatgcaggggaagcttgtaaatattgatctttttttatttacattcaactttatattgtgtgattgaatgtcattgtttcaattagtaacatctgattagattggtttttcacatatatacactttgtactagctacaacataacataagatgcaaacttactttaggaattgcaaaagagctcttatatttacattgtgatataaggcctcaaaacatacttcttgatgagtatggccaaacttttgataatgaatcagagtcattagggggacaaaagggtatgttgcttttaaagccacaacacacaacaacacaacacaatccaaatattattcaatagtacaaaacaaaaaagccagaccctgcagggaattaatacacacatttaacatttaacagactgattgtatcctccaaatgttgatttgatttgattctatagcccggagatgttgcctactctgaatctgcattcatatatagtaatgtcaatacacaaaatgcaagagtaaataagtaaaaaaaatatataaatatacagataacaaaggtataacagagttcaaatcaaaacttgaacaagatagatagatgtacctgtatcacagtcggtaaatacacgagatgtgatgtgcttgactttgaagaaatcttctcctccttcctccatcctttctttgaatttcttaggcatgaattgtatgaccatctcattgagtgtcttgatgttttttagtccatctgggactcttctcaatctcttgcaactacacatacacaaataggcaagtgtaggcaatgcactctcctccactttccactctttcaagttatataaccacataagctgaagagattcaagtcgagggaaacctccttttgagcacaccatctcttcccccataaagctataagaactaatgacaaggactcttaactttggcagcttttctaatgttggcattggatcatcctcaagtcttagatcaatcaactttagcttcatcagattttgggagaattggttggcttgtggtaatcttactacaggcgagtacactctaagcttatacatttgaggacagcatgatatcaatggaacaatatctatcttgatggcatcaggattataattccacacttgtaaagagagaagacgagtaaatgtgagagtttggggattgtgtaagaatgtgtcaaagtttccatccacatgaagtcgtaatttctttagattttccagctgtaaaagatcactcataaaaagattcttggtactaatacttaccaatgtttgtaaacttcttgacttagttgacctcaagaattgaccgaattctatgccaccagctctatttaaaaaatgtagatgcctcaactgttctaatttgcacattgaatttggtattgtaatataatcatcaatatgtattctcaaagtttgcaggcatcttaaattgccaaaagaagatggaatctttacaatctgccaacaaggaatacttaataaccttagatggatcagattcccaatttctttcggcagcttcatgtataacccatcccaaaactcgttttcaatgatcaaaactctaagcatcaaaaagtgattgcacacatatctcaacactccttgtttgaatgcaagtctctcaccatgtacagtaaggcacctcaaagagacatctatatttcgacccatacgaataaaatcataatcagaacttccattaacatagatggcagttcttctaacatttgtttctgttggttcttctcctttattcctccaatcaataaaatgcataaagttttcatcttgagctttagacacgcacaaatctcgcatgagatcatgaatgcaaaatgattttatccttcctgtcgaactcatttcttttacctgaatcatgcttctctccaccaactcgcttaaccaatcatacgctacatcctccaaggtttccatagaacctcctcttagcaatataaaaccttctgctatgagtatatgacataactcttttactcttattgtgacatcttcagcgtaacgagccaagtacaaaaaacaaggnnnnaagtgagatggtaactcactgtaactcaaacctaacacccacaaaatactactgtatcttgagtcaacatcatgttgttgatcaccttgaactatgcagcgagttacgtttcttttcatcagctcccagtcatatagggtgtgtttcctagatagaagcccggcaagcacaatgatggctaatggcagaccagagcactttttaagcatctctaatgctagttctttcttcctttcatcatcatttaaatctgaatttattcattcaaaatgaacaaacaaaaatttagttcaaatgatggagcttagaaaagtgtataaaggcttatatcatgttgagatgtcattatatgaaacggatagaacatagtaagataaatgaatattctcaatcaaagaaataaattaagagtgaagcatattacttgatggatctgttccaacacaggagtacttgttctgaaacagctcccaactctccttatcattgagtaaatgaggttcatggatgaaaccatgttgatctgcatggaaagatacagccttattccgagtagtgagtaagaccttgctatgtgtgtctccttgagtagtagggaatgcatgttttagaagatcccatgttgcagcggtccatatatcatcaaggaccaccaaacattttttctgtttctgaaagttgtaaagctccttggccagttcatcatcgcttgtcattttaatttcttctcttctttctttggtgggagaggcgaaagcaaataaaatcgtttccaagacatggcgtgcattacattgctgagaaattgaggcccaagcatgacaatcaaagtgttgcctcacatcaggatgctgatagacctttcttgcaagagtagtcttccccaaaccacccatcccacatatcgaaatcaccttatgcttatgagggttctctttttcagtcaaaaggactaccaactcttcaatgtctttatcgaatccaacaacatggttgtcttcaacataagaataagcttgcctcaactgtcttcgctcttggacatagcttgacgaagcttcatcagccttgtctatt

SEQ ID NO: 16542 - DNA, 3156 bp, Cannabis sativa
  modified_base (430)..(457): a, c, t, g, unknown or other
gtacattaaatgagtgtcagtgtacgtttctactttttaaccctaattactcctagatcaatctcagccgtcagatcaaataagtccctcgtctgacagctgccgtaccatacatcacggaattgattccgtgaaagtacaattacgtaacaaaatcatatccctacaaatataaatgtattattagcctattgtttttttaacaaattattagcctattttttatcatattggaaaccgtatatatccataatatataaatacaaaattaaccgtaactcagatttaagtggaaattttcttgtgtcaaccttattctatataatattttttaaaattaaattatctttataactattggacggtattttaaatattaattttgaaaacgaaaggatatcttttccacattctaataataataataatnnnnnnnnnnnnnnnnnnnnnnnnnnnnataataataataatatacatatatctctactcagcaaaaaaaaataaaaaagtaatatatatctctatggtgaaggctctaccaccaaactctgtcgttgaagaagtattcaacgcaagccatacatagcgtagttcattggtttggtcatatacaaaaccattgtcaacgcattccataccaatactataaaagaaacagatttaagccaagtcaggcttgaatggcgataggagttcatcaccatcccacagtagccgccgccgccgaagatggtggcctttggccggctttcgttgatactccagcttctgcaaagcataggccgagagcttctgagaaagagaacaatggaataagtagtttctacggatcagatgatctgactgatatgtgtgatttattgtacaaagaagacttgtttgaacatgtgagaagggcaacagatactgagtgtttcaagaatcgtaagaggtcgactgggtttctcatgtcttgctttgagttcttgaaactcttcttctctaaatcttgatatttatttttgtgtggttggatgaacatatatagtttctttcttttagttttagaatgtgaaagattagatttttcttgttcaagtaataataagtcataatggctatttctctgtatatattattacccttttttatatttcttacaatttggttctgttagtaatgttcaaaatatgtacaacttggttctttgtaaataatatctcaatctggaactggggatgaaccaaattctatccgaatcttgaaccatgcaactttttttctaaccctgaactaaacaattcgcctatccacacaatgcagtatactttctaaataaccaggaccagcagcctggttcatccaatataattaaactaagtagctcaatttgttgcaaagcagaaaacatttgctaaagaacaagtattttgtatttgtactgagaattgggggaatgaatcaatataaatgttattttaaaaaaaacgaacattaagaaaagaattacagaacttgactttaataatcaccattgttattaaacatagcagccttacaacttaaaaactatcaaaccaaactaaataggagctatcgaattcttttctctactccttgatcatagacaaaaattccttagcaaaggcccagcaagatcccgcagcatggtttgcatttacatatacatagtaaatattgccaacgagagttgtttggatctacaagattacacaatgaatgcattaatattctaagtcactttccacgtcgtatcaaatagactcctaaaacaatattgtccaaaaaattactggtatggtataactaaaattgagttacagaatacaaaagtccaatccagtaacccatatgagcattcttatctgacaagtattctggtcaagcagagatagttgaagttgttgtggcacattggcaccacaattgctagtactgaagttgaactgttgatcttagcccaaaaatgaatgaaaaagcaaaaatgagacagaagtacacctactcaactcccttatgaatgagtagcttccttctcagtttgggttctttctgagttgctttgcatttcaagtagcttctgttgttcttcctcgctctctagagtcccctgtgcttttacttcttgaacagcagccttaggcttgttgcttgtagattgttgatacataacaccccctaacatgcatatcaaaagccccaaagttccgacaaatgtcgaatgcttgtcccaaattacaaaattgatcacaactgttaaaagcttgttcactattccaagaactgtgaaaccagttgcagaaattgcccgtctacaagagaaaccaaagaaagaaattgacaagccaaataaacaagaaagccccaccggtaaaatcactccaaaagaataccaatctgtctcatctgagatttcatgctttatctttttcaattcacccataataagcaattccaaaggaaacaacagaagggcctcaaggttgttatacagtaccaacccccatgtatttagaccaatggtcataaccacatgttttatgtagacaaagtctatggacatgctaaccaaataagctaaagcccagctataagccatgaatgtgaactggtaatctgtcaatacataaagcacgcttccaccaaagatagtaccaagtgacatccaagtcttcactgcgggccaaggttggtgtaagaagagagtctctcctatggcaacaaatataggcacaactgaacggaagacgatgaaggtgtcaacattggcatgaaggagcaactcactattggtgaaaagggaaagatagaatataacagcagcaggtagaaagcgccacattgtgaggagctcaagtcggtcatgctcaatgaacttaagccatccacaaatgaagaccccaaaagcactagtgaaatactgcagagcagttaaggcaccagggtaagggaatttcatgatggcccatttgttgattatagagagcaaagacgcagataagcagtacccagcagctacaccatagacagaagcatgttggaggaaaacattataccaatttgcttgaatttcaccagatgctttgggatttatctgggcactacccgctttaggattctcctcatcattctcattaggcatatctaacccaaaac

SEQ ID NO: 16543 - DNA, 5482 bp, Cannabis sativa
aaaaaaaaaatgaaaaaggaaaatgtttaagagacaaatcaaagtagtaatccaagcatgaaattatgcaagatcaaagtagtaaaaaaaaatagtaaagtaccaagtatgtgcagatggcaagtgattggcgcttccataagctttgtgtatctgaaatttctgggagcctgatattccttgaagtgcactgaaaccttctaaaggaacctgtacaaaaaattgaaaagacaaatgttataatacattaacacgaaactcataacgatccttaattcgtggttctttagattataaattaatacctttgaggttccagtcacaaactgcaagagacgagccttatcctccttgctaaaaccttgcgcaacctcccaaaaccactgtataacaggagaggcagtactgtatccagaatactctgtatttgccctcatgtcatccactgagatagatcaatacaacaattatttgttaggattttctatgctctctatctaagagacaatgaactgttcataaaaaaggaacttacaatcgatgtctggaagcccactgatcaatagttctaattctttgtcatggaaaatagagatgagatcccgatgaattaattcattgaacccctccataaaagcatttatttgagggcgaatggctgttgtcagccgatgttcagcaactaaatcaacatattggtgcttattctcttccgtcactttgatgttccgtccaccaggaatcaattcgtagtccgttaccttcaataagtttgtaaagttagaaccaaaacagacattatgcaagatcaaaaacaaggaagagagagaacattacttctgtcctttcatacaaaatcagcttttcttcatcagcatcaatgctgaaagtaaggttcagatcatcactgatatcattctgcaaacaagagaaacaccagttatttattttatctataacaccggtgtgcaaatacaaatacacattctggcatccaccatacctcaagcatccatttcaggtttttaaagtaatcaggatcaatagcttcaatgtcatggtaagtgaccttgacccccaatatatgcttgtagaaagatcgtgtaaaatggacatctaagagctgcccatcgaaaagtgctttcccgacctgtaaaacagaagaagagaactgagtttgtagcccgtaaatagtcaaaaagcgctgaagaaaacaagatcaactaaacattgtgctcaccactcgtccaacaaacttgaaatatgaaagatgctctgtttggtagacagagttgggattgggctgaaatgttgattcgttgcctactgttgtgaacagtagtgctcccttgtcaaaaatgactctggaaagcagctggtaccactcccttgtaagtccacccgcatcaataccttcctctccttgaaagtgaactgtcaacctccctttcaaatcatcagttgatcgcatgcgcaattggttatacgaatcttcaagaatataagctcttctaactgaaattctcaaaggactgtggtgatggtcatgctgatgcttaattttcgatctgaagtgagaacgcttgttgtcaaagtcgataaaacgaggaaccttcagcagcagggagaaagatttctcaagcaaaccaggattctgccgaacaaaagcattaagcagtttcctgtgcttctctgaaaacttcacaaaagcaatgtgtttttcatcaactttcaaagtagaactcgaggccttctgctggttggcagatgtgcaggcatcatcaatctcggataccacagaaatattgaagtcatgaccaggaccttgcattgcaggatgtaacttttcacacaccacaaagaaagattctatgtacggcagaatgttatgagttccagcaggcagtgaagatgctatgccagatggtttagatgaagaagctttaaatgaagttgagacatcggggttagaatccgaatagctctctattttgcttatgcaagtgcttaactccacccacaaaggctccagcgctgcatttatgtcccagacctgagaaagggggggagcattcaaatgcacaacctgcaaatctttttctttctcctccttatctttctcggccagtgacgaaacaagggagctcaacgcctgcaagactcttaaaattgcagaaccatcagaagatgttgtattgaggagtgctttcacagcttcaccaaacaagtgcaactcatccatagcagatttagtcaatttctgaacagcttctgcaagctcagtaatgaacagattacaatgagtaggagcaattgccaccaacttttttatcacctcagctacaagagtgtatgcattatcggataacctggaacgtaaacacaaaatatcaaacaccaaatgtacatgacaaactggagtgagaagatacatattgccttatcacctagacataataagaaaaacaggaaaaatgttatggaacttacacaagtcataaaataaaaatgacaccagtataataaacataagaaatcatcatggataattagtaactgctccgaaaaaaatttaaaagcattatctatttcatacccttctctagcaagcaaggagcaaagaagccgaagttctgcttgtggcaggctaagtaggacagtttgagcgtcatattcatcatctgcaccagaagttgagggtctggaaaaatcaacaatcttagatgatgtaccaccaacattagaagttccaccagactcgggattcatcgcagtatctgaagtcaaaagttgtggaccagagggatgttcggaaaccgaagcatcagatttaacagatagactcttcttggtttcagctttatcgatgatgacatccaataagttgagtaactggagaaataaaattttaaaaaatcattaaagctaaaacaaaacaatttaatgtttttataacgtcaatagtatcatccctactttccaaattagtgggttttcacctgttccagatgtgatatacttctcagataaagaggctgattcaagaggctcaaaagcaatacagcacacaaatatccatcctggttttcagttttattctggcaattttcttcaacaaccatcacacctttgccagatttcttatcaacactgttcttagattcttgtaggacagggaaaggcaaccgaaactgaagcaaaatctttgccacatatggatgatttcgggctaaataagttagagtttcgagcacacggcgagacaccaagggaggcactcctataataaaaaattgacatataatcagtgccgtactgtatatactatatataagaatatatatcaacaaatattatcagagactttaagaaatgagggaaagatgagaaaacaagaagagctttagacttatttgtgtagtaacaaaatactcttccataatccatgagaaaattgaccccaaaagacaggtaacaggcaatagtaaaataacacatgcaagttctcaaaagaaacaatggaaagttccaataactaaataaatttataaaatgagtatcaaggtcaaataattacgttcactccctacacaaataaaattataatattaaacaatttactacatttggagaaaataggtctcaccatcaaagaattgagggcgtgaatacatgacattggtttggcaagcataaagtcgataaggtggctcaacatcagctactagattcataggctttcttgtctcaaagatgagcatatccataagaattttcacaagagaagttctagtttcactatgagcacatacattcaacagaagcctttgcagctgccctctatataatggctgcataaatttggatacattagttttctcaacatagagaaaaagaaagcatagagaagtgatgaatcattattcttacctgaacaatacgaagtaaccgtatcattgcatgtaaagcttctgtatcaactaaaggaactccatctgcttcaactaccttggttcctgtggtcctacgaggaccaatgcccccaattctttccaggctagaacctataccatcccctcgcctagaagtatcacctctacggtttctaggatatacaccaaacagagtacgattgtaacgatgggcaaatctttcgcgcaacatgtttgcctctgcaattagtgcaggtgtgagattggaaattatggcatcagacgaagttaaaagcacctgaacaataaaaacaaacaatcaattacttctcacaacagagcaaaactgtaaattaatatgtaaaacagaaaatataaaaaggaaaatgaacctcttcgcgtaaatcagaaggaaatgtagcaattatagagactgtgtccatttcaacaggttgaccctccagttcctgagattggtgtagcctttgagcttgttgttgtgcaagaacttcagctcgaatgtcagggggaagggctgcaaggaattctggatcaatatctccagcattttgtggttcaacagtagaaggaggagctgcctgagcctgctgagctgatagcacttctgctcgcagctcctcaggaagagcatccaagaatgcagggtcaattgcaccagaaccagcatcactgtttattggctgctctgtagttgaactatcctgctctgcttctcggctagaattttctgaaacttcagttacactatgcagggacacatctcttgcactaacagttgaagagtttccaaatgaaacatttgttcttcttgtgcgagctgaatgtggatcccccaatagtattctatctgaagcaacctgcctctctccaccatcatcatggccgtcagcacttccaatttcaacatcaaggcttcgaagactctctcctaaagttgctccactcccaccactttcttggctaatagcttctacatcccgtacagctgcatcattatgttcaaactgcatctcaacagattgtgattgtgtactaggcaaatctgctgcttgtagagattcacttacagcagctctcacagtagcatttctagaagtatcagtacttatagcaggcacatctcgactttcatcatccacattgttctcagcagagttttcaggtcttgcaatttcttctgaaatttgtaactgaacttcatctttgttttgaggccctaatgtgccctgacctgaagtcttgtcaagggtaggtcgccttaattgggaaacaagcaactcctcgaggccttggggtactacacctgcatttgatccaccaccttgctggtgatcatccatccacaagtttaggcggtgtccatggcgaccatttctcagcgatcgaaaaattgcatcaagttgggatgaggtgttgtccaaattcctatctggagtgaccacatcacgagcaagctctgaaatattgaattttcagcatcaaaaagcaattgaggtaaaacaaataatttctttagaggggggagtaac

SEQ ID NO: 16544 - DNA, 4467 bp, Cannabis sativa
gctaatggaggaaaaaaaatggagaaaaatatagatttttctgccattaatggcagaaaaaactgtattttttctcttttttattttttttatttttttatttttttttacattccctatagtttataaccgtgccttatactataggcgatggtttaaaatcgttgcttatagtatagggcacggttataaaccatcgcgtatactcaattataggcgacagttttaaccgtcagaaaatccacattagcgacggttttgaaccatcgcctattctgcccattttacgacggtcatataagcgacaattataaaaaccgacgagaatactttaaacgactgtttaaagacgtcaaaaaaaatgcatttttgtaatagtgaattgtttagtgtgtgtgtatattgatctcaaaattggtgttggaattgtgatcctaacagggaaggacaaattatcttaagtgtagttgcctcacctcaatttttttatcaaatatatatttatataaagtaaatactataaatcaaaatataataatataacagactaataatattaatacactatatcattatagatatattgtaatatttaattatatatatcatattatatatctaatctaggatgatatataagtagaaatgttgaattttgtgataatacatattaataatttttattattaaaataatatttagcaattaaaaaagaataattacataaaaaattattttttttaaaattttataaatttacatttttttaatatttatgcgaagttttataaaaataatacgaaaatgacaaaaaaaaaatacataaaagtaacatccaaataacatcaaaacaacaagaaataaataacaaaaaatcaacaaaaactaacaagtacaacattaaaaaaattaaaagactgtattttctgttataacatcataaaaatatttaaaactccgtacaactatatttttgtaattttttatgttatttttgtgtatttgtgaaataattctatgaaaaaatattcctaacttttaatttcttttttattgtattgaaaatcatttttgtataaattattttattaaaattgttaaaattgagttaatcgtaaaaagtattataatttagtaagggatccctttagtaattccttttcaaagtaataaaaaaaacattattttcgatataaaaaagccatttgtggtttaaaatcaaaataatgcaaaatcaaataattgaatatatttgctaaacttatatattattttgaaatattttatttttatgattttttttttttttttttgcatatatacattcttttaattgatagtacatatcatctaaaaaaaaattgatagtacatattaatttgtctaatctaaaataattttctagcttcatcattgctaatttgctaacatgtccaataaatattatcatctaattatactttgtccttaattttctttcaacatttgaatttttcgatcttgattttggttgatgttaattaaatgcatcaattgggtttttttctaagaaaaaggtgtattttggagtaaaattgtatgtttcatcataaggcatgataatcatattgatatcattattgcataaaaaatatttattattaggttgtcacagttgacaaatcatgtgatgtattcatgaacagaatcgaagaccaacatgttccatttgtagggatgaaagagagatatataataataatgaaaaaaacacagagcttcaccaatgatagcaagaacattattttattttattttttaaaaaaatgatagtaagatgattgacaaataaaccaaagtttgagaagaagaagccaaacaatattaataatgtactgtcgtgttaaagagttttgtaaagaagaagaagaaggtacgtactgattgaacctctaagaaaaacgtgaaacaataatgatgtaattaaattccaaagggggcaattctagacaactcagttatgattacatgacaatcctgttattgtttgttacaaattaattatcatgcaggctgggcctctttttgggttgttttatttatttatttattttatttttgaagggtttttaatttaactttttttgaatatatagctaccacaagttcattataatttatacatatgccaaactttttaagataaatatgtatgccaatatgccaaacttactttgtttttgcactcttactgtctatgagggccccttctaaaaattgcttattgtcaaaaaaaaaaaaattatacaattaagaattaatttagttagctatacacttctgtaaaaacttagaaaaggaagtagcaccatgtgggtttcaggaactaaagtaaaaggtcaaacaaaaatattaaatggattggtgaataatttcaaaagttggtaatggcccttttccacataacaaagatcagtcatatgaatgtttggctttttagagttgtgttcccattaactttttgttgatacataaatatatatttgataagaagagaaaagtaattcatacttaaataggggtattaagattaggggcaattaggttaaataataaaaattcttggaagctttcttcagaaagttcttaatgtcttttgtgcctgtcctcaccactagttaatatatgtttgttttttgttgataattctcttctatttcaaatacaaagtgcccaaaaagaacaaatgaaaagagagaactatgtgcgtgtttacatagccatacagtaaattgggtaaaggcattgatgagaagagacacatgtctggtaagtagtatatgatcaacttattggaaattttgttcaaagattatatgtattcaattatgtttccttttttggtattattgggaacaaagttaccctgctgtaaaataaagcaacacttacttagccacaattcttaatggcgccattgaattaaaatcgatgcaattatgtctttctataacctttttttttcttttcccaccaatatacactataaaggaaaagaaacaaagaatagtatttgtttattttaagagtttatgctgaacaaaataataataataataattcaaagttgaatcattttttttttgaccatttctggatttgtgcgtgtcatccttgcgcaagggtcatgctatcgttccaattttatcggatgtgctcgagggacaattcaaagttgaatcaaacatataattaaaatgcatttgtttcaacaaaatgcctagagactttagatttgtttcaacaaattgcaccttcttggatcttccacattgatttaattttttttaataaagaaaaccccactcactaaccccattttttttttataacttctcacaagcccagattgagtaaaaaaagcaaatgcatatgaataaatttttgttattgtttttgtcatatccctagtctttttctaattgtaacaagtgagcaagtgagtctctctctctctctctctctcatcaatacaatagagggctcaagtagcttaaacaagctggcatcctatgtacaaaaataaaataagaagagattgaacttcaatgaccatataaatcccaatttaatagtgtcagatgcacttttaaagcttttatctttggagtggttacatggtttggtgtgtggaagcggcaacattttaaaacttgtctttgtccttttatttctctatttatatattgtatagtgtacacatatgtggttaagtgatcttatataggaccacttctattgtaaaatgtcttacatttatggtatatattgaggtaactaatcaacaattatagtatcacaataagggatcaatacgtactttaatatgtaaaatctatgtaaaatcttcacattttcctttacacactgagataagaaatttgaacttaagacttcttattttgaaggggagaaatgcttacgatctttgataatgttcacattgaattcgatataacaaatttgttttctaaataattttaatactaggaaaagtaatgtattggcaatgttttttttttttttttttatatatacacataattaatgtacataatacaaaatgtgacactacataaggtatgaaatacataagcagtttggccttgcttcaaagaaatttgttacctctcaacactctaactttgccaaaatggcagagtatactagctcctaagcttctgaggtgctgggaataaatgcagatgggggaatatgatgttcctctaatggtggagacagtggagatggtgtatcatctctaaagatttggctgcctcctcccgctcttccaacgttgaggcaaaattttgggcatggttgcacaaagcatcctaagtaggttgcccattatcacccaacaccaattcctccaaatccacaaataatggcacttcacccctagtgatggttctcaaaaactcttat

SEQ ID NO: 16545 - DNA, 2780 bp, Cannabis sativa
aaatggaactaggcaactggataataatgtgtcttcacaaggaatgcaaatgtttcactctctggatagcttgcttcactttggtgagcggttcatcatacaagatagcagggttgtcaaactgagaggccaagcttggctctcctagaaaagctctgaatgagtctgccacggagtacgaaagagacttgaggttgtaacctccttccaagaagaacacacagcgaccaccacatagatctttcgcaagttgttgaatgttggatgcaagcatgtaatatgtccctgttgtaaattgtagactggctaatggatccagtacatgagcatcgtacctgaccaattaagttgcaagctagcgagtgaatcttgtgtttcacaagccactatggtaaaatgattaaaagtattcataaagaatatcatgtatattgaaaactcacccagcggagacaagaattatgtctggcttaaacctctgagcacaaggtacaatgacttcatcaaacacagtcctcatggcaatatcacctgagcctcctggtaaaggtagattgagagttgttcctaacccatctccttgacctatctcatcaaatttaccagtaccagggtagcttccattctgtattgaactcaagcaagaaataaatgttggtatataataccattaatgaatactagatgatgattttttgaccatataccatcttattaaattttcttatttttaatttactcaaaaaacatttcgtataaatacttcaagtacaaaattttaatcaaatctgcttgattaataatatacatccatttttttaaggcttttcttttttaccaaatcaacaactttaatgaaaacaacatcagtactaacctggtgagttgagagaaaaaagatatccggatcctcatagaaagcatcattagttccatttccatggtgaacatcaaaatcaattatgaagacacgctttaagccatgtacgcgttgagcataacgagcagctattgcaacattaccgaaaacacaaaaccccatcgggccttttgggactgcatgatgtccaggaggtcttatcaaagcaaaacctgtagtttgatcctggtttagctttgatgcttcaacctgaaacatgaaacagaattatgtttgtatatcatctatcaatctttaagctcaaacacagtctaagaaaaaaaaaagtgaaatacaaatacaaaatattatatacattcaaaacaaattgcacttaaataataaccactgaatcaactatggcaagtcctgctccagctgcagttagtgaatcctggaatgtctgcaccattttacatcatcatcagtataaaggaaggaaagttaagtcaggttgctcatgcataaaactacaaggatgctatatattcaagtaaaacttaagcatgtcaaattacatttcaaattcattaagaactctcaaaaatgtgtgaacaaatcattttctcaatcaaacaagtatgaaaaggagagagagaagaaacatcaaaataattgtgcttacatttgcagtagcatatgttggtccagatccctcaataaatataatgccttgttgtgaagccttatccatagcctgcaatgagtggcaaaaaccatttaagctaaaacagaatatatgtaagctgaaaaaagaatatattgtgcatgggtaagtaccttctccaggccagatacataagctgttgaatgaacatttgcaatgtcatctaccgaagcaggcttgaagtctttaagttgaataatttctgggccacggaactgaatatagaaagaagcaaaaactattttatgcttatgactgccaaatgttcaggccttaaatttgtgaaattactgctataaaatctatctatcacagctaggaattactggctgatctagtccactcaaaagctgttacatttaaacactttggaatcaatataaccaatcaccatagattcaccaaccactactacccatgatccttcttatactcttcttatttatttcaattcaatagctcttgatcctcatagattttcagtagttgtcttaaatacacaaatttgagagaaatacaaacatattgagcatacaaattaaagagagcctaaattagacatacctctggagtgagctccatgttttgaagagcagtaacaattgaaggaactcgaaaatgggattcgggatgagattcctgttaacagtactaatgaagattagagttagataggtagatgaatctgcagaggctcaaataaaattgaatcagcattgaatattatgagtaccttattatgacccatggcaggagctacagcataaatgagacgagcatttttcaattcttcatttgaacaaacgatgctcttctcatcagtacgacccaaacaggatacgattaaacggtttcgtttcttgaagaaagagtttgtagttgtaccaacaacaccatgaccattcaacccaagcattgcattccctaaacacaagaatagcagagcgtgtttaatttgagcccatgaataatgtaattattgtaaaataaaaacacacgaatgtatgtatgttgttgtgaattaaattcaaagaaatataatttagaggcaataataagacatgattaccgggaagaagagaaggtgaagtgaagaggtccatctgagcaatgagatgatgataggactgtcaatgcctcaaattgaaaccagaaatactatatatcctaaacatcttccacttattattatta

SEQ ID NO: 16546 - DNA, 5841 bp, Cannabis sativa
taatttataatttgttgaggggccaaattataaatactcaaaactcattatataatgagcctatttagtagttcccaagaaacactaagaatctgaattctctcgtttcccataagagaaattgcctaagaaatggtgtattctttgaaaatcaaaacttaggaaaaaagacctatgtattttggtttattagttttatcgatattaggatgtgggtcccaactgcgttggtttggccttgggttgggggagtagagtactcttgtcttctagaatgtattgtatgagtatctacaacaactacctcatttttggttagatattacacttgttcgatttgacagaaaagaaaatgcagagtttgcaagccaaggcatcccagtggagtggagttgactccgccgatgctttcgccattgacaccactaatctcttcaacaaattaggcctccagacattcataaatctctccaccaatttctacaataggtaacacctatttcttttttcttttgtctccatcgcaacttatctctctctcttttctcttttcatggaagttcggtaacttattgaaaaccagggtatatgatgatgacgaagagtggtttcgtataatctttgctaattcgaagaaagaggaggccattcaaaaccaatatgaattttttgttcagagaatgggagggccgcctctctactctcagagaagaggtgagaaaaatcttaccttagcttaacccatttctggcttctgcttgaatattgctattgatcatgaattttcaaattctcctctgtcttagattatgttgtgtatgtttggaactgttaagaagttatatcttgtggtgggggtactgatttcaggtgactaggaaagttgtgatttttataggttgttcttctaaatcagtgattttatggtaccactggctgtgatttatacaaactatatcttgtaattttctttagtttcaagaatgttataatcacgaagttaaaagaccagaaatgcttactatttagtcgtcacacgaatttctatctttttgtattgtcttttcaaaatctatatccatgataatcctattttgcaagagctaaactacaacactgtacatttctagtttctacccgaactgcagctttaaattttatccctggaagcatttccctttgtctaaaagtgcccacaaaatatgaatttgtgactaatctcttaaattctgaactgttctggatttatatcacagtcaaaatgctcacctttcttaatttatttttaattttatttcatgcgttgttgtttcttctatttggttcagaaaacaccctcaaccttggaaattatcctcaccatgctttaacttatcctttgcactgatgtattttttctttctttcttttatgatgattaaactactatccaaatgttagtggtttatttggacaatttttcttcctctccttcttcctttttcctttttttgttgaggtgggggcgaagatcttaacaactattgaatcctacaacttggcaaagactagtaagaatgcttttatgtgtggggttggggttgaaggattaaaacaaagtatctagcttgctatttccatctctagatttattcagatttaagggcctggtgatctccttttcaattagctttcctgaatgcatagatcatagacatcatgccaaagttttaaaaattagtaaaagcaggcatgtgtactttcctatcatgcccttgcatgccatagtttttgatcattccattagcttcatgctagagtactttttgatcattccatcaacttctcttatttgattttttaatataaaagttaaatgcaaaataatctcttggtatggctgtgatattttatttcttcatttaagcagtcttgaaaagttttcacattcccctttgatatttgacagggcatcctgctctaattgctcgtcaccgaccatttccagtaactcatcaagctgcagagaggtggttgcatcacatgcaactagcattggacgctacctcagatatcgatgcagattcaaaagttaaaatgatgaattttttcaggtacaaaaatattcccagaaccagaatcacctcttcccattcatagcagtgtccgcaattaagaactaaccataactttgttaaatttcaccataaaagatgatgtcttcttgttttgccatctcatgtaggcacacagcgttcttccttgtagctggagatgagttgaagaagaatcaaatccagccaaccccgtgcaagtccgggagcagcaatcaccaaacatgtaacatctcttaacagaagctcttacttaattgcaagtaaccacacttttttttattattatttaagaaatacctcattaactatagacattcatgtaaaactaagaaatcttaaaggaagttataactcaacagtcacatagcaatgactcccggcctaaagttattgaggcatcctggttggttgagtttaagtctttcacagaagctaaacgtgtgtttaaagtttcagctaaccttatacactttgtttgtgctttgaaattcgataactgaagagatttctttcattcactatgcataaatggttgtaatttgaagctaaaacttcaaatgaaagttgattcggttgtgttatactgcttccttcgaatatttggcttctcaactttctctaatgttttttcctggtagctgaactttcttgtcaagttatagcttcttataattcaacttagaatcttaaaaagtgaaaactttcatagccttcaaactttcaaagttcaaacagtggttcacacttccccattctcactacaacaattttattatatttatttacaaattacaaacacataggggtgcattcatacttgagatcaaaaagggttacaagtaatatcaggggcagccaccctttttataagcatgaactgtttttgtgattatattaatgtgtataatattatgatattgtatgtactatgcaggatgaaatatcttcaatattctctagacttgagaccaggggaggaaagtggctacgaactctagggaaactgtttaagattgtccataatgcatgaacacctaactcctgttgtcattgctacatcatgaaaaggacactgcatttcatgtgatcatttgatcatgttcattataagtttataacaagacttttctatacagggaccggcccagatatttcattggagatggaattatttataattttaagtttacattttcttttatttatactacttgtggcttttctaggaaaaattcatctttgggttgtggatggtcaatggtttgcttgtaaaacacaagtctcataaataaatttgttcaaaacaataaaaagtatagtaaatctcgctaaatgaacgttggtacatttcttatctttttcggcatttcgaaaaaaaaatttagtccaattatttttattaattttttttaatgatcgtgtatgttgtatttatttaaaattacttgttaactttgagaaaattttgaataatttacggtattaaaaataaggtttaaatattttattgtacattttacacaccgcaagttggagaggatgggactgtaattctctccaaatttttgtttttatatattaattatctaagaaaaaaatatgattattactaatttgtccctttactaatttgtccctttaaatttttatttttattttcacaatttttccggtgtataagtttacaaaaatatggttgtttttcaaaaaaaaaaaaaaaaaaaaaaccaattatgaaaaaaaattaaaaaaaaaagttcaaattttggataccaaatatcccttaggataaccactatttccatttttttaattattatttattttttaatttttccataaaataattttttatcaaagaaaattatattttcgtacacattaaataaaaactcataaaatatataattttcacttattctttttttgggagagcaaatttccacttaaaatattataaatatataaatatctcataaatgtgttattatgcgtgtcacaagccaagtcaagcgaagccagaggaaggaggccaaaaattatgtttggtagaaagcaaagagagtaggatggatgaaagattgatgaatgattgataatataaagaagggggaggagattgttcaaaaaaaaaaaaggggaggagagtttaatttttttgttgtttagtaggaaggatggagtgatagaaggatagataattattcatttactttctagcaaaaaaatatataaattactatttgttatgtctaaaattcggctacactttaaaaagtgacacgtgtcttggagtggaatatgaaccacttgatataataaagttacatcattaaatgcaagataagataactcgttaataaaggtttaatagaaaatatttataactcgctgactatatagtcttaagcgagataaggataaaagactattgaaacttatattgacgggatacgcacctacctcggaatacatagtcaaagaagatattcatttattcaaagtagaataaatacaatcacacatggtaacctcgggttacgtatagcgagatagtcacctcgtgattcaaaaaagactttacgaggcaaaccatctgctaacacttagtgttttttccacatcaagatggacaaagagaataactcgggttaagcgagatacaattgtccaaatcagcattaaccatcgaaaatgataagaacaaaaagcagttaagccgttatcaaatattatcctacatgtaattaaatgaaacgtgggaattgtccacgtttcgtgaacaattatagtttaaactgatcccaagtaaataactgtcaacctatattcctataaataggggcagattccacaaaaaaagggacagagaatttgagagaaagagattatcaattaaatattgtatcttgtattcaaaaaatatcataataatatagactcgtgaagtatgcagatttaactgtaaaaatatctggagttctttaatcatttattatttcttatttctgaaagtatttattactaaaaggcttattaattttagttaacaaaaatctgcgttaacagtttggtgctttcattgagagtcttagtgataaaactcagaaaaatccctccttataaatagaaatctatccatggctgatgacaatcaaaacgatggaaatcgccctgaggaaattacacattgccctgggaaagagccaatgggttctcaaagaccccatactactagaacatcatgtttaagaagaaattatggtggtgataatctaaacccagaaggaagaaacgaaaaaaccaataatgctggaggatatgtacctagaagtggggatgcatatgatccaactaggtatgtaccattagtggaattagaaaatagacaactccggcaacgcttagccgaatctaatcgacgaaatgctgagttggaaagagaggctgcagcggctagggcaaatcaaggaacttatactcagaatcaacctgatcctggagtaagaagaccacgaggcagaccccgaggttcaagaaccatgaggagaccgagcaatttcataaatccacacgtctcgtagtaagataggactacgaatccagtcgctcacctgaataactttaatactataatgcgagccaacaacgtctcgaatacaagatacaaatacaagatacaatgatacacatgtctagcacctttgcgacatgtcgcgttgcgattagctagcgatactcccta

SEQ ID NO: 16547 - DNA, 13448 bp, Cannabis sativa
  modified_base (64)..(73): a, c, t, g, unknown or other
  modified_base (8814)..(8814): a, c, t, g, unknown or other
  modified_base (8843)..(8848): a, c, t, g, unknown or other
  modified_base (13197)..(13202): a, c, t, g, unknown or other
aatagggaaaccatatcaatatatgccagccgaaatatgcaataaataataaaatatttttgtnnnnnnnnnntgccaaaaatggaattaacatctttgacggtagtaataagtatggttgtggccttgttgctagagatcattatggtatgctaattgaaggaaagatggtgttttcttctggttcggttacaccagaggtggctgaatccattggcattcgagaggcgttaagttggattaagagtcataattggcaacatgttacagtcgaaacgaactgtttaacggtggttcaagcgataagaagtgaggtgaatatgatatcgttgtttggtcaagttattcatgaatgtaaaaaactgttgttagaattgaaaattatttctgtgttatttgttaaacgatcaacaaatatagtagctcataaatgtgttagagcttctatattcttccctggttgtattttcgatatggagtctgttccattcgacttgctaccttctttggtagcggattttaatggttaataaagatgtattttctattaaaaaaaacagagaactaaaatttattcaaactatactatcctaattataatcgaattgatttgaaaaaataaaaaagttaattaccaaataaatattatatttagtgtgatttatataaaaataaattgtatgtttgtttctataaataatttgtggtgtttatataacacttaataactactaaatctttattttgataattccataaatattatgtttaatgtgatttattaaaaaaaattatgtgtatttatttcacattcttcatatgtgagtaatttttcgtgtttatattatatttattaactattaagtcttaatctatcgattgtgataattgaataagtactgctaaatagctatatttagtgtgatttattaagaaaaaataatagacatataaattgagctcatcataaaaaaagtaatgagttcaaaaaagaaaaagaaaaattgagctcaccatctaccatattgagttcatagatattgagttcatagttttgtttttcatagttttgtttttttttttttttttttttgtcttcattacacattacaagaaaacaaatatgagtaacaaaagatatttatgcatttaaatgaaagcgtatacaaaacaaactactactaataataattaccaaaataataataatttccggataagaagccttctccaaaactaagccccttttattttcttaaaaaataatatattcaatataaacaataatggatctggctttgttccaaattttgtcgttacatgccaataataataataataataataataagtattaagaaaaaaaaaacacgagtcagtaatcacatgttccaatcgttctacaaaatctctcaccctcccatccgattccgatcctcactcgccaagaccaactttctctctcctctgtctatatatacatatatatatgtgcatatatgtgtatgtatacaaggctggtggttgttctgattgcagttgactaattcagaggtgagttttttttctcggtagaatgagtttcagagatgatggtagtgaagatggaagggacctcaggaagcctttcatccacaccgggagctggtacagaatgggctcaaggcagtcatccagcattattggctcctcagctcaggttctccgtgatggttccgtctccgttttactctgtgttctcatcgtagctttgggtccaatccaattcggattcacggtcggttttcctattttaactccacttttgatttctatattcaaatttttgctgtagaatgaattgaattttgtttgtttgtttcagtgtgggtattcttctccaactcaatctgcaataatcaaagatcttaatcttactatttcagaggtctgaatttgattcatattcttcaagtattgatattgttatgttttgctgatgatttgagttttaatggctgctttcagttttctttgttcggttctttatcgaatgttggtgccatggttggggctatagctagtggtcagattgcagagtacactgggcgtaaaggggtatgctctatctttcttctctcttttcattttgactgaaataaaattgtgtagattttggcttagtttaacttattaggaaatgtagagaaccaaaattggaaaatgaatttatgtagtagctattcactaaattatgtttcttcatttctttaatatttttccgaacttttattattcaacatttgatgatatgaatgttaatgctcactttaaacatcaacaaaataagaatataaattaaagtgcataagtatcaaacttgaaattggctatttttctcatatcagcaatcattttagtatttagtactagtagtttactttttattatttgttttctttcattttatttctgcattatgtaataccagttgcaaataccgattcacagtttctgagagctactttgtgttgttgatcacagtcgcttatgattgctgcaattcctaacatcattggatggcttgcgatatcatttgccaaagtaataataattcataatttgtccacatttcattttatatttcttgcaagctttttgtggtgtatagcctaattcttttgttcattgtaggattcagcatttttgttcatgggaagattgttggaaggttttggtgttggtataatctcttatacggtactttccaatacccatgattctttcagtcaaaattgtcggggtatacttagaacgtggctgatactaatttgtgatggttacatataggtacctgtatatatagccgagattgcaccacaaaacatgagaggaaccttgggggctattaaccaggttggtttttgcttgatttttgtaacattattctttcttacttttctccatatctctgaatttgtatcattcatacagctctcagtgaccattggcattatgctggcttatttgttgggactgtttgtggactggagagcgcttgccgtgttaggtgaacccatatatctaaactcatttacttgcgaaactttgcagaggttttggaattttcactgcccaattttggaaccaagaatctatgtgcctcgagttttatatggattttaaactaatttgaacataaattattcattgcaggaattttgccgtgttcaatactgacatttggattattttttatcccagaatctccacggtggcttgtaagcgtcttatttggctaatttaaagaatgactgttgatacacttaaattttactgacaactttttgtttggacttggggttgttttaaggctaaaatggggatgacagaagatttcgaatcctccttgcaagttttgcggggttttgacacagacatcactgcagaagtgaatgatatcaaggtatcaaattgaaatacctctttaagataattttatgttctaaacaatttggatagtcaagttcaagatgataacaaataatagtaaaaaaataaatctttcttcctacttcacactagattgtcattgtttttcacaactacttctgacagagaacagtagggtcatcaccaagcaggcgaacgacaatccgatttgcagatcttaagagaagaagatattggtttcccttgatggtaatctccatcttgctctctcttactctatattccatgtcaagtttcatagtttactttgctcatttatatgctcttgatatttgtgctacaggtagggattggattacttgtgcttcaacaactcagtggtatcaatggcatcttattctattctagcaacatctttcaaaatgctggttaggcttacttcttgagtgtttgagcttttatttaattcagacacacagtggaatatatttcacaatttttcactgaaaaatctgtttatgtaactgatgcgtgagtgtgcacgtgtgtaattatgtggtgattttctctgtgggtgaaaattttgatcttttcttatagaatttttgttctaataactctgcaattgatacaacaggaatttcttcaagtaatgttgccacatttggacttggggtcattcaagtacagccattcataccatttctctaattttcatcaagtcagtatctgaatgttgggaaataagttctaatggtgtcattaaaaatgctcaacatttcaggttttggccactggagtgacaacttggttgttggataaagctggtcgaaggctgctcctcattgtactggcatatttcattcaataattgtttgtcttttaaatttatagataaaacagaaatttttaaaaaaatctatcattttgtagatatcatcagttggaatgaccactagtctcctcattgttgcagttgctttttacatagaggttagtattaatggttttatattgtgtattttacaaattaaaatttgaaaaaaaaattacaaaaatacgttaacacgaaaaaaaatttaattttacactttgaacatttttatttacaaaattgtctttttggtaaaacaataaattgttttttagttgttttatagtttatttatagttatagtgagattaatttctatttgtttttagttatttttttatcttttgataagaaaagtgtgttttttgtaattttacaactttacaagcgtatttttgtaaataaaaattttagaccgtaaaattataaataaaatataaaaaaaataatatttttgaaaattcctgttgttttaattccaaggattctttttgatgtcttccgttctttgtactagggtattgtatcagaagatactcaactctataaagtgatgggagtactttctcttgttgggcttgtggtcagtttttttttctacatcctttcaattaatttatttttgagttaattgtcacacctttatagactgactgatttgtatggtaaattgtattcataggctgtggtcatattcttctctttaggattgggacctattccttgggttattatgtctgaggtatgcaagttttattttgtcaaatattttaatgcttcttttataatgttcaatgctttgttatgataaaattgaaaatgtttatttgagatattttgttaggaagatgactccgaatactttcttaacctttaaaactgtattatcagattcttccagtgaatattaagggtcttgctggcagtatagcaacaatggcaaattggctcacatcttgggttatcacaatgacagcaaacctactcttgaattggagtagcggaggtcctctcttcctctttatttttatcttttttgtttttcctttttgtacattttatatatttatatatagtaggaaaattctaccactattttggtatttgagagaattttttagtctattttttttatagtcctatatgttgtagttatttaagacatccagtaaaattttaagaaattcgaaaaaaaattaacatgactgttgcacatgactcttttattttatacgtgtgtgaaatagactatttaaaaactgttttatacattataaattttttcgaatttttcaaaattttgtaggatgtcttaaataactaaaatgtatactggctataaaaaaaaacaagtgtcccttcggggacatccaataaaaaaaacaagtagactaaaagattctcttgaatgctgaaacagattgatgacacatcgatacattctttttacgggtgcattgtggaagtaccttatataaaatatgttacattaacttatgtggtgattttgttaaaatatgaacagggacctttacaatctacaccttagtgtctgcttttactgttgtttttgcgtcgctttgggtcccagaaaccaagggaagaacactagaagaaatccagcagtctttcagataattgtactttttcttaagtcctttcttttttgtatggtggcttgatcggttctgaagtgtttttgttagtgtcattcttataaatatatgtgtgtttcatgtagaggtgattgatttttgttacgaaatgtgtcattagagaacaagtaaaggaaatattcattcaaatttttaataaatgtgcaatattcttcaatccttaccctctattcaaatgtttttgttctttctttaaccaacactcaactttcaaatttttgtttatgttttagagcggatactcattcccaactcaatccacaatcctaaaagatcttaatcttactgttggagaggtgtgagtttaattatttgttcttgaagttttactcttatgtattagtatcattatcttttgctgaattcgagttgtaatgcatgcgttcaattttctcttttcgattctttatggaatgttggtgccatggttgtggctattgccagtagtccgattgcagaatacattgggcctaaaagcctaaaagggtatgctctgtttctcggtttttatactcttttcataatgactgaaaactcttttctgtagattttagcttagtttaatttatcaagaaatgttatagataaccaaaattgaaaaatgaatctctacctatacttattttacccttcaatctgggagtgatgttcgaaaaaaaaaaaaacaaaaatctgggagtgggagtgagattatgtattactaacttataattttttttttataaggaaatgactttcattaatcaaacaagcaatgcaaactgaatggtacaaaaccgaaccaagaacagattctaaaaaggcagctccaccagtccaaaaaaaaaagatattacataaataatttcctcaagtaatctctctcactcttagtatacttcctgttttttataacttgtaatctataagttgctgtaaattttatatctttaattataagagaaactgatatagaataatcttaaaaaatacagtggtttctgttgagctaaatacggtagcaaacaacaactaaaactgctatgttaacacgctaaaccaacttcaaatcagttgttgacagccaagttttccatccttcaaagtccataggccaaattctaaaacccaaccaaacaaataataactccaccactctccgagaaaaatcacaagagaagaaaagatgttcatgagattctaatttgtctccacacattgggcaactgagagactctaaataaatgtgaaaattatctatcttatcattggttagcagctggttgttagtatttatagataagaaatgtggatcccgaagtctgtggctataaatgttaagttattaagttagttatgatttaacaaacttatcaaactcctcgtaacaatatctccacattcaacagaaaaaaaacgtacttctaaatgagacgtacacttcttagaagacaaatcgaagtgtaagctgaagagacttcccagataggataagcgacaactggagtcgactattcgaaactcccttccaggaaggaacaactagccatccgaaacttctttccaaaggaagactagctttcttgaagactccttcaggaatggacaagataaattttcgggaacgccctttcggactacatctatcattccacgagacttcttctggatgtacaaattagacttccaagaacgctattttggatgtcatctaactttccataaccagaataacttttaaagatctttacatttagaggactataccacaagtaattttttttaagaaaaaataattaaaaataatatttgaagtttttgttagagtaaaagaatgtaaaattagaatgagaaatttatatacaagataactttgttgaagtcactcctaataaacatggattactttgtccacgatattatatttgctataaaatttatatcaccataaatttataatttcattattcacttttaggtcctttttattattttattagtctatatgcttttttattattattttatatattaaaattaataataaagttatgtatattttttaagaaaatattaaattttgtattacaattatatattgaaacatatataatactaaaattgatgcaaatatattaatatttttcttcgccaaatataaaataatgtttacgtctttccattacttgttgtgtttgcaaacacattttttccataatgtgttagctaattctcattttttagatgacataaaattaaaaaaaaaaattaaaaaaatctctgaattttttctcttttttccaaatatatttataattttgcactataataaatattgatctatttacattctacattgtacagtctatacaccaccaattcccaccctgctacaaatctagctactctgaaataattggtgtagtactcttgagtatgtgccatgttaaaaaaagaagcaaaaaaaaccacaaaaggatcatcagttttagtttacttttttttattggtatttatgtgatatgcaaaagttgtaaagataatattcattcatatatctcttatatttaatgaggttatttaataaaaattattagtttaatattttttttattaaagttaacggttaaaaataataccgttaaatcaattaattaattatttttttaaaaaataattttaaatagttaaatttaatttaaaattgaacaaaattaaatattttttttaagtaaatcttaatttaaatttgaattagacattaactcaattaattaatcatactttataataaaactattagttatatcatttaaaatatctaaaactatttatttattttattgtttaatnaaattagttagatatattttttttataannnnnnttaaaattaaattaaattttatatatttaaaaaaaatataattaaattacattaaatttaattttattattatttaaattaataaataagtaatgcaactgtaatgaatgttacaaatacttagtattaataaaatcttcttcatattgaaaagttatttaaatccgacatttaattaaagtagaaaatgattacatacatgtccatgtaataaatagatatttatgatggatgatcagatcaggtctccttatccttattgtagacagaaataagaaattttttgatacatttattgtacacacatggtctttccaagtgaaccaagtgccctgatttctttattccttcaaatgttgacctttctccaagttgcctgtataaatatatacacaaccaattaatatcacacttcaaaacatacccaaaatataacactatattagcacttaattggaacagaaatgctacagatagtatttattgtgtttatatatactatacactaattatatatatatatgtgtgtgttgtttgacatactgtttcatgttttgggcaagttcttgcttgaaaatctcatcattttctccccacaaaagatgaattctctgcacatacagccatagaaggcaatcacaattaatgggcaaaattttgggagagaaattttgactaatagaacatatgtattcatatataggtacctgtggaaaattgggaatggtagggtctttgctgttgacttctagagcttcaagaagttcacatctctcctttctattggtgaacataacctatatatatacacaaatcgttgtagaaaaaaatgatgaaaacagaaaaattactccaatatatatttttggaatgaaattgaaaaaaaaaaggttaaataagttgtgtaaatagcaatagtgcattttgacttattaattgttatagtgtattttttttggcacacttttctaaaagtagcaattgttgccactcatttatgtaaaatatatgctagtttaagtgaagttagttgaatatggtgtcattataaatgccacatttcatcaactcatcactctctcctattcttttcttatttattaatttcttaatattatcattattttatttgttaaaaatctataaaaaagaataaaaaaataaacagtaattattcctttaatttaaattttcaaagttcttttttattttttttaaaaatatatatcatacaatttttgtttatgatatacttgttttgtaatatttttttatttttttttaattgaaaaagtaaatatattattgttttcactttttaacttaaaaataagaattaaaattttaaaaacaaaaaaaagtatcttttaaacaaaaaatttaaacatttttttttcaattataatatattatattttcttttattaatattttaaatttagaccgtacctgaccttagactccggtcccaaggtccaaacttgaacctggactaggtatcgaacttgagacccagtctctcggaccttggattggactcaaactaggactccgaactagcctcagcctcggaccttgacctcagatccggaccctagccccagccccggaccccaatcatagcctcaaactcgaacccatatcaggtcctatcgacctggtcctagattcgagcctcgaccccaaaaatactggaccagaccctatcccagctcccgtcccaggccccaaactcaaaccatgtccctaatcttggacccaaacgcgaaccccgaccctagaccaggaccccatactttagactcgacttaaattaataacaaaaaataaaatttagaatttacacaacatttttgttttttattttttaaattttatatacaaaaataattatagaacgcatttttattttttaagaataaaatttttatttcttaaaaggaaatatatatagttttgatttgaagtgtgtatgtatgcgttgtagtaaagtatatacaataagttataagcaattaattaccaattacgaaacataaatacttctctctctctcatcattgcaaaatgttccgactatataattaattaatattgtatctataatattatcactacagtatatatatgtctttattaaaaaaaaaaaacagtatatatatgtcactatcacaatatttttctctatatcatagattatttgttttacttatttttgtagcctttttatcactacagtatgtaatagttagtatgtctatttatccataatggtttctcatagtctttttgaatatggacactaattaatttgatcattacacaacccttttaaaatatgattcaaaaacctaatacttttcatagctattttcttaaattaaatatcgatctctacaaaaattcatgcacgtttaaatagcactaattaacaaaaaatatatatacgatactttaaattgtatttaattatttatcacattttataaaattttaatacctatagttctacataatttattttatccaaagctaagtatcaaacaaattgttttatactttatatatatacttgttaatttgaacaatttattttgtgtaaaaaattattcagatttttttttaagaaaaaaatgaaactaacaaaaggaaacataccataaatgttttccaataatggaatcactatgaaaatatttctgacagagcatattgggtgattttacactataatataaatttttttccaacacatttatatttaagacatattttgtaaataaatttataatattaaaaataataaatttgaactgcttatctcacattgaattgaacatatttttgacttgttaaaattttataaaatgtctttcaaaaaaggatgagtaataatagtaaatttaattagtagtaactaacctcaagataatccttatgaagacgatcaggaaaccaaagctttttataagcagcaacagacaaaagagatttaagacccttaacagaagtgggcaacaaaagctcagacgacgatgtaaacccaagcctttccattgtcgtttggctcactgaacaagtcatagccaatatagacccagaaataaccatagcctcaaccaactcaggataaagctcagccaatttaaaacacaccatccctccataactaaacccaaccagaacacatttatccaccccaagcttccttaaccccgttgccaaacactccgcctggaaattcggagaccggtcactcttatcggacacggacccaccaaagaagagaagatcgggtacgtacacagagtacttcttagtcaaagcaccaacctgaaactgccacgtcacgattccctcggccgcgaaaccgtgtactaaaaccactacgggcttcttcggtttgctattgggcttgggcttttctccttttttgggcttgggcttgggaaatgtctcggttgggacccagaagttcattactgttccgggctctatctccaccgcgtgtggggccactccggctagcttcatgagcccatggagtaatggtttttgtgcagctactaagttcaccattgttataatagctcttcttcttctctctctacaactttctctctcttagtaagtttatgaagagtgaaatttgaagggttttaaagtgtgggaatgatcggttggttgttgtaagttgatattataataaattgtaatggtggtcacatcacaatccatatctggtattactattattattattattattattattatattgaaaaagaaaaaattagttacaatagttgttaagctaaataagctgtgttgaatttattagtagagaagatatataatataattgatgagttgatagtgatcatatgggaaaagagaaatttagaattggatttacatttaatttagacaaattaattaagaattctggttgaagatggtcaccgatttcttgtaagacttttcctccctctctcacgctgaatttcaattattttagggagagaataattaagagtaacttttttttgttttgaagaaaaaaaaatgttgaggaatcacaaaggattaaaataagtctaattagtagtttatttctagtttttttttcaaaggaaaatattagaaaaaaaatggtttttttatttttacactttaattaattttttattttatatttttacaaaaattcacgtagtaacttacatagcaactaatagagtaagttaaatcgcaattaaaatttacataacaatttaaattacagccaaaatacacgcaacccatataaaaattacggagtgattcaaactgtaaatttaaaaaaaaannnnnnttaaaaaaataatatataaaataaattttaaaaaaaataaagtaataaaatttatataaaagacattttttgaaatgttttcatcttgaatatttgtataggatttggtaaggaatactaaaataatttatactgattattaaatatctttatatattaaaagtgcttatttaacagtattttttggtttaaccgaatatactttaaaaataaaaaaatattctgttaaatttaacgatgttagta

SEQ ID NO: 16548 - DNA, 5661 bp, Cannabis sativa
aacctccttcaagaaagaattatttcagttttagatcctaatagcatgtttactttctctcaactggatttgcaccgcatcataggtgtagccgtgtaggaccccttctttaaaatttaactcatatgatttttttttgctaacataactcgtatgatttttaattctatattttatatatttatatttaatttttcctatcacaacttccattttcaaatgtacagtgatgaccactatttgtgcattcatgtaagcaaaagaatatagcttacctgataggagctaattcttcagggagttgggaaatatcaaagtttatcccttttgctgattgtgccgcaaattccatcagcaaagcagcgaataataagagaactgcaacagattaatttacggttgaaaaccaatgtcaaagggaagggtgagtaagaatataggtttatattgtcaaagactgagctaacaaacatacagggccccaaccaagccattcctgtggcaaacaatgacccaaaaagctggccaagtgtggctccagcaccaataaacccaaacaatcttgaacctgactgaatacagaacatgttaagtgtacaccagaagtctgtaaatcaaattaataatggtatgatagcacacaaacctcactgtccatgacatcaatcactctagcccaagttgaagaaattgtgattagattgagtaaagcaaccttcaattaagggtaaagaaacaacttaggataactctaatcctgatagtaaccaagcacataatatatatatatataactaaattcaatatctacatacccaaagaaacaatccaattctgacagagacataaaacaatccatgatctccccacccaactgaatatgatggattatcatcattggattcaaccgtttgatcttttgctgaactagcaggggtaccgacagcactctagatggatgcgagaaaacaagagattcagcagaaaataatatacaaaataagctaaatttagaaactattcctacctttgacgttgatgaagcagctggtgaggaatgccatagaaagaaaaataaaacaagtgatacactgaaaaacctgtgtatcaaaaccaaagcctgaaatttcaagaagaatttattacgggaagatatgaaaaaataaatgagagagagacagagtaaactgttgagataactggtaagaactggctactcaaatcaaaagtactaccttgatattggaacaaaggagaaaacttttcaacatatatatataatatatattatatattagctgcgaagaccattctcatcacttagacaatgtttaccaaccgtaaaggtgatctactcattcatgcattacgaattttggtgagtccctcacttatttatttatttattcatttattcctcagttaaggtgatccaaactaattataaccaaagtagaaatatgttttatatgttactcaagtgatgaaactaacaacttcagctctttactgacagcattatcgtaatgtatccaataattgaaaccttttcttttcttttgtttgttcttccacagggatcacacaaccaaactccaaaacacgtcattacattgacaaacacctttgtttcgctacgaatcatctactacctcttgaattaggggaaaaaaatacaaaaccagacaaaaaggaagtaccttagctttagaaagattaggcaatgagaaaacgagagttgaaacaggggccgcgaccaaagtgagagctaaagatcccaaaaatagaccaggaagattcgataaacctaaggagatagcaccctcatcgcgcaaaggaagaaccacgaaataggcgcttaaaatctgcggggttcaaatgcatacatacatatgtacatatatacatattatacaattagaatttgagagaaaattgtgctcttagattctgagttttccgttcaaatcaagaaaatttagaattgaaactaatagaagattgaaaatgagattggagcttacgaagaagaaacaggaagatgaatggagcagagcagaggtctcgtgtggatgcaccgaaacgaacatggaaatcatcgcatctaagcgagaccgactcataatgctaatcatcttctttttccttttgaagattttatttctactaaccattacagacagaaatagtttcagaagtcagctgctcgggactcggtttttcttctatttttccttttttttttttttaagaatcacttttctcatttgttagttattttagattatttcttaaataataatggcaaattatagtaattgactctaaattatagtacttatattacagttatttttgtgaggtgttgttatataagttttgttgtacaatatatttgtatggtatattacttgtaatatcttgaaaaaatattataatatttaatttggcatattttattaaatatgtggttatggtgatattggagtaaggttataatcttactcaagttaattgtgtgataattagtataatttaataaatgaataaataaagtgcaatttattaattacgaaaattttatcggattatgtggatatgttaaatatcacttttgaaataaaatatttttgagttcggcggtcttagaaactcgacggagtggtcagaaatgtcacgtaaattaagttgaattatattgaaattatatcggactagtttagaaagtcgagttgctagttcattcagagaagttagaaatgactgaaatatctcctaggtttgattctaggttttagggttttatgaggggcaaactagtcatttaaaggatggatttttttttttttttttgaaaattttcatcatctttattaattgcaatccatagtgattacatgattaaaatccggagtaacatcactactcctgataacacgatcagcaactaaataggatattcgagctaagaagtgagcaacactatttgtagaacgtctaatgaaattgacataaatatctctcaagtcatttaacatcatcttacaatcagaaattacactcccaaaatatgaaaccataggaatagagctacgtaacgcttgcaccacggtaagactatcagtttcaatgacaaccttcttccaatctttcttcttaacccaactcagcgcctccttaacacccaaaacttccaccatttcaggctgcagcacccctgaacgacagcagctaaagttggggattcatgtcccgaccgtctttctagtagggggtttgtccctatgggtttagaagctattttattagctgcattaataaagtgcaatctttgtttcaaaaaaaataacagagacattcggtataactaattattcacaattaacaaatcccattccaaagaaatacatatttctaatattaccccttacataatcacaactaacgttgacctttttttttttgtcattttctgtgtatagttaggtaaagtaattttttgggtttatgattttaaaagaaattgtactaattaatcctttggtttcttctaaacactattacaaatacattctaatttcaaacaaagatacgtcaattaagtaaagtccctaattggttgatgacaatgcttttctccgcttcaatgacaagcttccactaccgtttttattccaaactaatgagcttgaggctggctttgaaggacttctccataactgtctctccaaaaccccatcatcatcatcatcatcttcatcttcatcttcatcacttgagcattcattttcatcaactagtacttttccctttccctttgtcatgttttcgaagtactcatcttcatgcaaatccgagctggtttcttcatcttcaccatcactgccatctgttgttgatggagatgttgtatcactcaatgtttgaaacattgttactctctctttctttgacccttcaaaagatgagctccttgtttttccataatcatatagtggaagtagagactttgagtttgagtttgaccatgaactgtttttgtctctccccaaactatatgttgtcgaaagcttcctctctattccttccctttccctaaccaaatcatctaacttttcatgcacttcattgttattattattattagccactgcctcttctgcagctttggtttggagctctgtaatgcttctgtcaaatgacttcttcttgagttggagagagcgctgtcgtgatcgaaaacatggtaagaaaaatgcatacttagctgattaagaataaagaattctgaattgggttttccctgtcttctaattttcttttgtttattcaaaggaaatatggtctcatggattaaaaggttacccttttgtcaagaaagcgtccaaggtgttggctttggagtttctttttcctccaaaatatgcagcaaaatcgtgctagtccagctagaaatatcaagataaaggactcaaatagtagaaacaaaaatattgccctttcattccctgaaaaaacagataaggaactacaaagatcaaaatcttgtgatttatacaagatgttcaaattcgtaacttcaaacttagtaacctgtgtaaagcctgagaagcttgggtctagcttgggagcaagtagaaataagcttctgatctgcataaagttgaaaaaaatcattacacagaaaatgcttgtgagatagcttactatgcaagcaagcagaaaaatgattactcacgtctggaacgacatgccaatggatttccagtctctgcatcagaaagaaaacaatgagtttttcaatacactagacctgtagaataaaagaccttttgcatgagtataaaggggtcaggtaaactgtgtatgtagttcatcatagattctcacttgaagcagcaaaaaatgcaagcagaatcctttcatccagcacataacgatccaagtcagtcttagccaatggagatgaaaagtcacctgtaaaaccaaagggttaaaactaatacagagtgtaagcaacaacacatgaaaacaacccacattaccaggatatctttcagaccagtagatggatccagtttctgggacatatagggtgaagaccacactccttggtttcattgctgagacataagtgtaatcacctattgtgcggctagtctttccctccatttcagtttgagaaaaatataatgcatagccagaacaatcaagaactggactcacttggataacagaatttgctgcagttgacttagaaaattttttaagcgccccatttggcgaaaatgaatataggaagccgtccaatgaaccaatggatacccaacctttgaaatagttttaagtattagatggtagagttaagacaaatcacacaaccaagatcaggcaaaacaacatgttttttttctcaattgacgtatatcaaaatcaagaaattaccattagtatcaacagctggtgcagagtttactgaacttaaaggccctatacttccctgccatagcaagtttccagtgtaaacatcaagtgtgagcagaatagacttgtctggcacaacaacatatacccgaccattgtttccaggagtgacagtaaaaactttgccaaacaaactcaagtcatgtatccacataaagtgaggactcttagtagaca

SEQ ID NO: 16549 - DNA, 13358 bp, Cannabis sativa
  modified_base (5387)..(5393): a, c, t, g, unknown or other
  modified_base (13227)..(13230): a, c, t, g, unknown or other
cagttaatttactgttgaaattgtcaatactctactaataaataatatattttctaaatttttcctgtccacgcgttgcaacaaattattatttcataaatatattttttttcttaaaaatgaacacagggcaatgatgttgaacctaataactaataatattttttaaaaaattttaattgtattgctttttaataacctagaaaaaaaaattagcataaaatttagtatacgtgcctcgcacgtaaatttttgctagttctatatataagtgtccaaaactctcactccatccatatccttcctaccgacctaacctaactccttggtgccaaacaataaatagatagatagagatacaccaaatataagtgaggatataataattacattttattaagtcttaaaaggcagcctatggcctttatttgcttatttgaaaacaaactctataaataacgccacaaaaatccatctacttcgcaaattaaattaaattaaattaaattaaatccactgcctcaaatctgaaacccctctcttcttcttcttcttcttcttgtcctcagaccactcctccaaccgccgctcctctgccccggtaaatatctatgttctttcatggtttctcactttgagggaccattgataatctctttattattatgtcaaattacatcattattttatttatcatgatatatgaaactttaactcattgttcttctattgattgatctcacaatcaatttaaatttatgattccacctcttgaaacttcaatgcgtctgaaatagatagctctagttataaaacctgaattgtgttagattattgtgtctttttccttagttactccttaaatctatgttaaatatatgtatgtatatcaagctttcatttctcatatttttgagtagaaaaagtattaacagttactcaaaactaccatacacacaaaaagacctcactcattttgagtttgaaatgacctggtttgtggtttctcaatatacatttcacttcttcctacctcatttctcgccttagcttgtattaaattggttttacaatgtcttaaatatgactattgctattcaaaattagttctttttatttcttaaaattgaagtaaggtaattacgattgagatatggaaatatggtttcactatcatgcatcgattattcatcgttgttttgttttcattggtgcttattgtgtgctgtagtggcttatgtgttttttgtcagagcaaatttttggttttggttttgccagtgttataaactttacatatttgttttaatttgtatctaataatgttaaatttaattctttgatttttggtaggggtggagatctagaaattctattaacttcttaaggatgtctaacaaatatgatttggttttcaaattctcaatctgctatttctttttctttatgttcaatcctgatttttgtttttggctgagttttgattttgtttatttccatcatttttttgagagaaaatagaaatattcattaatagacaaatcagataaaatccattacatgaaaatataggctcgtcgagcaaaatcaacactaataggcttatcaagccgtttaaaataaaataaaagaaaaccttaacaacaacctcaactaaaggtctaataagccaccaacgtttccattaacttttcgattttgacattagtcttcttcttcttttaatttttatggggggtctaattgtctagaatcagtgttgtgtctttggattggctcaacattacataattgaatgcgtcaacttattgcaatttttaagtgaatgatttaacattagaaaccaaaaaataattagagtatgtgcttgtttacactttagttggtgccttcagtggttagcagtatgtctcaaagacctgctcttgtgctttcgtgtttcatttgagttacttattgagtgtaatttagtgcaatgcactggaggggggcaactgatgtattctctacttgcctggatttgatttgttacggtgttaggagattgtctctagcctttcttttaaaggatctgcctcctcgatattctaggcttatttagcagtcttatattgttactgttttgttcaatactatatgtgtgttactttgttttaattcgtagtgtgtcttgtcctaacatcatctgcaacccattaatgacttatttagtattgccatgtcgtgaaatgttgtacctttaatttgtaacgaagggaggagactttgagccatcttctcatgttttctgtctatatacaattgatgaattctgtagcttttgaatttccattttatctgtgatcagagttatgtagggtaagctttcctaggaccctaggtgttacaaaatattggatggatgtattacctttgcatgttggtttcaagaattgttttgcgtatgaaatctcatcatgggtttggcaatttcagatggatttagaaagcacaactgaagctactcaaaccaacggaaatggggaaatcgaatcttttttcaacttggctcctcctttaaggaacagtgctgatatcagagaaaagctagagaattttatcaaaataaatgagatggcatctggcaagttcactttttggttctatcacatagatacttgtatgcaatctatagggttgctttgggttgcttttgtcccatttcctttgtgctgatcatttcaaatttcgattgataaatacaggaaatggaggagctaggagggttgtgtgtgtaacatctggtggaaccactgttcccctagagcaacgatgtgttcggtacattgataatttcagctcaggccacagaggagcaacatccacagagtacatttgtataccatcctcaaattatctatgccgtctttattacttctaaatagttcttaatctcacttgtaatattcaggtattttgtgaaggctggatatgcggttatctttctacatcggaggtgatttcctgtttctagcataattttttgtttgttcattttcaatttaatcactggaaaaggttcacaatacgtattataacaattacaagtcatatcttgaacatcatgccttacttttttgcaggggaaccttccaacccttttgtcggtctcttccggatgatcccttgctagaatgtttcgagtcaattgatggatcaaacattaaaggttagtagattgtgatggcccagcaaattattgcttgtatttttgaaagaaatgtgtgtcatttttcttattataaaattttactcttaggagtcttttgacactgagaatgactaaagttcatttcaccttcagtacaagattcatattctgaagcagtagaaagggccattgctgagcatcattctgtatggatagcttcttctttctctttatttttttttttgtctctaattcattttctgttttatttatttttgctccatttcacttttggctctctagggaattatgtaacggttgaatattgctcaatttaaccttgaactcatcatgtggtaggaatatggttatattgcaggctgtgaaaaaaggattcttgttgaaacttcctttcacaactatatttgagtatcttcaggttagattgagttgggtttttttcaattgttcgtgctagttttttgtctgaaaactcatacactcttccattacaccagtattctatgtgtatttattacatcctctttctcattggtcagatgttacgaatgattgctttgtctaccagtaatctcggaccaaatgcaatgttttatcttgcagctgccgtttctgacttctatgttccttggcaaagcatggttggtgttatttaccataataataataataatactaatccttttcaacaacggaattgtcgtgtctatgtaatatgttgtatttatagaggagcaattagaaatttggtcgctcgttgtagtgatgatagaatcatggactaattcttttactccttaacattttcctgtctttttttttttatttttctttttacatcactttgcaggcagaacataagattcaatcagcatctggccctttgaacatgcaacttgctcaagtgccaaagatgttaccagtgcttaggcaagagtgggctccaaaggcttttctcatttcattcaaggtcactaccttaaatgcataaacttattattcaaaatttattagtattgtcatagaattcaatgattaaaatggattaattttggttggactaaaagaaaatgtgatggcaacagctagagacagattcaaagattcttttgaagaaggcaactgcagctcttgaaaagtacaaaatggatatggtggtagcaaacgagctgttaactcgcaaggaggaggttgtggttgtcacaagcagtgaaaatattacagttcgtagagacaagaatgaaggtgttgatgacgtggaagatcccctaattcaacttcttgttggaaggcattcaacacatattaacaccaattcttcttatgttcaatgatatatcttggtctcaaaattactaaatttgtattggatttggggtttgtattatttgcagtgacaagcaactaagcaagtttgcagttattgtcactagcaacaataaaatgtttctctttgaatttattgagaaaataagataggggtttttattgtattttagacaaaagtttataattttactgtcacatgatttttttttacaaaaatactgtttttttataaaacaaccgtaaaataataaaataaaataattaaaaataacagtgaaaatttaacacaatacataatataaaaaatacatagtattttcttagtatttttttaaaaatatatatatatatatatagtattttagaaaaaaaaatttgccccacattaaaaaaaaaaagtaaaaaaatttagtatgtagtgtaaaaactctaataagatataatataataatatatataattttcttttttgacttaggatccattttgcaccgtaaaaaaattgtgataaaaaagtatttggtacacaataaaaaaatatcttattaaataatttatcttaaaagctgaagttggttcaattcaacctttagaaaaaattgttttgattaaaagattataatgaattagttttataccaaaaatatatttaattatttattatatattacaaaaataattaaaaaaatatttaacataaataatatttgaatttcttattttttattttgttttaaaaaatattttatatttatatttatattttggctaattaggatttttttccctgaactttaacatgtaccaaatcatgcctcctgaactttttggccgttaaaaattttcnnnnnnntattgagattgttagatttaattagaacgccttcaggacccagccccaacttgcgccttaattagcacaaccacctcgagtcagcgcatcgattgtttaaccacgatattgtagttcatggtgccacaaaagctagactttaaaatgcaaagattatgattatttttttaaaagaaattgcgaagaatgtgaaatttttgtgtttctataacatttgtcgatgttattaattgatgcaaagagaaaaagagatatttatagtaggtcgattggacttttcgatatgacataaaattggcgcaaacctaggaggcatgagcataacattaaataaaaaatatgggcatggattaggtacgataggatattacaaattaacacgatataataagaaaaatataatcttaagtacgacacgacatataaatgaactaatttaaaagtacgatatattagaaaactttataatttgacattaataataataataatttaattatatataatgaaataataaaactattagaaaatacaatattaaaactatattaatttatgagttaaatatatgaatatttattaacaagtatttaaattcttataattatattattcttaattgtgtgtaaagtattattaaaaaatatataaaaataattaaaaatgatatatattaaaaaaaaataaaatgagaaagtagagttcgaattataagaaaacaagttgacttataaaatggacacgtggatttaacgtgaaaaacaaaattttacaaaactataactaaaacaattgaaagaaaagtcaaaatattttcttggggaagagacaagtagttccgtccctgaaattggaccggccttttaaagttcggtacggatccatcaaaatttcacacaatgcggtatggtccctattttaatacgaaatttactatttagagctctttactttactaaaaatgcgaaaagacacttagttattagtgtggtattgttattggtataattaagtattggatctcatataatttaagaaaataatttttaagtagtatcactaactaatcgtaaaagactattaatagaaagtgttgaacaccactagtacttaataacatttattagatagtggggtttcatatattttataatgataatgaagttatattttactaatttcacattctatggtgtgcctttgacacattccacctatagatcgatcgttaaagttagacttttgctgaaagaaacatcattggtttttattatcatatcaaaggggcatatagttatgttactaatactttatgtaaaggataaccatttcgactagtaacgatgattcaaaaccacatctatggataaaaaaaaggaaataataaagaaaagaagcaccaataaatattggtagcaactagcaaccatttcattaaacaacttctttaattaactttacaaattaactaagtagcactagacttagtactaattcatcattggaccataaaaataaaaaagccgtcgtttaagactttttaacctacaaaacataattcaacatgacgatctttcattgcatatatatatatatgctgtatgcacatacatgcatgttgaatcccatatattaattgttcatttgagaagattgagtgcatatgtatacatataaaaatgaaaatatgcatatatatttgagtagtgatattataattaagatggaacaagtaattatgcggaggagtgacgaggacgagcagaccaaagtgagctaagcgcgcgcagacggtgaaagtagtcccctaaggcgagcaatgcccgtgcagcttggttgggccttagaatacgagccatttgcctcattgtttgtagcctaaggtgatcagcctacatttattccaatccaataatgtatgtatacatacatatacatatatatgtaaccaaccatccaacaaaaactaataattatacaattaaatctcaaaataataataaaaaatgataaattcattaacttttatttttacctggttcacaaaaatctcaagtgcttccaacttctctatagcatcggccattatagattcataagcagcttcagttatgggatcagctgccatattaaaggccagattctggtgaagtttatctattccttgtgacagagcatcttcagcttgctgtgatgattgcctaaggttatttacacctgccacttgttgatcgttcattggctcgatatgtggcatcacaacctggttatacaaaacacatcactcatcacaaccaaccaatcaattaattcttttttagtggcatcccgcctttcctcgcatcctaacttgtttgggttaagggttcaaatctcaccacaacccctcataaacaggtttatgctaagatgagaactctcgagattggattaggtataaggctcttatagctagcacgtgattcgtgagattatctaaactaccgaaggagtagagaaggaatctgcaacaggtgatctcttttcttaaagaaaaaaagaaaatataaagttaattaccttaagaaggtcagagggacgaaatcctccaatccagaggaaaaaacgttcagctggggttctccatattccagacattaaatagaaaatgtctgacttggcagcctcttctttcatctggaaaagattgtagtaatggttcaaaccattctctactaacataccaagttctacatccgatgctactctagcttgcagtgcatttcttagctcaccgttctgtctgtttagctcttccacccaatacccgtatttattatcaaatgctaccatttctgaaaattaaatttaaaaaaaaaaaaagaaaaaaccattttcaacaaatcaatcaactcccactcactcttttttatttgaatgaaaatactatactttccaaacctgagttcaaacttgatgagctattagtattactgcctatgaatgctgcaccctgttaattattacaagatatataaattagatgttatgtatgatgtactatatatcatcatgtagcaatattgataataataataataatgaattcaccttacctgcttcctagacctctcaagttcttgctccaattgggccagtttcatacggcttgattctaattgttgaacataagcctatacataatgtaatagttataataatttaattagcccatttaatatacatgccacttgttcattatgaattaattgaacaagttttattacagattatttttgaatatatatatatatatcagtcaaatcatgagcatcaaaatgaaacaagtttcttttaacctttttccgcaaacgactttttcttgcagcttcacgattttgtgccaatcttctctgcacctaaaaagaaaatatacgtttacatattcatattcatatacatataaagaaaaggaatattatcacttatatgcacaatacgtaaccttgttatcatcagtaaatttatgagcttcttggtcattttctgaaggtcctaccgattcatgagatataaactcaagctagaaaagaaagatgtccaaaaagataattatcacatgtatcaaacaaagtagtttaatatatataatctttgattaatataaataaataccttggtttcttgactaggaaccacctcctcaacaatagttgaattgggtgtgtataagatgttattattatcattttcaaaggagtttttccacatggccatgggaacctgtctgaatggctcatatatccccatttctcttgacctttcaaactgtacagttgatgaagaagagctcataccctgtcaactaattaacatcattataattactactattaatcaatatatgccctttctttggtatgatttcatttgggtgtgatcttatatatatatgtataggttaattaaatgttgggttcaccatttcacaaccacaactcctaaactaatatacatttatttactttatagcattaaacaaggaaagataaactaccatattatcacctctgataaaatccttcagtcagaggccttgtttgcaaaactggatgactacaaaatcaccacccaataagacctgaaacatctaaaataaaaatcatcaagacccaaaatataataaggaaaaaaaaaagctatttatgtatgtatatatatacagatataatagctgaagaagaagaacaacactataataaaggtctgaactttgaaattatgtgttgtttatctttcttttcttcttcttcttctttttttttttttctttttttgtttctcattttccatctcactttctcagtaaccaatcaatcaagagttgaacagaacaaaacagaggaattcaataaaagaagaagagaagcacaaaaccaactaaccttaggaatgaaatgcaatgggcccaagtgaagaatgagagatgagaatgaattaagacagagtgtaattgtagtattgactattaaacagtcctggattttgggaacccaaaacaaaaatttcagagaatgagactgctaaggatattataaagcaaaactaaaagcaattgtcaccaaattattattattattattaaataaaataaaagaaaggatagaaacttgctccattaaaataattcagcttcttttgccaaagtggtacagtaaacccgtttgtgtagccattgtccctacttcgtaccaagtcactgatgtgtctcattgccactcttcactttttgttttgtttttttatacgaaaaaataaataaggaagaaaaaaaaaatcatattaggaaaatttgttgacatcaccggtgccatcatatcatgtcgtaatgtgtggttgagatgtattcatgggtccactaagtgaaaatcgggtagtgacacgtgtacagattcaggtggttgatgacattagacccctcaatatagtatatagaatataattgtttaacaaaaatctttaaatctaaccatcgttatagttcataaagaatttataacaaccagaaattcaagagacataatttagtacatgtcaaagtttaaggaaaaaaaatcttaattagtctttcgaaaaatatacaaaacatttcttttttaattctttttaattaaattacaaatttcatatataaaatgataggatatttgtgtagtacactacacatctttaaggatcttttggtaattaaaaaaaatagtttaattttttttagatgcccaaacataataaatataattgtatactaatcttgtaacttaaaaataacccaaattcattaatatatttattttgctgaaatttcaaatcatattatagtgtctaacttattattttgtcgcttttatcgaaagccaacaacacaaaagagtgtagattggagattgtattgatttgtttgtgtataatattatattaaaatgtgtttaatattatatatgttgggctacgttcttttattttgtcaagtcactacttcattttgcctcccacattagtatgatagccttcacggttttatttttgggcaccttcccaaaaagcctcatactaatggagtaggtagaacacttatattcaaaacaattcttgcctattcttctaatgtgggacttgggttgatacccaacaatcctcccctcaaaccaaggaccacatactcgtggcctcccctccaacgaaactaccttagactctcgatctcatggcctccccctccagcgaaactaccttagactttcgatacaaggcactatatagatcttcaatcgcgaggtcatacattgaaggcttctcccacacatcgcaaatgcaatccactatcccagtgctcataaatctttggctctgataccacttgtttctacctcacattgactcccacattagtatgatattgtccgctttgggcctaagccctcacgattttgtttttgacaccttcccaaaagatctcatataatagagtaggtagaatacttatattcaagacaacttttacctattctttcaatgtgggacttgggttaataccccaacaatatatttgtataatattatatgaaattttgatttatatcaaaatatagtatatgtgtatgtatatataagtaaatatcaaacataatattatataaaaatatgagatataatattatataatacaattaaaaaaatattaaaagacactagtaatacctagtatatatatttatacgtgtcaatattattattagtctaactaaattttgaatcttacataatttaatataataactattaaaaagtattgctagccaatcgtaaaagaaaatattactctacaatatctatcacaatgctcgtaatacaatttaccaaactcgatcttgaagttctattaaaaagaagtatcattattggttgatggcatactatatacatatgctgatgtgtcaatacccaaggagggtgtaacacgcgtcccatctgtcttagatgccctttttcacctttgattttcttcctttaatttaaaattttattaagttaaaagtaccaactatataataatatgacactatttagtaatagtggcaattttataaaaattattacactaatttaatttccattaagttccaactttttgtcaattatttacaattatgttaagaaacaacacgactaatacgacagtatttagattccattaaatgattttattttatttttcagtgggattcctttggaatttttttttttaaaaaaaaataaatttattaagattttttaactttttcggtaattaaaaaatagtttaatcaacccattaacattatgaatattcattcagctatcgtacgtctttccatagttataagattcctaagctattatatgacattaattacatgaaaccaacatgtgaagctttaaaaaatgcagtggacatataagatgcttaccatattagagtgaagaaaaaataaagaaataaattgcttagaaatagtatcatttctatcttctctttcttttattatttttcataaactaaaaaatgtaatcatttaatgtttattaaataattatatataatattattttaataatttttaaagatacttaacattatgtaaatttgaaactttaagacaatgtttatggaaatttaacacagtaaaaatataaaaaaaaaatatcacagtaaaaatatgaaaataacaaaaaataaatatttttagaaaaatcccaagaatatattgcacgaaaaaccattacaacaagctctaagacctgtcaaattaagaaactaattaagcccccttttacaaaatttgaatgaatctataaaccaaccctgattatcttgactaattctactattgtataataaactctattatatacatcaaacatatcctcgaaattatttctatggtagaaagtttatgtctaaatatttaactagaatattaaaaatgttactttagttattattcctttattatataatataatcccttagatgcttaaaatgacaaatgatataatatcaaaatatctctccaatcctaagcaactctaaaagatgcttaaaatgtctacataatatcacataatattttattttctctttcattcatatcatttttagtaatttttgttataagtatctccaaccactttctctatttttttagctaaattttaattaaaatggctaaaaagttaaaatagaaagtaatttttctatttttgctctaattatactctctattttaattagtgttttaataatattttataattnnnntttaaattaaaataataaaaaaataataatgtttttaattaaaatactatttaaaaaattagcaaaaaaatagagaattttttatccattctgaatcactttttgtatggttggagcttattctttta

SEQ ID NO: 16550 - DNA, 13676 bp, Cannabis sativa
tttttataaaattaatgtgataatttatttaaaaaaaaaaattataaacggttatttttatatgaaaaataactttgtagtacatataaaaaatgatattaaaaaaatagaacaaaaagtaattattgtttactaagttaatattatatttaatatatacattatatatatgttgttactgtgcaaaaaaaaaacaaaaaataaatattgaaagacattatatttttttttttatttttccttaaaaattatgtcacttttatcattaatacaggctatttttttaaaaaaaaaaaatgtaaaaaagatgtcaaatttgacatctagtgtaaaaatcccagtgaaccactataaattgtgtgtgtgtctcgaaattttttacttaaaattattatttatcttgccaatgtagcgagttgatgttggtcgttttttagtgtcaacatgtgacatgcatcttgatttgattgtagccagagtatgcgtccataaaacttaacagttcataccctgacgtagcatccataattgagtcaatttggagaaagtgaaaacagttttttggacaagctttattgaggtacatgaaatctatacacattctccaagtgttgttgggcttcgagactagaaccaggttggccaaccacaccagatataaagcttcttagaggaacttattggcagttaattttttgacctctgcctttattgcatgtgcccttatggggtccaacagtcttcttttgtggaaaacaagtgtctcattctcatcaatatttagggaatggcaaatggtatttggattgatccctatcatgtctgaatgattccacgccaatacgtcctgattctttttgaacgtggacacaatccttttacgtattactggaggtaagtttctccccaccttgataaattttgtgggatccatctcactaatgttgaattcttcaacatcctccagtggttctttcattctctctgtcctaactctgggatccaatttgtcctctatctcctcccgaacaacttcaacttctacctggacaattgctctgggagcactttcaacatcttctctgaccataaacacggataaaacaaagatgttgtcatcacttctggatcatttttggtcatctttaatcactccaatactctcgttgtctcaagagaaatttttgcacaaggacctaatggatgtgatcacgccaaaattgactaggactggtcatcataatatatcattataggttgtagggcagtccacaactacaaatgtgtagtgcttgaaggcacaaaagttatgttctcccttcaatgtgactggaaggtggattttccccattggaatcagtaagttaacattgaatcattagagttgtatggggaaaggtgaccagcctttaatcaatcagattgcttgaacatcaaactttaacagagtgttaatagagcttccattttctaccaatatttacagaactcttttgttgctaatgtgagcttcaatgactaaggggtcattgtgggaaaatacacatgcctagcgtccttctttgtaaaggtggtgggtagatttatcatcctcggatgttaagctggtgactggactaaagcacatatttcctcttcatgctctaattcctttaagtacctcttctgggagttgagggtgttccccgcaatatgtgcccccctcaaaattgtggaaacgtgagcatcaacaggtggcagagctagacctagtggtatgggttcctgggtcttgaagctaagacagttactacaacatgcaccgatagagcagggaaagttggaagttatgttccaagagcttgagagagacttaccccttgtgaaggattaccgttccctactgacgcgaataaacgattgtctgtgagctgctccctgtttgggatatatactcgggatctagatccattggcccaggtgcccaactctgaccaaaaatttaattttgtctttcaggtagtaacactagttggtagtgtgcctcatgtctccattatattcaaatctcttactctggtcccttttgtgttttcctccttggggcatccatggaggcttccaataatggaccatgttgtaggttttcttgtatacattttctcgagtatagaccaaacttatgtgctcagaaattttaggctcatactctttccttggtttatttggagaatcactttggttctgacttcttccgcctcgcttgctcttggaatggcttacacttgcttccaaaacttgtgtttattgctttgattgtctaggagcgatactacattcagtctggattgctctatacctagagaaatgggttttcgtgggtgcttgctcagaagcagtggtcccgtagacagtcgatgtatactgaattccccgaagtatatctgccagaattgggactagtggggtaaaacttagcattgctactagtggagtaggtgccaaaggtattccaaaagcttgttgataagtcttccaagctaatatttccttgagctttggacatgaacttggacagcgtctcagctctttttcattgcatttcactccacaagaaaggagcctattattaattaagactagagagctaccaatttcatatcaccactaacctttgtctttgcagctgcttccatcctccattagatgaagttcttcaagctttcactaggctattgtttgaggctattcagcgatccgacctccacgtcatagtctctggcaactataaaactatttgtggaaggcagactgcaactccttccagccattaatcgatttaggagacaaaatctccaccagtcttctgtggacttggtcagtgttagtgaaaaacaaaggcatttggtgtcgtcacttactatttccagttgcatcatccgattgtattttaacaagtgggtcatggggtctgtctgtccatcatacaactctatctgtggtattttgaagttgtcgggtagtggggcttcgatgatccgtgtttgagagggccccactctactactggactaacttggtaagatcaatgtaagtgactttcgacccattgcgtgttgtaatgtgatttataaagtgaataccaaactcatttgtacttgactgaagaacatattacctgatttagtagcccagaatcaaggaggttttataaaaagtcggttcattactcataatattatgatatgtcaagatcttgttagatattatggcaggaaatcagcaaagctaaactgtatgatcaaattggatcttcacaaggcgtatgacaccatagaatggggattcatagaagaaatgctgcatgctttcaactttccaataaaatttatccagctaatcatgacttgcatacaaactcccagattctcgatcatgttcaatggttctatgcatgggttctttgaagctaaaagaggattgagacaaggtgatcccatgtctcctctgatctttgtacttgggatggaatatctcaccaggattttgcagaagattggtcttaaacaagactttggtttccgtgacaggtgtgaagctctaagactaaaccacttaagctttgcagatgatgttctgttgttctgtaaaggtgatttcaagagcatttactacatgctgcaaggccttaaactattctcagacacctccgggcttcaaccaaataaaaataagtcagttgtgcatttcagtgggatggaatgagatgcccttcaagtatcttggaatcccaatctgtgtaaagataatatcagaagtggaatgcaaaactcttgttgagaagatgactgtccgaattagagcatggagtacaaggaatttatcatttgtaggacgagttattttaatcaactcgattttgatggcaatacatactgtcaaattatgatattgccgaagaagactattgcagaaattgagagcatctgtcgtgctttcctatggaaagaccaggcggctgccgctgggccaggagcagtggcctggaacacactatgtcaaaccaaatccactggggggggttggatccagagacatctcaacatggaatatagcagcgatgatgaaatatgtttgggctatagctaccaagaaagatagtctatggctaaaatgggtaaatcatgtatatatacaagaagatgactggtggcaacacaacacaaactttcaaagcagctggtactggaggaaagtagtggaggtcaagaacaaagtgatgctagtcatgaattcagtacaattcatggcaaagaaataccaaattactgaagggtataagctgctacaggctcctcaagaaaatgtgagatggtgcaaagtaatatggtgccgatataatgtgcctaagcattcttttattatgtggattgctgctcttaacaggttaaaaaccagagagagattatatcggtttcacattgtagatagccccacttgtgtttgtgtggcttacaggaagaatcagttcagcatctaatttttgagtgtgactttactctagattacttgaaccaggtaaagaagtggctgcaatggaatatttgtataaactcattgcaaagtctcttgcggtagattgaaaaagcaaaagtaggtagaatcaggaagaaggtgctatcagcagccttagcttgcctcgtatacacaatttggacagcaaggaatgaaaaggtttggttggcaaaggagcatttggcggatcaacttgtatatagagtaagaggaatagtcaaagatagagttacttgccttgggcacaaaaacggatatagagaagaagcaatatggtttgaggctttgtaaaaatggggaatttccattagtttctcattgtaaagaatatagtttgagactatttatgaagtctctctagtttgtataagtttgtaaaaggtttttttggagtaatgaaattcagctggttcatcagaaaaaaaaaacttggtaagattagtcattttttcttccaatcttttagtgtcactattgagaaggtcacgttcgcaaaccttatcatttaaatagttcctcaggttgtttcctcggggtctcgccttttctcctttggcattctcatatttggcattaagatgcctttgaaggtcaactgtggaccaactatcttcaaagaaaattccctccacccacttggttaacagaatcactaggatggtttttccttaccttaggctttggtactttaatactaggccttttgtgtggcgcaaccatgccttatggagaaaaatggcatcccagcccagaggcgttggtggccatctgcgtccataagggttggttggtcgtgttcatattttttatagaaggcaacgaggcagatttggtctaaggctcgcccacctttgccttccccttgtcttttcctagagctaaggttccaacgttggtggggtttgctttgttttcccgatcatcatgtccttctaaagcattttcttcaaagtcttcatctaggttgtcaagattggatcggaggcgagcgatcatttgttatatcttttgagagaacctttcttgctgtgctagctttagttaagttacaagaaactcattggacactcagagtagatcttgatcctactcgtaataatatctatccttatagtacccatcttcaatttctccattataatcttcttcatcgtcttcttctttgtctttctcttcttctggggttttctcaacgaacaactctcattgttggttcgtttcaagcatctgtccgtcagttttagacacttcttcgtccctcatatggcttggctgagcatattttggaggggttggattaatgtcgtccatgatgacatcctggttagaaggatgaggtttctcaacaacagttttccttatatccaccatcgttgaagatgataggtagattggattctttctgcagctcttaatgaaagcaccaaaattttactaatatttttgaaaactgaatatttaagagcttgaagagattaaacatagataagtaaaagagatggaggaattttacgaggttcatgcattaattatccatagtctacaagtcagtgtattgcccttttaggctttgaaatgtattacaaatgagttttataataagaaactctaacccttgctataaggtggtttttttaggtttctcttgtataaaaagaaagcttagaataaaactagcagaattttagctaaaattttgtccctttttgcataaagggataatttatataggctagagtttgggttcaagcataccagtgacccattcaagttttatatgtaatagcaagcccattattggaataaaatacacaaacacatgactataaggcccactcgagatattcagctcgtggggaggttttttcgtactaacaaggagactatttagtgtagggcacgtgttgcatagagaataagtgtggcagacaaaggtgtcaaaaagtcgttggacaaaaggtgtatatgttgtgcttgcactaccatgatctgatatacaggacaatattctgtcatgtgttagagagataggcatgacattatatgggagacatatgctttccatatcatggtagacattcggtactaaccccgtggtagatatccagctcctaatctgtggtaggcttctagctttagtcctatacgacttgcgtccatgtatgcccttaccttcgttttgaggtctttgttccttcagtgacttagaatactaggcacgttttgggccttggaagatcgttaagtctcggaggcgaagcccttagtctttattgggcttgggcccattccaagtttggcttggacttccataagattaggcccagttttagatggtgattaccttttggttgtaccacgggtctaccttccggaaacatggataacaaataaaaattgttcgtttaaagtttttattttttttttctgttaaagttaacggttaaaaccaagatcgctaaatcaatcgattaattatcctttttttttttaagattgaaaacatatttttaactattttaatttaatttatttattaaaatagataattatttaaaagtatcaacaaaattagataatttttttttttatataaatcttaatttcagtttaaattagacattaattcaattaattaatcatacattgcagcaaatttattagttatattatttaaaatatctaaacttatttgcttattttattgtttgataaaattagttagatatattttttataaataaatttaaaattaaattaatgaaaaatataatcaaattaaattttattaaatttaactttttattattatttaaattaataattaaataatagcaactctaatgcaactctaaacaaacattagtaataccttctatatatatatctaaaagaccaaatcacccttaaaaaggagggaagaaattaccttataaattattctatgctattatacttctttctttatggaaaaacgtattctcaattgtctgaaaaccgcaataattattaacctagctatcatttcaatactatggaacttttatatatgtttatgtatatgtggcagctatatacgttgatgaagatgacatagcaaggtacacagtcaaaaccgtagatgaccctcgaactctgaacaagacggtgtatcttagaccaccaaagaatattttgtcccagagagaagttattggagtttgggagaagctcattgggaaagagttgcacaagtcatcaatctcaaagcaagagtttctagctaatgcgaaaggtgagagcttaatatacatagagtaaatatattgttatttatatatttctcttagcgtcaaccaaaatagttgcatttctatgcaggcacttagtaagtatattataaattataaccgcattgaagaagtggagagaatgcatgttttctatgaaaaagttattataaaaccttattgacggtgaataacttgtgccacattagttgctattgaaaacataatagagtttgaatgatctctgagtctctgacaacttcttggagagaattctcttccacaacctactctaagatgtcgaaacagttgtatactactacctaaccaatttcgtactctccgcgacatcgatcctctagtggtgcgagactctcataatacttgggtagaactcactcccaagtagcctaaaaaaagagcatgtcgaagtatttattagttaaaataattaacgaccacttaattaaaacataaattgcgttctgtattattaaaaaaaaaacaaaaaactaaaaaatattcataaaaaacatattctataaactttttaatttctaaaatgaaaatttttaaagtcattgtaatctattataatctatttatattttttttactgacactttggaccttaacctcacccttgaaccctaacaaggaccacggacccagaccctgactggactctgactaaaacttgaactcagacttggcccctaaaaaagaacccaatagacccaaacccaggccggcctgccctggccccagacttagacacaaattcagactcgaccgtcgacctcagacttgaccctcgacccttgaactcggctctgaccctcagacccgaaccaacctccaagacccaaactcgaccccaggcacccctagacccatatccgactcgagaccttgccacgatcccactttttctcacctcattttctcatttctcactcaaataaagacaaacaaaaaaagaaatttatataacacttttatttttgttcttaaaattaaaaaacaaaactaattatagaatatatttaatttttccaaaaacaaaatttaaaaattgaaaattttactactttattttaggtaacttacaaaattaaatacataaaagtcttaccaaatgcaaaaattttacttatttcttaggtgttctttgctttatcaaaagaatttagcttcattagtatatgcaaaattgtttgtgattaatatgtttaaataattttttttttaaggaaatgattaatttttttttttaattcattgtttatcttactattaatgcgtgacaaaatatatatgtataaaaaaatatctaggaacaattagcgatcaaaaaattaataaaatagatcaatatataatctaattaaattatatagaaatggtcgaagcttgtgtgttgtgcacgtagatcaaaaaatgtgagtaattttatattttcttcctagcttattattatcaaaacgacagcaggtttggcctaacttaattccttgtttgatttttatttgtatggaaatgaagatctagattatgcttggcaagttggaatgggacattactacaatgtgttttttgaaggttgcctaacaaatttcgaaataggcgacgaaggtgtcgaagccactgaactttatccagaaattaattatgtttcggctgtcgactacatgaagcgctttctctagtgaatgatacatatattacatatagagcttttatttatttttatattagaagacggggattttaacttggaatcactaggtctatgagcacaaatagacctcttattaataatgtaaaaataaataggacttatcccccgaacaataatccttgtagagtttcatcttctaaaactttctatgttgcatgttggattagaatcttatttgtgagcacatatataatgtatatattattataaagtgtgtattgcggaattgaattgaaaccagtgaaagaatattatttgataatcgatctaaaattacaaagagaaccaatgcaactaaatatagtgtagtagaggcggttaagtgactaaccaacttaactaaagaaaaggaaagtcctaacataattaaccaagttgtcttaaccaaccaaaaatagttaaagacaataactgctattgacagtcaatctggagaagagcttggagaagaaaaatatactataacttgttaccccctccctcaagatggacggtatagatcatagacatacatcttgtttatgtgtgtagttagaactgtggaggccaacagtttggtgaaagcatctgctaactggaggttgctggaaactgggatcagtcgtatggccgagttgttaattttgtcacgaaaaaagtggcaatccaattcgatatgtttagttctttcatggaaggttggattgttggcgatatgaatagctaattgattatcacagtaaataaaggctgattttgtttgaggaattttgaggtcagtgagtaggtattgaagccaagttatctcactagtggttgcagcaagcgctctatattctgcttctgctgaaatacgggatatggtaggttgtttcttagttttgtaagaaactaagcagtctccgatgaagatacagaatcctatagttgagcgtctagtgatggggcaggaagcccaatcagagtttgaaaaaccttggagatagagagaagaatttggtgagtacaataggccttgtccagggtggcctttgatgtacctaagtaggtggtgaagagcttgcaaatgtgtgttgggggtttctcaagaactgactaagacagttgatagtgtaggtgatgtcgggtctggacaaagtgaggtagagcaatttgccaacaatttgtctatagtaagagggatttgttagtggttccccttgtttatcatctaacttagtccgtggatcaatgagagcctttgcaggtttgctacctgcatatcgcgtttcttcaagaagttcaatcgcatatttgaattgtgatagaaataggtcgtctttgcttttggcaatctcgaagccaaggaagtaacgtagggatccaagggccttgagtttgaatcttgagtgtagggattgttgaagcaaatgtaggatagctaggttgggtccagtgatgatgatatcatccacgtagacaagtgaggctatgaaatcagtctcatttcctcgagtgaacagggtatagtctgcttgagattgcttgaatccttcttggataagtgcatcggatagcttcttgtaccactgcctggacgattgctttaatccatagattgacttgtgaagtttgtagacgagattagtttctgtagacaaagaattaggtagggtcattccaggaggtaactgcatatataccccttcattaagatcaccatttaagaatgcattattaatatcaatttggagcatgtgccattgtttaatagtagaaatagcaagcaaaagcttgaatgtgaccattttggccacaggtgagaatgtatcaaagaaatcgagcccatcttgttgagtatatccctgagcaacaaggcgagctttgtgcctttcaatcgagccattactgttgcgcttgattttatacacccattaacagccaattgctctttttcttggaggaagaggaacaatagaccaagtcttattatccttgagtgcaatgagttcactgttcgtggcatcaagccactgtctgaattgcattgcatgtttgtatgtttttggctccttttgtgaagtaactgcaagaatgaaagcttcgtatgagttagtcaatctagtgtaagaaatgaatttatctaaaggatgtggtgtagaagattgatcttgaatgtatgaatagcattcaaagtctttgaggtaactcggtggtcttgtgggtctagtggtccttcttggaacagcaggaggagcatcatgtgatgtttgtaaaacctcagtgggaggattgttagattgtggtgatctatcagcaatgtttgtgggtttctcttcaaccgtgggtgatgtattgttgataggagaatcatttcttgtccctgcattgttagtctgaatggtgggataatctccaacaggagtgttagtaacaatagaggaaggcaggacaggtgcaataaaggcatcaatgccactgctgttttcattttatttatgaaaaggaaaaatattattgtgaaaaacaacattccttgagatgaaaatttgttttaaattcaattcattgtttgtatcctttcacaccttgggcatatccaataaaaacacaagccttagctctagcatcaaacttggtgcggtgtgctgtgagagtggaggcaaaaatcaggcaaccaaaagttctcaaataggtgtaatctggttgctttttgaataatagctcataaggtgatttattttttagatttggggttggtgtttgattaattaaaaggacagcactcactacacattcagcccgaaattgaataggcatattgccttgaaaatagattgccctggtcacattgagcaaatgctggtgcttcctttcagcagcaacattttgttcaggggtctttacacaagtgtaatcatgcaggataccctgttgttgaaacaattccttgaaagccaattcaggggcatttcagacctaaacctttttcaatagaacaagaaaattgattcttaacataaaaaataaattgtggaatcacattaagagcatcagacttatgtttcagcaagtaagtccatataaatctagaatgatcatcaaccaaagtgagaaagaatttgtgtccagaatgagctggtatatgatatggtccccaaatatcacaatgcacaggatctaaaatttcagaagcaaatttattgctgctagcaaagggaagtttcctttgcttagccaaaggacaaatgtaacatggtgtgtctttgtgtaaaacagaaacattacaattccgtttattgctaagaatattcaagtatttattagagcggtgtcctaatctggaatgccaaacatcagcacttatagagaacaagggaattgatcgggtgaaggatccagtatgtataggtcattcttggattcacctttgccaatcatcctcttgtgcacattgtcctgtataacaaaatgattagtatcgaatttcacataaagagagttgtctttagttaggaaatttacagacacaatgttgtatttgaagctaggcatatacaacacatcatttagaatcaaattagatgagagtttaactaaaccacctttatcaacaagcatatatttattattgggtagtaacaacccattaatatatgccttgtgactcccgaatctagtatccaagttttatcaagggggagtttggtcacaatggaaaacataatacaagtgttacctgtggatgtgccaagatctgcagcagcagtgttggtttgttgcagaaccagtaaatttggaagttgttgatactgtgcaaaggtgagttgaggaagaataacttgactgtctccaccagtattgcttgcttcaggattggcttgcacttggtttacagctacatcttttcccttgttctgattgtatccaggagggtatccatgtattttgtaacacttttcaatggtgtgacccaagatgttacaatgggtataaaagggcctatttctttattgttgctgagtcttgttcccttttgtgttgtttttctctccttgaatggaaaaagccatactgttgttttgatcattttgttgggttttattccctaaataaaactcatttgaatataatcggatttacttattaatata

SEQ ID NO: 16551 - DNA, 6407 bp, Cannabis sativa
ggttgtcctattgtgtgctccgtgtgcgtgtttacaaagatcaagagagaaagttgttcaaatgagaagggtagaatgaagttttagaaaaaaaataacctattctagtaatattgtttaatttagatttaggggaacaattttagcccaataaatgaataattaatcaaatttcacttactaaatttgaattatgtttttggaaattttgaacttttgaagtgttatacatctcttatctatattttaaaaaatattggcgcgtgcaatacacctcgttagttgaaagaaagagggagagtgttccaagtccaactcactcgactacataaaattaatttctttaatttcccggcaaaccccaaaaaccctaattcccttcttcttcttcattcttcattcttcttcttcttccccaactaccaaccaaacctccctcactcccatccccattaaagcttccaaatttctcactctaattacttcagattcaccgtttctccaatacccatcaaatattttgttcaaagtttccatttttaaattaaagtttgattcttttgctcccatcaatggcggaggatcggaatgagctgagtgactacacttcggaggacgagggaactgaagattacaggcaaggagggtaccactcagtccgagttggggattcattcaaaaatggctgctatgtggtgcagagcaagcttgggtggggacatttctccaccgtttggctcgcttgggacactcagaaattggtatgtatttttcattgatatgaaatcttgagattttagtttgtcagaaagtttcggagagggttcttcaaatattagtaagattgtgataatgtagaacttggagaaagataaatttaggattttgaatgagcataaggctttttgctttgttttcaatttgaatttgatagttgtaaatatcattaaagaagaagaagaaagaaattaaattttgggtcaaagctaaattttgagttaatttttcattttgagttgtgttatagtgaacaaggaagaaaatatcaatgtcgatggaaatatcagtacatggatatttcaatgagtatcgatatccatggatattttttggcaagaaaaagatttattgtatcctaaaaatttagaaatatcgaccgaaattgttgatatttaatttcttgatagtgaatataggcttagcttagtaggatttattttcatgtggattgttgaggtgattagagatggttataaaacatcatgttcaagattatattttgattgaattatgtcttggtaacatagtgaaaaacatgttattaggagcttcttgttcaattccttaacagcattgggaattttattgttgttgttgtagcggtatgtagcgttgaaaatccaaaagagtgcccgtcattacaccgaagctgcaatggatgagataaagattctcaagcaaattgcagagggagatccggatgataaaaaggaggttgtaaagcttttggatcacttcaagcattcgggtccaaatgggcaacatgtgtgtatggttttcgagtacttgggagataatcttttgaccgttattaagtatagtgattaccgagggattccactccatatggttaagaaaatatgttttcacattttgaccggtttagattatttgcatcaacaactttcgatcatacacactgatctgaaacctgaaaatgtcttgcttttgtccatgattgatccatcaaaagacccgaaaagatctggtgcaccacttatccttccaactgccaagaacaaagttgcttctgaatcgggagcctccaaagaagtaaaaacaacttataatggtgatcttacgaaaaaccagaaaaagaagattcggaaaaaggctaagaaggcagctcaagattgtggaggaaaggaaacttctgaagatgagatagattccaagactaataatggctttgagaatcctgttaagagtgttgtaaaatcaaggcgagattgtgttgacgaaaaagaaaagagatccgaagctaaagataaactgacaaatggtgaagagacaaaggacaatgatgaggaagataataaaggtgctagaagagggaaccgaacaacaaggcagaagctccttgctgatgtcgatctcaaatgcaaactggtggatttcggaaatgcttgttggacatataaacaatttacaaatgatatacagacaagacagtatagatgtcctgaggttattcttggttctaagtactcaacttctgcggatttgtggtcgtttgcttgcatttgctttgagctcgcaaccggtgatgttctatttgatcctcacagtggtgataattatgatagagatgaggtatgtgaagatttcagtcagtgatggaaattttaaatttaagtagttaataatttattggtcttgaaaattcaataaagagaatggggtaccttctcttttctccataaccaatcatcatggttcatctgacaccataatgtgtgttacatgcattttctgacattgaacaataaggaacttagtttcttcactggcttttatttatgtcgactagtttgtgctgttaactgtaaacatactattggaattgttcgtttactttaacttaaaaggtaaaaatggaaaaagggttgctcttgtgattcaagattcatgagttttcctgtgaagaaaatgaagtaatgtccatggatggatttaacattctaatttatgttgcaggaccatttggctttaatgatggagcttctcgggatgatgccacgcaaggtaaggcaatatgcgtctatttagaaaaataatattgtgttgaggaagaagctagactttgacattctaacttcatctttcagattgcattgggtggtcgctactcgagggaattctttaacagatatggggatctgagacacattcgtcggttgcgtttctggcctattagtaaggtgctagtagaaaagtacgagtttagcgaacaagaagccaatgacatggctgatttcctcattcctttacttgattttgtacctgaaaagagaccaacagcagcacaatgcctcagccatccatggtttaatgctgttccacggggtcttgagccttcggttgttgctgctgttgaagtcccacctcaggattcagataagaacttttctgagaagaaggagacggatgatagagaagcaatggaggctggagtgagcaatatcgtcattcaaggaacttctaagctcatcacagatccaaacacggaatagatttgccatgcatatatagctttgccgaaatgtggcttgcttagtttttcgctttccacaggatattcgcagtatactatggcgacttggggatgtcttcatttttgcggagcagcttacctcggccggttgttgtttcactcaagtttcggaaggaagaatatctttctcaagaaggcgtgttcttaattttcgaatctttcttctttctttctatttgacaatctaattggataatgtaatttgtaaaattcacaattctttggttgctggttctttgtatctctttcactaaatgtaagacaaggcttttttattttttaatatttttgaaatgttgagatgtggtaagaaaacttgtacattttattggtctgtttcttgatttgttcttttacatcatgtttttcaaaactaacttgataccaaaaagcttttattttattaaatgcagagaatgatatgatgtaacgtgttaatttaattggaatttttatcatttcatttgcatttaagtttaaattttgatagtaaaattttttaaattactgaaccgttataaaatttaaggtgtcatactgttaactaccaacatggattgtttatgtgtactcttgtatacgtgacacatttatattggcgctcttagtattattatttcaaaattcatttatatcaatgcagcaagtgccttagggcagcatgcacttgctttcgccacttttcttgggtagattgtaacatcgattctttgtccagacaatacatcagatctgcacattcctgaccttcggctggaccttggtgagtggttaggaggtcttctttcttttttttgtacggaccttcttccagacgggcgtgcgccggtagctgccatgcatatttctttcttcagctctcaatgaaagcaccaaaatatttactgagtttttcggaaaccaaatattttaagagcttaagaatataaagaaggtataaataatgcgataacagacgagagatttttattacgtgattcattcaggcgttaattaactatttattcttagtccacgagtccattttattagattttttggccggtaattgtttatacaaatacaaaaatgatagacttttactcctatccaccgtgttcctcctgaagaaaaggaagcttagtagaaataatctagagttaataatggggttacagtaatcagtcttcggttccaaggtgaagggctgaggtaaaaaggagaagtcccctcgcttgtgcgtcttcaggggtatttataggccgatcccctcgcatgagacaccttgaatggatcttcatagggatgagcccccactgttggattggttggtggtatatttttcatatgatttttaccaatgtcagattgtactggatgtacttgcggtgtcttggacgcgtgtcaccttagggctattctcatttgaatttcctttatccctggccgtcggattactttgtacaacacacatggatatgcatgctttgtatggtagcgaggcatgggagacaacctctgacatcgtacataggaaaggtgcggtcggtgggcccgcaatctggcgtgcgggctgaattttcgcgggtcaaaggagtacctcggaccgattgatacctcaaggtggaaggctcatgttcttctcgggagcgaagggtcctgtcttctagaatggagagagtcgctacctcgcaggcatctctctcgtggcctacacttggggagacttctttcacgaagaccaatttcgggaagttagggcctttatcctctcggaatgcgtagcgaggcccatgggtgcctaatgattctttggcctttttcaattaatttccatgtgtcatgattgcgaaatgcgaataacactagttatttagcatataaaaaaatttaacatgttgaaaataaagtttaaacaatttatttcacacacatataaaataaaagagtctcgcgtgcaacatgctgtttgaattatgtttttgatgtgttaaattttttaaatcttttaaaattttatcaaatatcttaaataattacaacgtaaaaaaagaaaaaaaaattagagtaaagtactacaacgaataaataatgcagccctttttaagagagtgatacctgaaattattttgttttttttttttgtaataaaagatgaaaacttagttgttgtgtttttagagcctaggtaacaactgaacattcattttcacttcacgtgggaagatattaatgaagtattgattaatgaacattcatgatgggaacattctgtagctgaactggattgacaactctacctaccttaatcattatcacttagcaaacaccaatgatgggatttttcaccaaatttatcattttccaatgcctctaaatattccctattttactcattcacttatcaacattctatgtcatatattactttttttttgtgtttaccatttttctaaaacaaactttaaatcctatagctttttaccttttaatataagcattaaggtatttaagcaaattaaacccataatattattggagtattcggtaatcggtactattgaaaataaaaatcttaagacaactcttgaattatgaaatttgaattcttttaggcctagactgtatatatatatatttttttttttaaagtgaaaggctaaaactagtaggattaatttctcacttgtaacttttgtaataataataaaaataatgtaaagaaagcctagaagggatggttttccaactctgttctacaattccattccatcatcaataataatattaataataataacttctttcttccttttaactcatcatattaaacactaaacctagtttaaataatacaatgcccacccatttggatctttcctctccttgaatatatatattgtagaagtagaacattatatgtcagatccattccatcctctctctctctctctctcttctttctctcacattgtcaaaactcatatcatcatgaaattttttccttcaacttcttcaaaaccacaattaccatatatataaatggcagagagagagaaagagaagtagatgactctgaaaatggcctggaaaa

SEQ ID NO: 16552 - DNA, 3973 bp, Cannabis sativa
  modified_base (3286)..(3287): a, c, t, g, unknown or other
agatgtgtttacccataaaaaaaaatctttattattaaatttttaggttattagccgcaaaacttttttatgttttgattttctacatttaaccttcttcttttttttgtgtgcagcaaaatttctttatatttatttttctttacaaatgtaaaatgtcaattggatattactgttaaataccaactaaattattagtgtattgacttcgaagttttacttttatatatacacaaatgtacacaagtaattattcaatttatatttaagggtaatatttaactgacgcctcaaaattacaaaacaaaaaataatcatatatatagtatttcaccgctaattagtctaattttttctatatttatatatagatcaaaattgatgaactatataccagtcatgatgtattcaggagcagcatatcctttagtgcctactatatgtgtagtactaacatgtgtatcttctccttctggcccatcttttgctaatccaaaatctgaaagttttgctgtatagtcctgaaattatcaattattaaaaaaatatattactaatttttgtacatgttttttaatgcattgaaaaataataaaataaaataaaacttacagcatctaataaaatgtttgaagttttgaaatctctaaagatgacaggttgatctgtttcatgaagaaaagctaggcctttggctgctccatgagctattttcattctagttgaccatggcatagtagtagagtaccctgaaaatttgaacaaaaattatgttataaaatgataaaattaaattaaaataataatgggttttaatataaatataaaataataattaaattggtatgatttttaaaatttagggactatattgaaatatttctttttctagggattagattgcaaaaaaatttaatgataagggtatttatgttaaaaacttatagtaataataatagcaaaacaagtgatgaataattactcccttatgaagagatgatattctatgcatgcaataataattaagttgttataatttttaaaatttatggactatattggaagaaaagattatagggaccatattgctaaacaatttaaacaacaagggtatttatgctaaaaaaaactttataataattgcaaaaataagtgatgaataattgtatactcacttctgaagagttgatcttctaagctttttcttggcatgtaatcatacacaagaagcctatgttcttcttcacaacaatatccaatcaatttaacaagattttgatgccttagttgcccaagaaagataatttcagcctagaattgaaaatatatatatatcaaataatatttacacataattaaataaattaatactattttatttatttatttatttttcatttttaacataatgcaatttgaggtaaaaaggactatactaaccagccattctctatatccttgcaatccatccaagtctagtagtttaacagcaacagattgaggctccaaaccatgcttaaacttttcgtcgaaaaaacctttgtagacaggtccaaaaccaccttccccgagcaaattgctccacgaaaaattattagttatgtctctcaactcagccaatgaaaaaacatgaagatttgagctaatgagagaattcgataaatcatcagccaacataagcgagtttggatcacttaaatctgaaaaagatagcctttggaaagaagatttcttcgaaacctctcttgtattagattctgccttattgttgtatttaccctttgaacaactagggattatgcaattccatgccatcttcttcttgttgttgttttttcttctaattctctctatacaaaaattcttactcttcaaatttttgtgtcacatttaaagaaaaataaatagaagaatataaaaaaaataataaaaaccctagatgaagagatggtgaaatggttgagatatgtggcttatatttaattacttatatttgaaggcttagattagacctcattcaaatcataacatatataaatagtactacttttccttccaccaactactctttttgtacttatatgcaaataaataattaattaatttatatataatatcttagtttaatttttttatagtaacaatatatatttttttcaatgacaaaactttagttaagagtacttgtcatttatgttagaatgttgaatagagtggcctacttcttgacttcttccttctgtaattaattaattaataatttaattataacctcttaaaatcacattttattttcttataaaatatttctttctgagttggtaatcgattgtgtaaagcaatttgattgaaatgttgaaaggtcaaaatcaatacattgccaaaccaaactatagtacaaaatcaaaatattattcttttggaattctagatgtgtagtacgcaattcaatgacatatatatatacaacaaaaccttctagatgattttatttttatgttttttttttttgaataattataatttatttgtatgattaaaaaattaattatgcattacttgtgtttttgtatattaaaagttagtttttatatttatttttggcttgtttgtctcaaatattatatattttttgatgtaaacacgtttttatttttgatgacttaaattatttatgttaattatttggtaaaatagttttttattactagaaagtaattacattagtacaaaactcaataataatctactaaaaataacgtatcacaaataagtatatcgaataataatttttcgaggcaccaaacccttcgatcttaacgtattgattgattttttatttttattttttactttacgtaatagtttttatatatttatgtacttataataaaatggtcttttagatatgatcgatataagttaaaaataatcgatatttcatttgaaaattattgtgaaaaatattatatttaaattatctatttttactcaaaaaattaaattaggactactttgacaaataaacttttattgtattttatttatttattgtggcaaagtaaacttttattttaaaatatctcaaaacttatgttgtggatagtttacatatcatacaaatattgtcacactaaaaaaaataatggatgaaaacgtgttaaaatcatctatatagaagataaatataaatattaaaagatattaatagtatctagatctttctgaagtgttatatcttattaatgcaatgaagtatcaagttccatataatttaatataatannttttaaaaaatatcactaattaatattgcaagatgttacctctaagtagtattagacaccactaatacaatactgaataacaattttctatatataaacttagactatcatgcattttacactaattaataatggtgtaaaattctaaaaagaaagagtgacaaattggagataatgatatatatatatataaataatttagtcaaagtgacacattaattagtgacttgttacaacacatattgtctattgtttttttcaaatagggaaatttactcccaatacaacttaccaaaacagtccactcattttttgtacaaggaaataactaaatttgatttggtgactaatatactttgttcttttggttttgttttttaaataattgaaataaattagatagttatgtttacaccacaaattagtataaaggtacaggtgtacacttctattttgtagtacaattatttaaaaaaaaatatacaaataaataaataaataaaattaaaattgagtctttgtaattattacatgatcgttagaacaatactaggatgaaatttttcatagaatttaacatagtaagcttattatatatattttagggtaaatatcattttagatcctgtattttgtaaaagttactaattggaccttctgttttgttaaataacaaaatggactct

SEQ ID NO: 16553 - DNA, 2882 bp, Cannabis sativa
gcaggtttcagtttcgaaagcacgggctatcattgttctagcatccaatgaaaatgctgatcaggttattgccccaatttttgatgctgttatgcttttcagtaagtcatcattgtggacaagctatttacgttttgtgttttttgtttccagagcgatgctcgtgctttgcgggttgtgctcagccttacaggagtgaaagaaggtttaaggggccatgttgttgtggaattgagtgaccttgacaacgagcctttggtgaagctcgtcgggggagaactcatcgaaacagttgttgctcatgatgtgattggacgcttgatgatccaatgtgctttgcaacccggtcttgcacaggttcgatgtgtttcaacttcgattaagttcaaacttagaacttgagttgttagtctcacattgctaatacgtggaaagataatagaatatataagatgaatgaactattcctaccattgctaattggttttgagatggaaccttattcaccttattcaaatttctaacatgagttttttcagtttctaatttcatttttttttcgattagatatgggaggacattttggggtttgagaatgccgagttttatatcaaaaggtggcctcaactcgatggtcttcgctttgaagatgtgttactttcatttccagaggcagttccatgtggagttaaggttgcttctgaaggtgggaagataattttgaatccagatgataactatgttcttggagagggggatgaaatccttgttatagccgaagatgacgatacatattctccaggttccattcctgaggtaacttttttcttctcaaccccacttgacagttatttctgtttatttctaatgagtttgtgttattttcaggttcgtaggggttcttgtccgaaaatttttgatcccccgaaatatcctgagaagatactgttttgtggttggcgtcgtgatatcgatgatatgattatggtaagtcgcttataattaaaatttaacatagtattatataaaaatataatacgaccaaatatattgtaccaaacgagccttaaaatctttacataattccacattgcaggttcttgaggcatttttgccaccggaatcagaactttggatgtttaatgaagttcccgagaaagatcgagagaggaagcttaccgatggagggctcgacattgctggattggtgaacttgaaacttgttcatcgcgagggaaatgctgtgatcaaacggcatttagagaatcttcctcttgaaacttttgattctgtacgtattatactgattgagtcaatgagtttgatattttgatgtgcttaatgatgattagtgttgaaattattattgaattgaatactaactctaaatggacagattttaattcttgcagatgagtcactagaggactctgttgtgcagtctgattcgagatctcttgccactcttctcctcattcgcgatatccaggtaaaactgctttgacccaactcgccgaaaatatgatcattgttgagaaaaaaggaacttattgttaaagctgcactttctgttcacgatttcagtcaaagcgtcttccaagcaaggatacaaagtcaacatcttggaggtttgccgggttctcacacagctcttggatccgcgaaatgcagcaagcttcacacaaatcaataatcattagcgaaattttggactctaggactagaaatctagtatcagtgtcgagaatcagcgattatgtattgtcaaatgagctcgtaagtatggcgctagcaatggttgctgaagacaagcaaatcaatcgagtactcgaggaacttttcgcagagcaggtatcattttcttcttctggtactcaaatagtacaataagtctttctctctagatttctaaattaaaaaaagttttctttacttgattattaaaagtcgcgatgagacaatatgtatatgtaaagttaggaagagacttaggtacataactgtagttagactgatttgttcatcaaaggtttcagtaaactaaaaaatccacacttctctttcaactaaactttaagtccaaattatccaatcaatctatattttaataaaacaataaaagttaatataagcgcaaataaagaatctaacatttataacttacttgttgttggattctattatgcagggaaacgaaatgtgtataaaaccagcagaattctacttattcgatcaagaagaactttgcttttacgaaatcatgattagagcgcgacaaaggtgtgaaatcgttatcggttatcgccttgctaacacagaatgtgctataattaatccatcagagaaatcaaaaccaagaaaatggtcccatgatgatgtttttgttgttatagcctctgaagactgatgatgagggtgttctagaactaaaactaatcttatggtgtttttgacccaattgaccattctttcactttcatcttattatagtttcaccaactatatatataaatatataaagttatatagcacaagatttgtagattgttgtctgatgtgattattgtaactctattaattaaaataggctgagattagagtttagtcaactagaaaggactaaacatgttgtatcaatatttatacaatttattacatgaataatatttataaatattggaaattaattcccttaattgtaaactcttttttaaggattcaaatatttatatccttgttgtgtttcagctctattatttattctctttgtttgggtgatatagggtataaatattgaaaccttataataaaaattgaaaaactttaacatcaaggccttaaattggataaaagttaataatgtttcgttgacatgaattgtt

SEQ ID NO: 16554 - DNA, 6956 bp, Cannabis sativa
ttgggtttcgtttacttttgactcttttggactgtgattcttgggtttgtatttgcaaatttttaatcttgtgattgtttgaggaactgcttttggtgaattgggattattttgatgtgggtttcggggtctgggtttggatttggacacatttacaggttacgagtatagagaataaatcagaagcttccactagagatcttaacaaactgtagtagcattgtgcagctgaattggtgtataaatatgtgtaagtgatggtgaaattggtaggtgatgtgtaaagcatacagggtgctttgtctgttacataaaagacattatgattgagaggcttgttttcggtttttgaaatcgaacttttgttggtgaatctgatattggcatttggcaagttcttaatagcggaaggaaatggaccgagtgatgcagccaccactggtaaaattcttgtctttcttgttgactagatattcagttttttatcacatattatctctatccctcttttggtttatgaatgtttggcccatacaatttgagcttgttggatgcttatttaattgtcaaagtatgcatatcttaaaattgtcaaaattcattttctcgggtaacttagttagacacttatcagagctaagctaattaacttaaagagtcttaaacgtgaaaaatgcattttctgttagtattattttgccattttagcttttctctccagcttaataatgctaaactcttctcaatgaaaagttagttgagagcagacaaagatgaaccaacttgtcagcttttcttctgaacaagggagtaaattatatcttgtcatgtcgtatgtgggtgacaacaactgtggcatgaaaaataatgaagttattatattatgaatggtgtggtattgtagtctgtgtttgttcaatgaatcttttgagcaagaaaacacttgatgcgtctagtcatggttttttccttaacaattattagtaccatattaggatttatgattgaaatagtatcaaaagattgaaaaagaataattatttaattacagatggtatgatgttcctactagttaaaattgaaaccattttaagtggcttttgttttcattgctaaatcacagtatgtttcctgggattaatttaagtacatttcttgctcagtgcaaagctgggtggagtggaagaatcatgtccacgacatttatgctatttcttgttatattgttcattgcaatggtttttttctttgacaaagtcacgtactgttaaagttttatcagtacacctaaccaactgtgcttacacgctacttttttttttccttctttttcttacacgctacttgctatgtgttcttgcttcaaatctagacaaactttgtttgaggggatgttgtttaatttttatacatgcgtgtaccttgcaggttgatacaacagcatgtttatgtagagtagatgccggacttaaaactgttgctggagcaaaaaggtatgttcctgggtcaaggctctgtcttcagcctgatattaaaccatctatacatccaacaagaagtaagccggcgcgcggtgataggagtaggaaccaatcacctttgcttcctggacttcccgatgatcttgccattgcttgtctaatacgggtcccaagggccgagcaccgtaaacttcgcctagtctgcaaaagatggtatcgtcttatggttggtaacttcttttactcccttcggaaaaaccttggccttgcagaagaatggatatatatcattaaaagagaccgagatggaaaaatctcatggcatgccttcgaccctatataccagctttggcagccccttccaccagtcccaaaggaatattctgatgctctcgggtttggttgtgctgtactcagtggttgtcatctctatttgtttggtgggaaagaccctaagaagggatcaatgaggcgagtcatattttataatgctagaaccaataaatggcaccgtgccccagatatgctccgtcgaagacatttttttggctcatgtgttataaacaattgcctttatgttgctggtggggagaatgaagggattcataggtccttgagatcagcagaagtttatgatcccaacaagaacagatggaccttcatttcagatatgagcactgcaatggtacctttcattggggttgtatacgaagggaaatggtacctgaaggggctgggctctcatcgtcaagttctgagtgaggtctaccaacctgaaaacaacagttggtaccctgtgtacgacggaatggtcgcaggttggaggaatcctagtgcttctttaaatggaaacctctacgccttggaatgcaaggatggctgcaaacttcgagtttacgacgaagtaactgattcttggagcaaacacattgacagtaagatgcatttggggaattctcaggcattggaggcagctgctcttgttcccttaaatggtaaattgggcatcattcgaaataacatgagcatatccttggtggacgtttcaaaatccaacgatgtagatggagctactgcagaacatttatgggaaaatatagcaggaaaaggtcaattcaagactttggtcacaaatctgtggtcaagccttgctggtaggaaccgcttgaggagtcacatagttcactgccagatccttcaagcttgaaaatagatttgtaaattaaattatatcataatcaaacttaagtttttttttggttttctatctaaataccatatgatgcgatgagctataatatacataggaagctaaaagcttgccaaggtacccaaagaaagaaaaagaaaaagagtatatagttcgcccacttgtgccttgagaatcaatactagttagataggtgaggttgtttgtttcactttctgtgtacctgtcttgtcacatatattttactaaatgatacacaacgttagttatgcactaaattttgattttttttgaagtaggggaaagaataaccaaccagcttaaaacatatttatgaacatgttttgggaaaaatctaaaaaaaaaaaaataaaaaaaaaaaaaaaaaaaacaattcagtactctacaccattacttgcaaagtaataaagaaaagagcacattcaagtgaataaatttcagtttatcgcactgatatgaaattggacactcaacccaccacgcagtactgttaggattttaagctggtaatctactgacccctaaatttggtaattattttatcatatggcaatagactcggcatccttgaacaccaattattagtgtatcattcttggtctttacatggttgaatcacaaaaaaatattacacaaccaaaaaatcaaactacaaagaaacaagaaaacttctttaagaagtcacattctctcattgcctgttaagtaagattttgggctttcccagatcctaattctgatcctgagacgtatgatctcgctagcgtgaagcaattttccttctgccttttgtattcattgtatcgcaagaagaaataattaaggtattcaaaatcgattggggatatctttgcctgcagatcatattacatatgtatatgcatatatatacccgagttattttcttgatagttttgaaggttatgaataatagaatgggtgtgttgcgtacctgaattatgccccataaagcccaatataagtgtgaagccaacatgtaagtatttgtctcaacgtacagagcatcaagatccctctcagatacctgttatttaggttagtagagatattagccttcaatggtttttaacatgaattttttgaagacagttcaagtttgagaaagctcttttaacatacctcaagtggattttcgggttgtagatagtgtctgaagaaatgatattgttcatctttacttggatatctgcaatttacgattgacatcagtgatttgagtaatgagtatcaacaaaccggaaagtagctgttctacaaaatatttaagggaatatgataaagaattagaaaatagaaaataaaaacaaaaacatacaagctgtactcgcattcatagcctgcatattcgttgaagtgatttccaatgtcaaagcctctgtagttgtaggatccatactcaaaatcaatgaagtaaagtttctctgaacaaggaacagaatgcgaagtagtaagtagattggaaaagcggaaaacaataccggtaagaaaaattaacattatttactttagcaagctatttcatttgccacaatcatcgtcatcatgtctagttcaagcaagctatgcatagtttcgggtagttaaaaaaagcacatttagaaaccaaaagattgatatttgctaaagaaccacaggagtcaataaaaagtaccacagaaaaaaaaaatccatggaataccttcttcatcgttcatcattatatttccagaaagcaagtcattgtgggcaaacaccactggagcattaaaacggtctgtcagatcctgtttcattattatggaaaacatgtaaatacatatgaaatccttagaacccttgctcctcgttagaaaatcagaaaatattaactatagaccagtaagatttaccagagcaaataaaaatatacaattccttcgtccatcaccaccagacattgttcagaacatttaggctgctggctccaaacaacaacaatttaatgctgaagaaaaattcacttcataaggctaacataattctaactaagctggatattaattgaattttatgagggtctttcttaatagctaatttaaattcagcgaaagtaaatccctacttcattaatattatgaattatgatggagaatctcaattggtgataggtcatttattaagtgcatgcaaaacatcttctaccttttactctccaagtggtcagaactacaacacaacatggatcgaacctacataatcagaaataaagaaaaagcactcacgatttttgtgaaatactacagacttaaagacttgagtgccgatttacatttaaattccagcacctattctatcacaaacctaagaagcaagtatgccactaagcagctcacagacatgaatgtatgtaggaaagacaactaaaatattggtattaagaaagagccaaatatcctctcagagcgtaaagaaagtgaaaagtaaaacaatgatagaagactaccttgagctcattaatttcattctgaatctcctcaaaagaaacggtcttgtatatcttctgcttcccaatatcatcaaattcaatattggaggctacaagaagaaggcaagaggaccatgagaaaaattgcattcattcgacagataaattatacagcatactacattaaaaaaataaaataatatttatttaaaagaaaacctttctcgaagaacttgaacatgtcattccatagctggggttccttcgaaccaggaatttccacttgatgaaatctgtttaattgtttggctatttcagcggccagctttggcttcctcatgtcttccaagattgaacataataatgtcattaggcaggtcagagataaccatatgactaatgtaaatgtggacagccgaagttcacactccagtaataattaagaatgttactatggtaattgaaaacgttgagatggtatagggtttggaaagagaacacacattaagctggcaaataatctttcaaagaaagagatttcagtacaatcagtacaaaacattaatttaggagacatcaattctcatgagaactatggacaaagcaaagtatggtataaacaattaatgaaattacaagaaatattttgactttagcttgcttgatttaatgtaggttacttctgttcaagcacacttaaggatattgcactcaagtgaaggttcaagattgtttcccacatttccataataagaagtgatattaaacaactaatgcacaatacagacccacaacatgtatcttaactactgaacaatgctggattgattcaccaaaagaaaaattaattaaaatttcccctaaaaagattctcaatagactccacgttatgtaacgtttcttaccttctggaacaagtgttcgtgcatagataaaagactgcaccatgccattgctgaaaactccaagcaaattagcaccaaagcctgctgctgagaggtatttgatggcctaagcacaatttgtgttcaagaaatttcaaagtgagcgtgtgaataaacatcattgtgacatacaaacaagtaaaagtaagatgatgtgaaaggaaaaacagcacaagttagaatatttcatattaagtacaaaaagtaaggtcaaaacttcacatattagtaagaaaggagaaggtttggggtaagtttaaagaaacgcatgcaacaaaatacacaaattaattggtaacatacaaataaggaatactaggctaatatgagagctcaatacttctaattcgaataaaacacaacacaatacatcaaaatcaaatatttggacaagaaccaaacactaaggatgttagttcatacgtatcaaaatcacacaaaaaatatgggaaaaccacctgcaattcacgttcacgattgataacatagtcggtgttaggcccatataacctgactgtgacacacacgttatttccattatcttccttcactgagaccttcaacactgcatgaaatcaacaaccatttcgaactaaattagtaacgcaaatgttatgtccaaaaccaaaatcaaaagcagggtctcacactaatgaaaatgattataccatttaccaaattaagaaaaccactcacagagatttgttatgccaccggaaaccgtctcaacagagaagcaagaattatcaagattagaccattttttgaacaaatctttgcacaactctctgaaaccaattcaatcaaatttgtcaatatggagagagagagagaga

SEQ ID NO: 16555 - DNA, 4916 bp, Cannabis sativa
tttcacacacgtataaaataaaaaagtcacgcgtgcaacagacactttgaacactgttttcgacgtgttaaattttttcgaatttttcaaaattttattaaatgccataaataaatataatgtatacgacataaaaaaaattagactaagtattttttttgaaataccaaaatagaattaagtgcatcaatacacccattttaagagggtgtattagaaaattttccaataaaaaaagaattttgagtacttttctatttttattaacaaaaacaaattaataataatgtgtgtgtgtgtgtaaagcatagtccatcgatcttgactaatgtaagggtgaaataaagagatgtggctaagcaaagttcacaccgtccaaacaaaaataatctgcaacatgtcaagatgattcgtcatgcatggacggttgaagtttagggatacattgtaaatttatttatttatttatttttgaagaaaagatcttaatcatcaaacaccaaaagcaataagtactctaataaaaatgtggggcaaataaaatttattcaaagatcctaaatacaattaggattctgtggccaccaaaccaaactattacttgccatcaaaataagtttggccgaggtatgaacaataccattataagacctattacaataaacaataatactaacaactttgagtctattgcaaagactaagaatatcatccaacactagatgcaaagaaataataaaagagacattttttttttaattttcagcacaacactcgaacaattagattcaataatgatattgtcatacccaaaagagagacattgggacaaaacctttctaatagccaacgcttcaaccacctcgagcacgaaacaaccatccaaacgccaacttgctgaagcgcaacaacacctgaatcatctctaataaccatatccaacccattacaattactcgtagaacttagagccgcatcagtgttgactttgagactaccaagtggaggggcagtcaccaccagcaagggaggatgagtaacagtcttcagacccctgtctgttgtgaaacgttgccaaaaaatcatgagcccaatgaacagtgagagcaggagacaaatcaacactattatggaccattttattacacttgaccaaatcttccacttgatcactataaccaattcaatcatctctttcgaaagtggatcaataaatcgatgaataaagtcaagaaaatccacacaataaacaagaggatctcccaatgcaaactcatagattttcttacattgaagcagagaactacaaccccaaagagcatgataagtagtttcatcttccaacccacacaaaggatataacccatcagataagagatcatgacgagccaaattagttaatacgtacaacgctgataagtatttcaaccacttcaaacttatatgtgttggaaagatcttataataattagccaccctttgaaaataagggtggagggaaagtatggcgccctgctcggcatggggtctagacaatgcacactggatcgttgaaaagacccttagcacaaaggttctttaatcacttgtcagttagtttggacaaaggggatttctagataggccttggtttagaagacttcaaggagatcaataatgccttgtcaaactcttccttgacatagtctcccctaggcacaagtcaccgtctagagggcaacaaaggttcaccttttgcatcatatcccttattgattacaagaggcccaacctcaatgtcaatctctatctcctccttagagggctcgtgcacctctggctcatttggctctacagtagccatgagttggctgatgtgtgggtctttggccggtatggtccttgtggtttgttttgtctttgctaggtttaacttgggcgggagaagaggttttgaggtatgtcttgctactgtaattgttaaatctacctagatggattttctccttaataaagttgggtggccagaagaaaagtgtctaggacgtctggtaggactctataagtccaccaagatggaagaaattgcctctaacctctatgcaactcccaaatatgatgtgtgtgtccttatctgccgatctggtcaggataatgatggtgttgaaactcaggttccaaagaatcacttggtacttccaactcggagaaatccaaggaaagggataattcacttgaagacaagggcgagtttgtcacacggatcgttgggctatcttcaaatagtaattggagcaggtcatagtctactcgattatcacctccccagaatttggttgggttcatctacaaaaaaaggacatagaggtgagtcactgaatagatgggaaattctttttaagaagaaacatcctaaaactccgaccagagaaaggaaagagatctaacttaaataaatccgtatcatcgatagaatccttgggtaaatagattttaggtatctataaaactaaagtaaaaaggaagaaaccctaaaatccttgaaaaacagtgcaagagaacgggatgaagaaaatacacatatgaagactcaacacggattgaatcgaccttgatagtttgggttcgttttaatcaactaaggttgagaatttgaattttacagtaaataatggcaagcatacattctagtacggttcacagaacaacaaacgagaaattgtagaagtgtaagggagaatgacttactcactgctttgttggctggttgaagcttttcaccgaggacggtccaattacggttgaacaaggccaatcgctcaacaacaacactcttttcttactctaaatttttttaaatggttaaaaaattgtaaacgactgtctttgatcctatttatagggtcaccaagggggtatgatcgtaatcaaattcaaaatatcatgtttccccctaatattgaaaaattaatcattacaagggtttgggtaactatcagtgcgcaatctccaaggtgtggtttccatagtaaagcaattaatgcagagatttgaaaggacggggggagatttgcatacctcaggtaggaataatgtctccttcgttcaagcacatgggtataaatgagtgtcacctagtcatgtagtgtgtaggcataggaagtccccgtatgaccagaagttcccacgcggatttggaggaaaaatattatcccaaaatttgtactaatggcgtgacaccaggaaagctaacacgtggcaaggaaactgaccctgggtggaatacaacaccaatttttaacgactaggccagatgataccaaaacactcgaatgagctcaaggcttcaccttgcgctgagcaaagtgagctacttgcgtaacacaagttgtcgattagaggaatcgctgaagatattttagatactttccttaactgtttccataaaaataggaccaatataagattcctattttcatgggatttaacttaacataatgagaaaattgtgagattcacattcaaatccacactgatctttctcctattatttcaggattaaatgtattccttcttccctataaatagtaaggccaattcattatttagaaggattttcttttgacgcacttacaatagagaaaatactctgaaaatattgtaacatttttgagagatattaagaaactcacttgattgaaccttgtgatcttaatattctttcataatcaatacaacaaaaaggtgagtaggttgttaccgttgaaaggggttgaaccttatataaattttgtgtgtcgtttacagttattcataatttttattattattcaaacaattatattatcattttattgacttcgtgtcgttgactagaaacgagactaacaataacatataaaaaaggaacggtgatggtgcagctacattatacactaaatatatactataattgcacaattttacattacatcatacttcaacttttctattttcttactattgtttctttaaataatatatataaataatacatattaataaaattagaataaaatataatttaagtactattaaaatatttttagagaatgaatagattcttcaaatattgaaaagagtttgaagaaaatggagatcttttaaaatagagaatccatttatatcatctctttgatgatgactttttcaccgttcttttaattttgtttaagaatcgctattttaaaggaagcattattacgaggtatccatagtgcctagtactatggtgaagtagcaaattataatttttttttttttgttaaggaaatatcacaccataattggttagtaattttttataatatttattaaagtaaaataagtgagactcgaattgcgatattacacctcacaactaggtaccataagtactctttaacatttctcttttaaaggacttatagggagtgtttttttttttttttttgaataaaagatgtaaatttattaaatcatctcttgagcaattacattaagaatgctactcgtgatagaagtcaccgagtagctacaatccgcttgcaatcatcaatacaattgtcaaaaggagagatccaattgatcgagctttgaataggttgtacagtgatgagactatccgtttcaacaatcacattggaaagatttagcatctttagccaacttaggacctccttcactctaatggcctcaacaagattcggatcaacacaaccaacccaagaccccgaccgagcttgtaacacatgacatacatgacatacttgacatacttttcctcttagtatattaaaaataaaattttaaaataataattaaaaaaatcactaaaaagcatgacatacttgaacaaatgagaaaagacgcggattagtttgttgcgagtttacgacactaacttggtggcatatttc

SEQ ID NO: 16556 - DNA, 13795 bp, Cannabis sativa
attgctatcctcattattttgcatttcattgcaattgaaattataaatattcatgaaaacatcaaattaaattattgtaagctttacaacaaccaaaaaaaatgaaagaaaaacacacattgaattccaggtaaatatagattacaatatcccaatttttctgactcaaatttaaatagaaaataagatggaatttctggttgtcacttgtcagtattagtgtaaggcaaggataactgaaagtagacaaaagtcaagagacttgagtgttcatccacattcagcaagcagtataaataattgttcatctgttatagctcccatctccattgctctttctagggaacttaggccaccgccatctttgatcgatggtcgggctcctctgcataagtactatgtcagtatattctattactaaagcatcaattcatgcaaaacagaagtgagactttagtttttctcttcttttctttaatcatattctattaaatgtcatgggaaaaagcaatgaaaagtacaatatttttcccactgacaagaggaagattattaccttttaaggagaaactttgccaaagaatttttcccactggccacgcagtgatgcaaaggagttcttccgtggaagtcccgcagatttatgttggcaccaaattgcaataataattcaatcataagcagattctcacaatggcaggccaaatgcaatagtgaacaaccttgaagacagttccctggctcgttggagtccttcattctatcacaggttcctggatcaacgtgtttctttttagttgtcttacctcctaactcggtttcttgtgcaccgacatggtgatgtaaatcaacaggaaagacatcatcaaatgtagtatttgtgatattcatgtctgacatcacaatgagtctgtagacttcttttaagttattactcttaactgattcccagattcttgaggcaagagcagcaggcatttcagcaacggattcatctctaatcaccattaatttctctacatactgggacaagtaattcttcatgttaaccatctcagtcagatatattaatttaatatctacatacgaagtccagttatttgctagactcatggcattttttaaaaaaagaaggctacaatgcatgtatatagatatatatattttttaaattaacttgtgtcatttcttatcaaattaaacaatatccaatgacagagcagaagtgttatttatcttttgcacaaagcaacatcaaatatgccacaaataaaagtgtaatttttatcatagggttgaggaaaataattaatcaatgttctaccttagcttgaataaatttttccttcaggtgaaaggcatccttggggcatggttttgaaatggatgtgatcagagcatttgagtcatccgttctggcatcagtttttcacattcatcaagaatcaagataaattataaaaataatatttcctaataaacattttttgctgaatatttattactaggaaatatatttgtttaagacgtgtgcaggcataacataaatatatttgtataaactgtaaagaggtgtcactatatttattattcacataagctagagagtattgtataaatttccactagggaaaaaaggggtgtcaaaatataaaccagccaagaattagactggaaaaaaaatgatactactagagatttaacaaagaaaaccagaaataggaatgtgtaagtgtcctaagaggataaaagccctactaaggcaagtttcatactaaaattcaatttttaacttcaaatatggttacattacattcaaatataaattcgaaccggtcatataataaattagtctattcttaagctaaatccaccacacaaattatttacttataatgtgaaacaaaccatgaaatgtttgaagcttatcatccaataaatgaagacataattaaaactaagtcttctgactacttactgtgcattctcaagctggagcaatccctcccatatagagttgcaataagtgttacccaagttgcgaaataaatccaagatagtaggttcccaaaccttgacgtctagttttagagatctcacctgcagtgaattggacataatgttcctctaactgttagctatcaaacttctttttattccaatgatgccttaagtcaatgaaggacttcaacacacacacacacacacacactggttattgcactaaatagcttaaaactgtaaatctatgtaatgctaattgaaaataacagagccaaatgttctagcgtttttaatactagctcgcaaatgaaataaagactggacttgacacgacatgacatgtactattttcaggcttctacatgatggtatccaggtcaatctttattaaaaggatttgtgtagttatgagttatgtaaaacccttaataaggccatatatttcatacacagaatttatttccagatccagtatcagatgagtgtttttagccaccacaggtactgcactcaatacttacgaaatcaattttaggcttttatcttatatttctcactttttaaaaagaaaagaaagaaacagaatgattatataaaaagtaatgacaaccataatagactgcatcaagaatccccagactaaaaaccaaaacagcaggaatatcacccttataatacaaacacaaaccccaaaccaattataacaaaagctccaatcttttaatcctatatttcgaaagacacattggattaaatacaatcaaggtgttgataggaagtcctctgccactgctaagattacggtccttagagtacttcctcaatatcccactgctgctatccttcctgaaatctagactatcctaactgaaattgacaaatttgcagcccagtacgtgaaaaaggacagcatacaactaaaggctaaattttttgtttagatctgccttatacgtagtcaatagattttcaaaacctcataggaatgaaaaaagtaaaaaagactgaatttgaaagactgcagcatatattaagcaagcttgatttacacaatggttcattcagcagaattgttaaaacttctgatgaaaaaacttgtgagctccagaaaaataaacaacctcccaatccaaatattttaaaattacaaagtcaggaggtgacacaattaaaatcccacagttaaattatatggtagtcgtgaaatttttaccaatattttttaggttaataagatgctgaaaattaagacaaataagttctggattcaatctattttcatacaaactgaaaagtattttctttcatacctttgaaatatgaactccgaaatttcggtgaacgccagagcactcaatgcataataatacaccaagattaagagaagcccagtcaggctcaggagcactgcactctgcacaaagatcatttccagggactgctctaagaatactagagacgcactctattctgtttgagtttatgtcatcctccaagttttgatggcctcctaatgtttgaacatcacatgaagcaccacgagctgatgacttattattctcaagaattgtggcaacatgtctcggctgcagaagatcctcactagtcaatattgtatggcttgcaacacatcttaataataagtcatgcaagaaagggaaaatagtttttaaggagtacaacctggtcaaaaatctgtgaattcaaaagagacgaaatagctcctgttattttgtttatccagtccattctatctgcatcattttcagcctgggcaaatgagaagaaagaaaaacttaagtcaggagctcaacctctcagacctacagcctattgatacatagttgtcctcatatgtcactactgccttaaatttagttagtcatgtacacaatttgtcagaaacaaacaaaaagaagccaataaccagcaaacttacctgtaatgtgtaagttttcacgggagatattattctaaagcaaagacgtagatctgaatcatctgcatctatctttattgttgaggtacgtagatcaactgtacgacagcccagaacatcttcattgagtgaggctgctctgttgtgctttgagcggaatataccaaacataccgctggtaggttcagctgaacgagtataatggtgtgaatgggagccctatgatagtgcagatcaagggataagaaggatcaggagtctgctacaacaagtcagcaataataattcaaaattaacttgcatttcaaatagtttgttaaaactgacagacagataatatgatatcggaatttagacgaagaaaaggaaaatttatgttgtaagtacctaactagtactcatgagtcatgatataggataagaccctaaagattgaaatattggaaacataatagaatgtatggcagctaatcctaacaaggaacaagtacccaataatagaaaaaggtacaaatactagtgagcaagatgccccttgaatggttactaaaatgaagcccaatcccttcgaaattctgcaaacaaaaacttttgatatcttttgcataaatatctacaacccataaagcaacctaaaattttcatcccaaaggtaaacatacatttggcatgagacggttgactattgaataagataagttgtttaaggtaacaagtgcattaaagttagaacctgtaaatgaaccaacaaataggagttattagtaagttgaaaaggttaaagacagacattttgtcataatggtgaaaaatctgtttatcttgtggcttggaaggaggtttgtcgttctaaatccaaaggagatttgggcactaggaacttgcctttacagaacaaggctatgattttgagtaattatgaagattcgtcaagaaaagtatgctttgtggaacactgtgatttggagtaaatattgggtgaacatgtgagatttgaataatcagaacttttcatcccctgttttcctaagtttttctagtatttaataatagtttatatttctgatatcaagtaatagttttgtttcttataaaacaaaatcaacataaacaaaatgcttcttttcgaacttggagggattaagagaaaaatggccaacaaaggcataccaagaaatctgtgtgcaacaaccgaaaaatggccaacaaaggcatacgcaagtatgttgactttgacttgcagtgagctatcaactacagtctacagcagcatattcttctagacatggaactttttctagcctcaatagtaattgctaaaatcaagacaaaattggtagaaactataaatttttgtagtacaacataccaaaggttttgtacccttaattctgtaataaaatagagttccttgactgttaagtacaaagaatctcctcttccagtctccccttagactagaggaacgcttcaacagatagccttgctttatcgtcaggacctaatagaattgaaaaaatagattatgcaatgacaattctaacaaaattatactttttatttatttataagaaataaaaactttctagttgtatgaataatcgaaagaggaaaaattaaaagaaaaaaaaatgataaggtaaacaaaaatacaacctaaaaataaaagtaaagaaacgaacgaaagaaattaagtcctactaaacagtatttctctggcccaataatatctaatctggtcttttattcatagaatcagagctcaatgatacaatatttatgagactatcaagtgaagaataattgattgaatatttcatattttactagaaaaatctctttgtaaaaaacatgtagaactgaagtagtactacagacgtgagaagaaactcctaaaccaataaacttacctccccatttgcgttggacggcacaactgcctctatacttttgtaagagtccatgccaataacacgaatgccatcaagaggtgtggaaggttctatgttactggatgctcgtaaagtgtccagctcagcttgtgtcctgaattcctgaattcttttggcaagtttatcttgttccacttttgcctgttctttagattgttgcgcatatgtcaatacctgatttcaggaaaagtaaaaaccattttaattggaactgggtttagtaagccaaagtttataacctacccaaatgataacaataaaaacatattcaagcaagcagagtagttcttcctggaaaaggcagacagttacttggactaattacattttttttttttaagtattcaataatgaaacaaaaactgttagaatgtgagagagtttatggaggcatggaagaaaaatgctggcaaaagtaaatgctgaagagaagaatgtcaattgcatgaagaagttcatgctaggacaagacagtacaaaatttattttttggccttctaatcgcaatgactgactaactatgcaagacagtgcaaaggtgacatgcacgagtgaccttctcccaaatatattgagagtcctcgcttatggcagagggaggccgtggttacaaacaccgacaaattactgaacaaactttgtacaaaaacagaaacgaaaactatttacagcacagtcacatgtagactattattccttattttacagtaatagcagtagctgatgggaaatttatttatttactgggtggaacagttaattgaaagtatacctgatgaatatatggttccatttggctcaataagtcataaccctgaagcacataaaaatttatcttcagtttgaaatgaaaagtttgctcacatttaacgaacggaggttacaattaataagtacacaaacgaaccagcttaaaatatctaaggtgggcatccataattgcactaacagattccaagaattcgtatttcttcttcgcttcaatattcattaatgaatttacctgcagtccttaaaatcactgagagtaaattacaacttacaaatagaaagatgtactgaaagctaacaggcaaagaatagacacgcaaatgaataagacatactagattgaagcggcttttctcaaattctgatttggaattttctagatcctgtcacaaagaacggatggtgaggttgtcaaatagcaacaagacatcttgacaaaatcatctagtgaaaatttacctgtttttttatagatagcaagagatatactatgcttacaacttaaatctgagataattcgttttccctacttcttggtaataaaaaagctctacaaaattacagagtacataatgaaatatattcgttgatgtgattctttttatgttataagtggaagtacatgaatgtcactccaagatattaaaacttatgccaaaaatttaaccaaaaaaaaaatgaaaaatgaggagcaatggagcttatatgaaagcaattgcagcaagtaatttgctgtaatttgaaataaccaagaaagaactttctgttgaaaaacagacaccaaagtgattctacaacttcattcctggtagagttttagaattgtgagggattgtttcctagaaatcttgtagtttccttattttattgtctctaatttctcaattgtttttcccttttctcataagagttgtctgtatactttctaaactttttctggaatggtactttctccccatgttctcaatatgatatcatcagagatgtttgttctgtgatactagaatctgattttctttccttctttttattttttgttagaacacaagttagactagccaagtggtgaaaccaagaacatcagcatgaaaagctagcttagaatatcagcatggaaacacatggaaacaaaagcttcataacatcaaatttttttttttttttttgcaatgatcttaacaccaaatattaatgacattctatgtatacaaaagatactaatgaaatattataccaaaaagactggtatacaacatttacaacatttactcgtatacctcctctagttcagcaacaacatcatcccgagtgttcttctttaatgatacaaacctttctcgtgcctgacaacagataaaaaaactacttagctttgaaaaacaattgaaagcaatcatacaagatatcaggaagaaatatgcattcaactgtatatgagcataaagagcaatatcgaccatataacacttcaaaagagctatatcctcttttttttttttcatttttaatgaaataacataggtttcgccatgagagcgagagtgggaagcagggtgaagaaagaacaatcatacaagatatcaatcaggaagaaacatacattcaactgtatgagcataaagagcaatatcgaccatataacactttaaaagagctatatcctcctctctttttttccatttttaatgaaataacataggtttttccatgagagagagaatgggaagaagggagaagaaagaacatcaagaggcctataagtaccaagtacattaattggtcagaagccaaaaactatatctgaactgcctgactcaacactttgcccttcttatttttgcaaatggtaaatgtcctgcccctttctaattactaaacgggtgttgatattgccagtagctgaatctaatagatgttttcatcacaagttattgactaaatattagattttacaagatggtttctgtcatttttaaaaatagaaaataacaccaaagaagtgctgatgtaacccgctggtacacactcagaaaatatagagaaaaagcagtagaaagaacaaacagagagacaaaagaaataggttctgaattgatattgcagataaaagagaattacagtgacaaggaccttaggcatttgagaggcctagattctccatgatgcagagagagaaatactcttataccctcctctactaatcctggggtctaacatgtgcaggggtaactaacagtgacatatctcaacatgcaaatgacacaataaattcccatgtactcatattttacagtcattgtcattatactttacagacattgtcatcatacttccctgcgtattacaatctaagagcaagttaactagtggggaaagttttattaccatataagttcaagtacctggtcataaacatgtatagatttatcaaagcgtcgtcgggattcctacaaaattaagcaatgagcgcatgaggagataaaaatcaaaagaagagaaagcaaaatatccttctaagaaacaggactgaagaaagtaggatcatttaacagtaagccttccaaaaataaacttcaaataatataataaattgtgaataataagcttaagctattggctattttaaataacttgtctaatactaagaaaagaacaaaaagaactcgccattattcttcttccagcttcataaaaaccatgcttaaatgttaagagtattcaccaaacattcatttactttattctaaaaaaaattcaacaattccaaacgaaaactcaagtagcaaaagttgttttgaaatcctacaaagtgcatctgaagattgaaaaccaattacttttataaacattttttcacaaaatatttctttgtctagcagaaaacgttacaacgaaaactgtaaagataatcgctaatttcttagtagcaaaaatcattgtcgagagaagaaataataaatatacctttgcttcttgcagatctactgtcataaaattcgtcaaacggtcgattaaaacatgctcaacctgtaacacaatatttttgacagaacaatttaaatatttcaatcgaaattcagataattaggagagttccactctcttctgtggcacacaatgacttccattttactttaaggatgtggagaaatgcatttgaatccacaaatgattattgtgttggcttagcattcaaatttccattgacttgctcaataaattaaaaggataaagcaagccattatgcacatcaacaaaagaaaaataaaattcctcaccaaatgagagaaaaatggtaaaataaagaaatgaaaggtctccaactaaactaaataaaagccatattaaaatatacatatatatatatatattaatatctttgaaattcttgtcaaaaaataaaagaagattactgcacttgaaagatgaaagtcaatttgcttaatttaaaggatgttttagtttcctctttttttttctttttttttattagaggacatctaattctcaatttctttggttcaagactttttaattctctttccacaataaatatatttttttcctattctataaaataatactgtcattgtgatcctatattaaacaaaaagtgcaaaagcaagccctttagcgtttatgtatattttcttggatcattttcattacttatgacttaggactcacttgagaacgaagaagctctttgtaagtagcaagctcatgaaatgcagaaatgaatttggacatcacaggacctgaaacaaataaacgacataaatttcattacacatcctcggactcaaatattgtaagcttacaaaatagactaattatttatatgttatcaaactattattacaacaagtacctggctttttaaatagtaagcaacaactttgccaccagcacgaaacattgataagacggatatgattcaaatgtaaaaatttgctcactttaatacaagttaacttttcaatgtattagaacgtattatgatgactactgagagcgaccgctaaaataaaattgtgttgaaaactcagctctctaccctcccttgtagaatttgtataggttgattacatgacatgcacataggcaatgtagattaagtttttttagtgttgcgtgtttagtaggcagctttatgtttgatcaaaagtgtattctcttcctataagaagcagcatatttaccctaagtgataattttaaaaaaagaaataaatctggagcataaatttagttaaaagcaacctcctatagatacgctgacaggatcatcagttcctcctccaaatgcttccagagactcagcaaacacagtatcaccattgtatgcttctccaagagctgccctgtaaaaaggcaataacaagagttataaatctgggtctgcactgtcttgaaatttcaacacaaaatttcaaccactaaataaatttctttggagggaaaatttaaaaggtagagaaaatagtatgccatacattcttacccacctaagttctaggtaataatgttttttcctttccgtattggtaatgttacattttgaaagaaataatagaattttcttaagatgaagagagggggatataaagttgttccaggaaacagcaaatattgagtagcattatggctttttggtaagagttgaaggaaattttgtttttgttatcttaaatgagtgggggggaatgttgtggtaattatgaggaaaccctgtcttcttattgaagtactattttctctatataataaaatcatctgtttctttagctgctgcataaaaaaaaaataaaaaaatagtatactgtgttcctctgacaataaattataaagaaaagaaatgcttaagacttcaattaaaatcatcaaaagtttaatgtatttaagtcagggtactttagatattctgtagacagatcaaatgtaatgctacttagtaaaagaccttattgttataattttagtttattttaactacctatttgaggagtcgacataaggttattgaaaataattcccattaaagattattgaaacctaagcctgtacattttctccaatatttctatttctacgcttcaactccttgaaagagtataaacttcaccctttctactttctgtttcgcaaaaacaaagccatttaaaaatccaaaccaaaaaaagttcgattttattcattggaatttgtctgaaagtaatatccaaacacttacataaacttcttacagcctttaaataatttctggcagcgatctttcaactcatcagctgactgctctatagaacaaacctgtcaaaaaaagcaattggatcatcatttcattaatcagtttccacaaacaccactcaagtaactctacaggttccactgataactgtgttgcagagccttgaaatctcaacaactcaacacactacacaggatgtataaatcttgtatcaaataacactaattcgaaaaattaagaatgaaaattaatggtcttgtttgatacattatctcaaatgtggattgcctatgcttcattatctaaactgaattcattaacatattatacatacaaatcacagtccaatgattcaaacaacaagaatttcaatgttcatccaaataaaaaaaacaatagtttcatttcatcgaataaaatcatataaatgcattgaaatccgctcagtgaagctcaggatacgaagaaaaagatatggcaacgaaatccagtggagattaacgatgaatgggatagtaattacctgattctgaaacataggggaatcgtcgagcctgataaaggccgccattgttgggtttctctcaaaaactcaaatccaacaatatttttgctttttgagatccagtgagaaagagagtcggaacataaataaataaaagaggaaagcaaaacaaaaagatttggaggtggagaggggtaaaatgataatttcccttgtacttttgattaaatgacagaaatgaaagtcgtctaactattagctgatgatgagaaagggaggaaagaaaatgacgaaattgccctcaggatgtgatgtctcaacagctctgccacgtcgatatagatgatggcaactcatgtcactctaaaataaacttagcctgtcacacatatcttcacttcacactttcttgaagtaattataaatcatttaagacatatttattgacactttcaattgtgaaaaatataaatttcatcagagagaaaaaaaatgttatacagtgaaaattgtgagtggtgtgtagtaatttttttttactgtcggaacaaaattttacagatgtaacaaaaaggtgaatcagatggtttttatttctaagattaagataattttgagctctttttggtagtgtttggcagttttggtacacaagaaataaattgaaacagatcctaatcctaaaggacactaggtgtttagtacttttgttattggtctaattaaatatcggatctcatttaatttaatataataatttctaaaaaaaattgttagctaatcgcaaaatgatatgtctagaagtgctaggcactactggtgcccaatagtaatgctcttaaaaaaacaacttatcaacatcaaagaaaagccataatgatattaatggtttaactaagggtgtatttgaaagttgctatataattacaagatagtgtaattattaaagtggtaattacacagtctactaattacgttatattttaaaatacaaaatatgtttgggtatgaagtggtaattaaatatgggtaaatactattttaaattctgtaatttgcaaaaattacaaattggatcctctattttgttaaatgagaaaattgacctatcttaaaaaaaaaggtttagagatacaagtggcaaacttgaacgactgatggtgtcaagttgtgttgctcacaaaacagaaaaaaaaaaattgagagcttaccgtagtcagggggtccgatgatggtggtatgatttcaggaactaagacggtgggtcgattgtgattcgtatgagggtactctgatcgggctaagtggtgatgcaattctgatgattgtaatcgcaaaaggtaggggtgttcacaaagtatccgatccaatccaatc

SEQ ID NO: 16557 - DNA, 2605 bp, Cannabis sativa
aactttttcttagtttctatttttgcatgaaagagacatgagtaactaatttttgcatttattgtattttgaaacattgcagggtgttttcactggtgaatgtggtacaaagttggatcatggtgtggctgtcgtcgggtatggcacagagaacggtgtggattattggcttgttaggaattcttggggaaccaactggggagaggaaggatatttcaagttagaacgtaacttggttggtacaaagaatggtaaatgtggaattgcaatcgaagcttcttaccccgttaagaatgaaggcgatgatcatacaccgaacaagccttacttggttcgcgaaattgctgctgctgttgctgagatggtagcttctgcttaaatgaaaaccatattgggggtggaatggagaaagaagaaaactaagtatggtggcaaagatgcataaaaaagttgccccttttagttgaaacagtaactagtaactagtaactaataactagtaactggtaactagtaacaagttccaccctttgttcccttataggtctaagagtttacaccagaagaatggctgatctttttggtgccttatttggaatcactatgtttttgtatatagattttaatattccaaaactgcaacacataagaagaagaagaaaaagatgtatagtgttgcagttcattgtcattattatcattgaaattttaacctgattttttacatcagggaaaatctatgcagttaatttaatctatctttcttacctttgttttggagttaatttttcactctaagaaattacaacattttgaatacattgaatattgatttttagaattttcaaattttagaaaaataccatctttttcatattaattggaagaaaatatattttcccatctttactcaaaaggcaaaaagttatgtacttttgtggctttgtgtgatctcatcagtggaccttgtgtgtttgtgtatcttaatagaaattcaaataaacaatatatataattgaaagaaaatatctttgattggttttggactggttcataaaaattgctaccataatcatttaatacaaaaaagtcatgtgatatattatattacttgttcttaatttttggataatcactcttgtaatcgtaatcattaataccaaacacttcaaaatcaattgtcatgtaaggcatttattttgtcattttctttcaagttgaggctcttgaagaagcatttataatatataacaataataaattagactaaatatattttcttaaaaaatttcaacttttgccctccaatttaaaatttttttgaggtttttaaaaaatcccattttgttatgttcttcttaataataattttagaaaaattaacaacctataagaataccaagtcatatttatatttatttagtaaacaagtacatgaatatgctcaatagttaaaacatctttagaggttacatttgcaattttttttttctaagaaaagttacttttttgaaaatttagtaataattttagtcactttctttctaaaagtactataactatggttttttaggatcttttttaaagcttcattattattattattatttatttatttatttattccactaatttaggggtaaatttagagagtggtcccctaaagaaacttattgaggaaatctaaaaggaagagaagagatcaatataaaagcaatacacctcataaaggaaacttagaggtcactagtttttttgcttctaagaaacattttaaataaggtatactaactacattgagatagatattacaattcaaaaaaaaaatgtcaaatcacttttattagataaaaacatatcaataaaggttggaagagcatagtagataaagggggatttattaaacttaccaacttaaataattaataataataataattaatatgaaattttatgaggtataccatccattttttaataccatgtggaaattttattattattcaataataatgtattttaatttgtaatagttttttttgggtggacgagaagttgctggatatggctgtagaaatagaataatttagtgtatggcctacacaataattaaaacaattcaatttattagtattagttttataatatagaagaagctctaatcaaagtatgttgttttctactactactactactactcatgataagttaatattatattataatcgaagtaccatagttgagcttagaacatgtttaaagtcttttttaccatgaaattattaacattggttgtcacaatctattaaagcttattataaagattaaagtacactaaaggtaaatgtctattatatttctaattcaaaaaaaaatttgatccaaaattgaatttagggtatcattatgttggtttttgcaaaatacaaactccaaattttcatttaataaaacaaaagaatcaattagtaacttctataaaatacaagatataaaaacatatttaacttttaattttataaataaattaaaaataaaagaagaagaaaggtccataagagaataaaccatcaaggtaagtatagaatagaacaatatataccta

SEQ ID NO: 16558 - DNA, 3242 bp, Cannabis sativa
aaaaaaaaaaaaaaaaactacgctttttctcaaaaaaaaaaatatatatatactaacttatttattttagtaatgaatacacatattttattataaatttaaagatgagtacatatatattgacatatatgtatattagattgatttgtatataaatagagatggaaataaattattattggagattaagaaacaatgattttttttttaataaaatattaaataatatatcattaaaaaaaacaaccgatccaattttgcggattggatttaaactattatgtggatcggattggatccaaaatatgaaatccgcatttagtgcggattagatgttgtttgaccaaaaaagtacggattggatgggataaatactcctatttggagttaataatgtgaatcaatttggctagaagttgccttggctagtggaattgaaagttaatcgatgccttgtctaatcccgctttgctcaattattcggaaatttgaatatttgtgtttctggttttcacacgggtgtcagtgttttagcattgattattgctagtgccacactgccagttatgattatgcgtttttatgtattgagatgctcgaatcatgttggactagaataatgtttcatatttgagcaaatacaagtttgaaaatggccaatagtctcatatggaaacttttcaaaagtgttgtttgatacataccttaatataaattcatgaacatgaagcttcattttaaatgattacagcatgtttaatggcctgtgccaaaatcagggctcatgatctacttgtcgttgaagtgggtctgtcaaatacactttgttggacaggtgtttttacatttgaattattcaacgacttttataacaagaaaatgaaaaaaaaaaataattaaaaaaaaaggtcccatagaatttacatgtggagtggagatgttgggctcatctcaaaccagctaactatcttgacactagagtagcaattttatcaaggtatatcagagacatttgccccatctttttctctactttctggatcaataagaggctctgttaatgcttccttttggttttccactttcctttctctacttttaccccacagaactgagtagagacctagcatgatgagagctgcaccaataatcctgtgcaagggaatgagaagataatttaatatgaaaactttaactggttactactataaaccttgttcatctaaggaaaaaaaaaagaaactactttaaaccacctttcgagcctatatatttatataaacgtttgagttattattttatagtaatctcattcattaaaagaaatttaaaatgttctgcataccccccagcatataactgatccttgagaattagagctgccataatagccactaaaagcgtctgcagaggctggaacacagcaacaaatacagggccacctttctggatacaccatgtctgaagggctataactacagctgaagatataatcccctgaggaaagaaaaaggaattggaagtttgaacaaaaccacaaaaataatatgcacatatatatatatgtggatatcataatcacataaagggaatatagtttacagaagtaatagtaatactacttacagcatataaaattgtaagcacttcttcagccgattgaattttccaatgctctaagtctgtttctacaaaagctgctatgatcatgaactggatcaatccgaagaagcacgtgaaagatgtaagtgagagtttcgcaggatacttcttaagcacaggagcctgtaaataaattatttaaacaatatataagttacataagtaggcggtcttcctttttcaaatttgtctataataacttattattttttaaggcgaggcgacgtttgacaagtgagattggattagaaagaaaaaacaaaacgtagagaaatgagtgagttgatcacttcccgacaataataaattagggaaaacaacttggacacaaagccttagcttttaacaaaatgacataataaaacttatctaattgttttgatctaattcactcttcaagtgtgacctagagaacagtaggctaacctgaaagaccatccaacctgcccaagataagcaatgtccaagcaagtatatacagccccatgtccagttctgtgtgttttttggaatctccactgctgatgtattgcgatgtatattctctgcctgatgcaaaagaggagggcctttgtaaagagttataacagtggcacctcctatacttgcaacggttcctaaaattttggccaaaccatctctccttgcgatattaattttctcgattctgccaattttcaattaagtttcagtaaaataactatttacaagttaaagaagaaagacaattatatcaaagctacatttaccttacagctgaagccataacaaaagtgattgcaggaactgagttttgcattgctgaagcaaaagttggagatgcatagtacagtcccaagagataaaaaccttgatttgcagtgattctaataccagaaaaagaaattaataagtatcttcgtagctccatagttaagattattcgcaagaagagaagactataatgttcggttagtgattactgatcttttttctacttacccaatcaatgcaagaagaaaaaactgaactaacaaagggatagtaagtggtggtctttcatttctacaaggaaaggtcaaaaaagaaaacaatgtatcaatacaaacaaagcatattaattcctttttaactgcaaaattataacaatgtaaatgtgaaagaaaataaaaataaaaatgagcaatcaataagagcttacttctctaagaaataagcagtggggcccaataaaagcaaggcaatgatgttcctataaacagggtaaacaaccttgctgacaccaatgttgagtgcaactcttgagacaatgtgaaatcctgaaaagcagagttgaagaacaagcaaagccaaaagaagcttgacattatcagataattcaatcttttttcccattctcctaaccagtctattcttaccacctttcttgtttggatgatttgaactaatgaaattatcacgaactcacattgtttttatagtactggatggaggaggaataattttttaaaaatattacttttaagtatcagtgcatgacttttcaaaaaaaaaaaagaaaaaaagaaaaaaagaaaaaatttaaaaagtatcagtgcatg

SEQ ID NO: 16559 - DNA, 3909 bp, Cannabis sativa
atattcttatccggaattcgatcaaaaacaagccttgcaccattcaagtcaccattcctaatcaacccagataccatagcattccaagaaacgacattcttctccggcattgcatcaaacaagctccacaactcatcaaccctccctagttctgccactccacaaagcatggatgtccaagagaccacatttctctctggcatcacctcaaaaaattgaaaagcttcaaagaatctcctagactgaacatagcccgataacattgcattaaaagtaacaatatttctctcaggcatgatatcgaaaagcccgcgagcttcatcaataaaaccggatttcgagtactttgtgagcaacgaagtccaatgaacaatatttcggcggttaccatctctgtcagacaatttatcgagcagttggcgtgcttcctgaactctatgttgggaaagacattgcaggagtctagtatcgtggagtgagagtttaaagtaatgatggggtttggaaaatggaacctgggttgcattaaagttacgaacttgaaatttgagcgaggttgttgggagagtaaaagagagaatttttagagaaaagagaagcataacagtttataaaatgtaaagaccaaagataatgggaattatataaatgaatgaagcagagaactgaactgggttttggctggaatttgatttgagaggtgatatgataaatcatatattggggagttgattatggcataacaacagctttggttaatagtttccagccttagatgcatttcttattctgcagagcattgtgaaccttgtccaagtaagtaatggacaatgttatcagggaaagtatgatttcgtgtgtgagtgagaatagtttgagttgtatttggtgacatttttggatctaataatattacatgtgtttcgggttcaggtgtatggaatgagttagatgagcagaagctaattgaagatactggttctggcaataccatttataacattacaaagcatacctcttaacatttgggatttgagatattctcttagtggtgcaacctgtaatcagattcttaatgtatacaggatcaaagaatggaagtaaggctggagacaaagttacttaaactgtaattatgtcactacatgatcatagttaaattagatgaaaactaactgaataaaaaattaataaatagttggtatgtatagcataaaattttaaatatttacccaataaatattctgcttaaattttaaaagaagttatttgagcttcagcttcttagtagtagttcttttacaaaattattttgagttaaatgagtataaaattaatattttattataaatacattaaaaataatatatttgacaaaatataacaataatatcaaccgcattttgtttaatatttattttatgtatcactctctattacctatttgaatttataacacataataataccatagccattttctaatttttaataatttacttagttgaagggtttacacatcaaaatcacatactaaaaatatatttataacccatagataaaacttaaataatttataaaagatgtgggacatttaattttaataatctcacagaattttaaaaataaaattaaaaaaaaaaaatctatgatgtcacatttaataagattaagatccccaatgaaagtttgtgaaaggtgaatcaaaagtggtttgatagtggaaaggttggtaaaatttatttctataagagactatttcacatttgaactgtcacctttctataatagcttcatgtttaatctacaattttccatttatcttatacagttgaaagctctttgagctcaaaaaaatataagaaaaaagagtgagacaagcaattgaagtacaccgagaacatgaacatgtattctgatcagccccgccacagattaaagacttataaatttctcctttttatgtttgtgtagttgaattccttatctaaaaatagatgaagatctccattgtaattacttaaagattctcttctctattatccttcttagttttatcttttatttcaatgaattctatcattacaaatatttcacttgttatctatttatagtttaacaataattattttaattaataaaaatcactgctactattctaaatatttatgataaaatagcaacaactagtgacaggtatctagatgcaaagaaaaatgaacaaataatatttctattgataaagttaaatatgtaggcatttaagcctcattttagtaagccaatttatgaagtgttctaatgtaatattttgagtcatattgtgtgaatttacactttgcttcatgttaattcaagttcgagaggtcacagtagaatatggagcaggatcgggatcgaaaggaagctaaaaactcgaaaaatggcaaacttggaatttttggatggctggttgatgagtttcaagctgcaaaagggtacaagccaacagttttctccagtattgaattgattactgaaaaaaagctcagaattttagagcttcagttcagggtacatcaatatgttttttcttcattttcaaataaatttaatagtagggtgcaactttcaaattcctgtctatctatgatcttgttatgaaacagaaactatgaaacaaatcttgttatggattccataaagatgagagattaaacaaatagatgttttcccataacaatgctagaaaagtaaaatatcaacattgttcaatatcacaaaaaatgcattaagaccaaaatctattcgagaggacaaaatatgagacagactattggtttcttgattcaccaccagattacccccctgatcataactcatctatttctatctcctcagttagtttttttgtcctgaaataagtttccaaacaaagcagaatatacctacagaagagaaaaccactcgaccgaaagaaaatgcagacaaaaaccctttacagatctgatgcaaagaaaaatagagatacccaactggcacagcgatgaaacattgggtgtacaaagaatgctcaagaggatgcatcaacaggcacatccactggattgaggttgggattgatttgatgcactcattgacttcagattcacatcaaccatgtcttcttgcttcgttgaggaaagtgtttccattcctggtaaagcagcagcaattttccgaaagagtgcctgaaaaattattcaagtattgtaacgtaatccatatactctcatgagcaaatcaaaatggaaagaggaaattcccaacgtgaggttcacatcactcaattatttaccaagttagtaatatcaatatgaaaaatagtatttgagaagattttcatattatcttatatgccaaccctgggctattttccatatccctttccaaaacatttactgaaaatgtttaactaattcataataaatttcccaccccgatactcccccgaaaaggaaaattagaaaacaatagtacataataattttcagaaatggtttacctttatattaaagccagccttagcactggtttcaataaacatgacattaagatcgcgagctttggcttctccttcttctatagacacttgtctgtgaaatcaggaacagtaaaattataagtattagtgtgtagtactagcgcctttttattgagaagcaaaaaaagaagatttaggccctgcatgatccatagcaatgatgcaaacatgaaagcatatcaaagtagaaagatctataggtcgtaatatgcttcttacatttagtttcttttcctttgatgtttactgtattagcattttgtctttagagcatgtattgaagcgtttaggatatgttgaggcaaatataatcatttcatatttgaatggctcacacaaagtctaca

SEQ ID NO: 16560 - DNA, 6544 bp, Cannabis sativa
aaacccaacacagttttgaagccaggaattttcgagaacgacaatgtcttaaaccagttgagatgtggtgtaagtgaaagtctaatattcttactgatcatttgaaatttgaaatatcaaaatcattatagaaggtgataaattgaaaaatgttacttcgatggatactctactctggcagggtgtactagaggctattaggattagttgtgctgggtatccaacaaaacgaagcttcgatgagtttcttgatcgttttggaatgctgtctccagatgtcctagacgggtaacattacttatgattatttagaatgatccatctttccttatgcatattaagagacacatgctaactcgctgttttactctctgcagatcggatgagaaatcagcatgtatatcaatctgtgacagaatgggattaaagggatatcaggtaagtttactcatcgaatttcatgatatggaaataagcagcaaatttccatatttcttttatttattcattttatatcggttttattttgctggtgttgtaatgattttcatgttgcatggtagattgggaaaacaaaggtatttttaagagctgggcagatggctgaactagatgcaaggagaactgaaattttggctaatgcagcaagacgaatacaaagacaaatccgaacatatcttaccagaaaggagtttatttccctgaaaagatctacaataaatgtgcagaaatattggagaggtgagtactcatatttacatatcattctctcatattcgtctgaagatttgaagaaatataccatgcagctttcacaggaaacttttttagcatcaatagtgagtaggaagttaacaagcggttaagaacatacctgtaaacatctagagatttgttaccttgtatagtagcacttctatgcaaccatatcatcaaagacaatccaatttgtactttaaaagatttccttggacataatagagttattcatttcataccaatataaccaggagagactaatggaacagctaactttactacagatattgccaattctcgaagttattgtctaagatgtattattttcctctgtttacagcacaacttgcacgaaaacagtatgaacaaatgagaagggaagctgcttcaatccgcatacagaaacatcaacgtacccatatggcaagaacattctacacaaaactacaggtgtctgcaattgttatccagactggattacgagcaatggcggctagaaatgatttcaggcataggagaagaaccaaggctgcaactataattcaggtaataattttcaggctaagagcttaaaaagtttatggattatgatattatcattcaataacgactacaaaataaaagagaatttgagatctttgttataaaagtaatgccatatagaattataagggtcttcactctttactataacataatagctttaaactgataattacaactgctccttctttacagacatggtggagaagtcatcatgctctttctacttataaacatcaaaagatcgccactcttgcacttcaatgtctatggagatcaaaggtggcgagaaaggaacttagaaagctcaaaatggtaagattggcttcttccggagtcataatatttagtaattactcactcaatttctgttatcgaaatattatatgtaatgtagctcaatagagaaaaaagaatgcactgcaacagattgaaaaatattctccattgcaggctgcaagagaaacgggtgccctcaaggaagctaaggacaagttggagaagcgtgttgaagagctttcatggagactagaatttgaaaagcatttgagggtaatatactctctctacctaataagcctttaactgaagaatacatgacacagttaccaatccgaattccaagttgttaggctcagtcaggttaaatgttccacgctaattaattgattgcctacatccctcgctgtagagcatacaaaagatacttgcaatatgaattgtcatatttattctttgtcatgatttcataattaccccaaaagttaatgaaaaaaatggctagagaatgacaaatctattataataatatagttccacatacctttgtttcacagattgatcttgaagaagctaaggggcaagaaattgcaaagttacaaagcacattacatgaaatgcaagaaaagttagaagaagcacatactgcaattattcatgagaaagaagcggcaaaattagcaatcgaacaagctccgccagtcataaaggaggtgccagtagtggatgatactaaactagatttgctgagaaaacaaaatcaagaactagaggtagtaaataacaaaaaaagtcactttacactgaaaattcctacttagttaccaaaatgttgacaaaaatgaacacacagacatacacatacacacacgtatttgtgaaacagctttgttatgcacaatgtgatgtggtggcacatgtctaattttacttttgaatacatataggatgagctgagtgaaataaagaagaaatttgaggattttgaggaaaagttttctcaagtggagaaagaaagtgaagaaaggcttaaagaggcagaagaagcacaactgaatgcaaggcaactgcaagagactattgaaaggcatgtactctagaaagagtattttgccaacattttctacaagacattatggttgactaacttataacttttgttactcatcaggcttgaatcaaacttatccaacattgaatctgaaaatcaggtgctgcgccaacaggctcttgttgcttcaaccaacgaagacctgtcagaagagttaaaagagtaagattctacataagtaacacagactatcttatgtgggggaatttcctttagaaatatagattcagtcttacgctttatatttttgtttcagaaatttgttacactgacatgtacagaaaattttactccctctattgcttaattctgaatcatctactttttccagcctcaagagtaaggttgcagaattggaatcagagaacgaaaatcttcggaacaaggctgtagtcattgtggaacaaaaaattgtttcagaaatgccacaaacaccaatcaaggtaaagctgcaaaattttgaatgttgagatatacttaggttttccttgctaatgacattctgtgatggtgcaggttcatgataatgggcatcacacagaggagaaattccaaaacgaaaaggtttatattaaattttttggcaaatattactaaccatacatatctgacatcagtaacctgacacgaagtaaaaattgctgtttcaggaacatgttcctgctttctcacagctaactaaacaaagatctctcactgaccgacaacaggtgtgtaactgaaactaaaattccaggcatattatgcaaacagattagttgtcttctgcatgtcttatcagtaaaagaaactaatctagaaattctgtaaacaggaaagtcaagatatgcttgtgaagtgtctcacagaagataagcaatttgacaagaacaggccggtcgctgcctgtgttgtgtacaaagcactacttcaatggagatcttttgaagcagagaagacaaccatatttgatagaattattcatgcaattcgatcagaaatagaggtaatatatgtcaaacaaaattttatgatttaatttctgcttctgatgtcaatatcacataatgaactgaatggtctaaattgtgataacttgtattgtgctattcaagaaccaagacaacatcaatgaacttgcatattggctttccacaacttctaccctcttgttccttctgcaaactacactcaaggctagcaataatcctaatggtgcttctcatcgtagtcggtcttccccttctacattatttggtagaatggcaaaagtaagtctaaatctacacacgcttgcagtctttggtaacataaaaatggaaactatacagaagttttaacatcactgctaactacataaaattttagggtttccattcatcttcaatgggcatgggtgtttcaaatggctacagcggaatactgggaaagctcggtgagcagcctaaagtagaagccaagtaccctgccttgctatttaagcaacatctaactgcatgtgttgagaaaatctatggaatgatccgtgatcgtttgaagaaggagattagctcattcttgcacttgtgcattcaggtgagcattctatatacacacatatactaactgaataaaatattcatttagctcatgattttgcatctgtatatacttacaagtttaaccattaattatgcaggcaccaagatctataagagcaagaacaattagggggtcatctagaaatattcattcaaacatagtagcaaaacagcaagcatcaaatgtacactggcaaagcattgtcaatgaattagaccaaacattggctattttgtctgagaaccatgtaagtaaaatgtagcttaacttttaagaatcattgttaactaagaaaattatcatgttacacgttaaaattttgccgtgcattaaccttgagcaggttcctaacatgatcacaagaaaaatcttcagtcaagtattctcgttcatcaatgtacagctcttcaacaggtcagcaaaaaatagaatttgaaagaaattttacatgaaattagtcaataaatatccctggatactctctacttactctttttgtaatctgtttctctcttcccatgtagcttgttgctgcgacgagagtgctgctcttttagcaatggcgagtatttgaaggcaggtctcaccgaactggagcattggtgtcttaaagcaactaatgaggtagcttcaagtgctttggcctatctttactttgacaaatgtaatcaatacatacttaactttattgtcataacatgtgatttttatgtctgcagttaacaggatcctcctgggaagaactccaacacataagacaagctgtaggatttttggtaggttctttctaccaaataagccattttcctttttctttttcctcttaaattttcttaatgattcctttgaatagcttcataattacataaaaaagtttccaaaattatgcagcatgaacacttcactaaaatttcattattcaataattcaaatgtttacttagctttcttgttgactaatagtttccatgtaattaatggcaaataattagatattattttctagacggttcacactttccagtttttgcttgagttataattgtattcttcttccatgatcaatgcaggttttacaccagaaaactcaaaagtctttggatgaaattacaaatgaactatgcccggtatttacacaatattagttaattctatttctcatgaggatctttaatgtctcaattaggcttaccattaattaattttttctctcaataattatggtctaatcagatactaagcgtcccacaaatatatagaattggcacaatgttctgggacgataaatatggagctcaaggattatcttcagaggtactttatattctgcaaaatttatgcattaaatttcatactaattatgtccttgtatatgaccttttctcattcaatcaggccattggaaagatgagagtgctaatggcagaagattcaattagcatgcccaataattcgttcttattggatgttgattccaggtattatataatattactgtttaactatactagtaagacactcccttgtggtagtttaagaatataggtcatcatattatcataaatagcagatcaaaaacatcaaaattttttagcgtgaactcacaacacaacttgtgattaaaaagaaaattatctggcaaaacaaaacttttaaaataagaatccaacctttaactgaaaatttgttggtgctttttgtaatactgaatatcttgtgttttttaatcttggtaaaaaaaaattagtccagtcacatgctaggaaggactactacattcagaaatcatagtgttaaatagtgccaatatttaatttttggcttttgactaataaatagcgtcaatatttggggatgtgaaattttgctgattagaattgaacaaaagtctcacattatcatgtgaaaacaattgtgaaacttttacaaagtgacaaaatcatgaatgaggatctttataaaatgtattaatgatctgaatttttgcagtataccattcacgatggaagagatatttagatcgtttggtgaggtgaatgtgagtctaagtgacgtggatccaccaccccttctccgccaaagatccgacttccatttcttattccaacattctgagtaaaacgacttctgttttcgtctactgagtttttcttaccacgcattttgaaaattaaaagaaagaaagaaaaaaaaattatacatgtagtcaaaagtaaatataaagtgggtgacttgtttttcttagcttcaccttctgtttggccttttgtgttttcccttttggttttggttt

SEQ ID NO: 16561 - DNA, 8327 bp, Cannabis sativa
  modified_base (5862)..(5864): a, c, t, g, unknown or other
  modified_base (6279)..(6295): a, c, t, g, unknown or other
taaaataatttccaacacaagcctgccgcggagtacaaagtcaaagaagatattcatttattcgagtagaataaatataatcacacggtgacctcggattacatataacaagacagtcacatcgcaatcttaactcaaataaagagacaggagataccaaatgtacatttcttgggattgagtttcatcacatacctttggagaactgaaaaggctttcttgaggtctgtacaatgctctctggatgtcttagatattaccaacatatcatcgacgtagacctccatatttttctccaattggttcttaaacatcttattgaccattctataataggttgctacatcattcgtcagaccaaatggaatcactttatatcagtatagaccattattcgtctggaagctggtgtgttcctcatcggcaatgtgcatcttgatctggttgcatccatagtaagcgtccatgaagttgagaaaccgataactagatgtggcatctaccatttggtctatctgtgggagagggaagcagtctttgggacatgctttgttgaggtccatgaaattaatgcacatcgtccacgtacaattagccttagggactaaaattgaattttccaaccaaaaagggtacagagcttctcgaaggaagtcattcgtggttaacttatccacttctacttttattgcatccaccctcattggatctaacagtcattgcttttggggaactggcattgcatctttgttgatgttccaggcatggaagatagtgttatgatcaatccctatcatatcagaatggctccatgataacacgtcctaatttctcttgaaaatatttataatgctttctttcacaactggaggcaggtttctttccacctttatgggtttggtgaggtctttatcacagatgattacttctgacatatcctccattggctcaatcactcttcttgtccccacataggaggctagctaatctttgaagtcattctggatggtttcagcttccacctaagtttccattccagcagcaataggtgccccttcctaattcatgaataatgtttgaacggagacattgtaataacttttatgctattttcgtcatccctaactgtcccaaatctattgtcgcggggaacttcatgaatagatgttgtattgaatttgttgctccaaagtccactaagactgggcgccctagtattgtgttgtatgtcgtggggtaatccactactataaaggtgcagtgtttgaaggcactagtgttgttttcttctttaagggggacaactagctggatcttcccctttagcatcaaggcatccccattaaagccttacagttggatgggacaaggtgtcatgtcatcttcggtgagcccaattgcttggaaagaaaattaaaacaggatgtttacggagcttccattatccactaagactctagaaaatctcttatttgttgtcaaggcttcaatgaccaaggggtcattatggggaaaatgcacatgactggcatcctcctttgtgaaagtgattggtagattcattgttcgaggatgttgggctggtgactgtctagtgtgcatatttccccttctccgtctaagtttgtcaagtaccttttctgggaattcttggtacttcccgcaaggtgtggtttgccaaagatatttgccacatgtccctcaactagtggcagagctacacctaggggatatgggtttctagatctcaaagtcacgatagttaccgcagctgaagctggaggagtagggggtgcaggaagttgcactcttgggacttgagggtgacccacccctgtagagaatttatggtaatctactttctatgaataataatctatccgtgaacgaccccctgtcaaagatatatgatggaaatccaaacctattgccctagatggccttccccaactagcattttaaggtcatctttcaagtgcttgcaatcattggtggagtgtcccacttctccatgatactcataccttttattcaaatatctcttaaaattttcccctaagatgtctgtgggggcttcctatagtggaccatatttcagatctcttcatccatcaaactagagtactcagtatatctcaactcatattctttcttggttttcttaaaatttcactttctcctagaccctttcccctttttttctctaagattgactcataacatgatcgtgaacttttacttttgattgtttgggagccacactacattcaagtggctcctgaggtcattaccatgtgccctcaccttctcactttttacattttcatagtttgcatctaaatgccttttaagatccattgtggactaactgtcatcgaaatattgtccctttgccccaccatcctggtttaccgaatcactaaggaattttccctcccttgggctttggtatttttatcctagccccctttagcactatagggcctttttaggcagaaaaacatccaagccaagaggcgttggtcgtcttctgcacctaagaaggtctgttggcctaatttttatttttctaaggaggttcaagagcgcaagatttcttagggtcactcattttttccttccccttgtcctatgcaagagtagacgatccgacattagtggaggtttccctagtaatccctctaatgcaatccacaatagggtcgccatcataatcttcctcatctagatctcgtaacatggcttaaaggtgagcaaacattttctccatcatatgagaaatcttctcttgacaagctaacttttctttggttttgagtatctcgttagacacccaggtcaatttgggtcttgatcataatgatagtcgtctttgtagtatccatctttgacgtaagcttctttgttttcttcatctttattgttctcagcatccttatcatcaccaatgtggtccctctagttgtctaggtcatcttctcgagcgttcatgttaggcccatccccacctctcgcattgctcgactaggcgtgctctagcaagaggggatttacttccttcatgacaatctttaggccaccttgaagagtctttttgagaaccgtctcttgtttaaacaccatggcagtagcagtggtctacgtctttcttcagctctcaatgaaagcacaaaaatgtttgccgagaatttcagaaactgaacatttaagaggtaaagaaataataacttgcatcaatgaaaagaaaaatattttttacgtcattcaagtgttaataaaccttaatccatgagccggtctactagcctctaaggacggtattgatgtgtttacaatatttttgcagaaaacccttagtttattattagagaagaagaacataaagggtaattttagtagagttttagctatgtatttttggcttgacccctttgcatgagaataaagtggtatttataggctaagtggcgaatatggatagacccatgacccgcctaagaattctgcttacatcccactgttggggtaaattacatacaatgtagagctgactagatgaccctatgggtagcattatgcatgtccatgtagcagctggatcatggggaccattttgtactacttgaacacgtattaggcaaaggtttaacctttaaaagtacaggacacgtgtcactcaaagcatgttcctttacaagcagaagtctgtaatgtccgtctggtaaagggtagtgatggtttgtgtactaccgtactcagaagtaagagacgagatctgattctgctaggaaaagtataattgtcactttattgacctggcatgtcgaaagggtcgatattcgcgatacccattgagggttgatatctgctttaggtcctttgaatacatgtttgggtataaatcaaatgaacttccatattaagccattcgatgtccaacaaagatgcttcttcttctgcctttgggaagtaaaggctggcctaggtaggcttccacgttccccttcattctggatgtttcttggttcgaggaagtcttttagcgatagtgcagtattaaaggacttcaatcgaaggaggattatattgacattctctagaaaaatgccacgtatcatatcttgcagaaatgtggatagcaagtatgatctcaaaatacaaagtaataaattaatgaataaatagatccacttttattttatgctgtaagctttatgtattcaacattttacaaaataaaaattaaattcaaggagatgaaagcaatagaaatcctactagccaatatgagcatttatagatgatgtactcatactggataactcacacccaaactagatgactaaagtaggaaataatcccaaatagatagataagttaagtaaaggtcctttttaaaaaaaaattagcaaaatgtccaaatataataaattagatagtaaaaattataaaatatcaataatctcccttttattttcaatttttttataattacaaataaatatattatatcattaagtatatatattgacatatcgtagcacaaaaaattagtaataagatcatatactataaaaaaattctgacaaaaaaaaagtctataaataattaaaaaagatatataaatgctaataaaattatatatactaccattaaaatatgtgaaccataccaaaaaataattatatagtcattatatataataaaataaaaattgaatatcatctcaaataaatgatatattatatacaacaaaaattatatacaatacaataaaaaatatatattcacaacaattgaaaatataataaaataaaataatattgttaatacatatatgtatataccatataagcaaaattatatatcaacattaaaataataatagcacacccataaaattatatatcatttttatatatattaaaataaaaactaaacataatctaaaataaaataatatattacatacattaaaactcatataccatacaacaaagtaaatatatcacacaataagtatatataataacaacaattaaaattaattaatatatgtaaaggagtgcacgagacaatttgatgaggcattataatattcattttccgatgttacttttttgattttctaattatttttgttaatttgactcgatattagtgagttctttaagagacaaaaaaatctcatgtggtttagaaaccatttaagataagttcacacaaaataacaaaattaataacactttgataaaaagtatgagaagtcaattcatcactttaaaattggcatgagaagctactctacatatatatttattgatatgcatgtataatttaagtgaccaatttacaaattttgtaagcagaataaaaaaatcattcaattgttgtttatctagtttatcaatttttttaaaattatttaactaatttttttaacatagctcgaaggatttttttttttttttaaatagtctcacattgtttacgagctatttttgtgatgcttgtgagatctaaataaaatattttcattcacttctttttttttttttttgtccaaaaatatatgagtgatttataacttgatcttgctcaattagttataatttttattattattattttaagtcatcaaattaaatctatatatttagattggagggatcatcctattatttttagacctttcaaagtctctcaattaaaaagcaaaccttaaatcctcttattcttctcaaagaagcccttgcttagtaaaactcataaacaagacctagtcctattcagaattctaattgattaactaaaatcaattaattgactctacgaaaaaatattatctcaactagtgtgggnnncatgggcctatataatcaagctcctaataagaagttctagaatttaccaagtaaattctctatcttattaactccacaatagatccagaattacgctcctaattaaatagaatggtttattctccaagaatagatacgctataaattatctattgtatcaatccaaataatcaaagatcctctatcgatgatttacatcgagtagggactaatttaccgttctaccctttaatattttttatccttaaaacacttagcttcttataaatgatatttcactaaactaatataactactgaatagaaagagctcttccatttatgtttgttaagccaagctctaagaaaatcatcgtttaacttttaaatggttaaaaaagttctagattctctatctatgattagcgctcccactnnnnnnnnnnnnnnnnntcccaagatgtaagtattaggtcgatccaagtgggaaactttaacgaacaagtcaaagaacatatgtaacacagttaagccaaaacctaactatctcaggatcaagatcttttgatctaagatcaattaagtgacattgacttaaaaaaaatatgtaatggtaagtttatgatatattttccactatcaatattggtccagtctaatgtatagccaatacatctgatgctagtgtacttttctaatatcctgaaaatgacattccacatatcattgtgtaagtaaaatttatcgctaattatcacgtcagtgtaaatctaatgcactgaaaagtcataggactaaatactttgaagtatataattacaattactttccactataatgacatcactgtaattgtgaataactatatcttatagatttaacagaaattatattttaaaaccataaacactaaaactacatgtaaacctaaatgacctcttaggatttattgatagtaaataagattatatcgaaatgagttttatttagggcataaaatccctacagccttatcatggagggagtatagacttgtagagtagtctcaacctcttttttcttaactcattagatataaggagttgtggcccctttcgttgcgctcaaccattttttaaaatttaagattttattgagggagcatgtgacctcttaggcggcgttgaaccccttacatggtgtaattatttaattaggagagcttgtggtctcttaggcatcatttaacaccttctacttcatccgtggtacttaaagtgtatttggaatgctataaaattggtatttcttttagagaggtgttcctttcatagtcatatatgtttcctcttttcttcttctctctttttttttttttttttttgcactgctttgctcattttgacaattttgattgacaagtattgtgaacaagtccaagagacgtgtggacaatgataaatgccatatgtaaagtgaaaattaaatattttattgttaagacaaaaatataaacaattgggtaaattagaaattcttggagatcaattttggtgccctttttaatttagtacaattagaggccaactcaacattgtcaggagtgctttctttggtcaactgcctacaatggaagaattttactttaaagaatctcttgggaatttgaaatttacgggttggaggtttttgctcgaacgtatcagcttataagtgttggaggtatctcctagcagaccttctaagatttgacgagtttctcgaggaacactcacatgcatctgttttcaaaactctgctaccctcgtccacacggatgcacttctccgccctctcatagaagttgtctatgtcatccaattctctcttcatcatcatgttctccatagtccacttccaaagcgtactccagtggctacagtgaatttgatttcatcttttgacatttttcctactttagcaacttcagcgttgaagcagtgaatgtattttctcaagctttcttattttccttgcttcacattggtcatacttgttacaggcataacataattaccagcaacctgatgttattgaaggaattccttcaaaaattacttccaggatgtgattgttcccgatcctagccttatgaaccacttatatacaatccctttaagtgtaatcgcgccaaaaaaaaaagtttaagtatttgttctacgtatgattgtattttcttatatatgtgtagtatgtaattatttgaactttattttccagattgtaaattatttgaaattttctaaaaaatttcatggtcttaaatagttataacataagggatcataaaaaaattggactaaaaaaattttctgaatttcaaaacaattttcaagacaaataagagatctacaaaaatattcttatggagtgtgaatttccaaaaaaaaaaattatgtatatatgaggataattttttgggattttttcatttttacatttcaaaacaattttctttgcattttta

SEQ ID NO: 16562 - DNA, 4929 bp, Cannabis sativa
  modified_base (4861)..(4878): a, c, t, g, unknown or other
cccccgcccccccaccaaaaaaaaaagaaaataaaataataataaaaataataatagtgagaaaaagaatcccctcatttctaaacttcataatcaattgtactctccacagactcttctcttctgtgatcagggacgtgcgagttggtttctggtccatccacatcaatggtaacttcatctgtcatggccgataaggacttatggtgcctcttgtcgtgtctcagcttgagtatccttgataagatttgcacaatgtctctcatggaaggtcttttttttggaatacgattgatacatttgtatccaagtgctgccatttcattaagcccttctacgtcgaacttcccgtcaagacgagaatccacaatctcctcccatccctttcccctctgtgttcattgcagcctacatttcatacacataatatgttgtcatggaaaaagatgcaactaggtggccatgatgcaacagcatattacttctcgtttcttcatgtacacacaaatatatagaattatatatatatatatttatatacatatataaagagagagagagagagtgattagattcatacaagctcgacatattccatgagtccttgttgaggagttctgccagctataagttcgaaaagcagaactccaaagctgtacacatcacttttcttggtgaaagtccttgtagatatgtactctggatcaagatagccaaaagtaccccttacatttgctgcatgactgttcaccatctcttctcttgaaagcccaaaatctgcaacctgttaattaaacataaccagatctaacaaatttcataatataaccccatcaatactacaaaccttgtttgaagttaaatatccacaagtaacaaggctatatcagaatccataattcatatcaaaaaccaaaatagaaatttatcatggcaattgtgctttaaaatgaagtaacagaatcacaatgaacgataagtgaacgtaccctggctctcatagattgatctagcagaatgttattagatttgatatcccggtgtattacagaaggaacagcctgaaccaatagcataacatagaaaagtaagcacaacaagcatacctgtgaaataaatacaggagtttccaagttggaacatgagattacttaccccatcgtgaagatactccataccccttgctacatctaaagctatatgaaccctcaaatcccagctcagtggctcccggtcttcatctaaacaatgaaatttgttggtattaatctacatttcattgttcttaatagttagtgttacagaatttgtacagttcaccaacttatttgtaagaatttgactctaaacaattagcgtttccaatatccaattactatatgttgcataatttcaagtctagaagtgatgattttatacaagtccaatgatccagtgaaatcagttgacaccataaaatgttgtagtgcaaacacaacacagaaagctcgtttacatactgttctcagccaaattaacacagtttcatgcataatagtgtatcaaaaaatacatacatttccgcacaaattatgagaaaaaaagggtcatcgccaacttactgtacaaatgagatgccaagctgcctttgctcatgtagacatatataagcatatgctgccctttctctgcacaaaatccaatcaaattcacaaggtttctgtgatgcaacctccccaataacataacctgcgatagaagaaagcaataaattgaggcatattaaagatctgcttcacacaaatatatcagcaaaaattaggttcatgagacgacgaggtgaacaagaaacattcaattggtcatgttaagaaaattacagaaagaggtcctcaacttgtggcaaactgaaacatatgatagtaatggattgctctctaaagtaaagaatttggaatttactatcactacctcagtctgaaactctttctccccttgcttagagtcagttgctagaactttaacagcaacaatctctcctgttgacatctgggctttgtatacaggaccaaatgcaccttgtcctattagtgttgtaaaattataggttgctttttgcagatccctacaccagtgacattaaaacaagtaaactaaagaacatatataaactaaggaaaataaatacatcatattaaaatatgtccccacatattctattaccaacatttacaatttttgggttaagtggtaatcagtattcccaacgcaagtgcagaaatctcaatcataatcattgtaagatgaaatttaaaagggaaattacttataagaatactcaggtattcctgatgctgaaatcacattgctcttcctgaacccatcaagccagaatgaggagccattccgccctgatttgacaggggaatccggcccaatggtggaatcagacagaatggaacaagaatcaataccattggcccgtataggaatagtcgctgctcttctagaactgctgttcccaatctgggaacgctttctatgataccgaaagcaaaagaacccagaaatggccaaaagtactccaatcaccacaccaatagaaatcccaatgattagcccggccgactcgtctttcatctccttctgaactcttttaccattccctattcagttcaattctccaacccatttacacaactgcaagataaaccccatcaaccatttaagaggacttggtcagaaaaaaaaaccaaggataaaataacaaattttgatattttcacgctgttttatcgtctcacacaagaaaatccgaaagatgatgtcaaatgtttgacgattcatttggcattcacagccataaaataagtcaactcaataacataattttccatatctacaaaaccaacaatctagaattcaagaagaaaactctgatttgaaattagcaaaacagaagctcaaattttcaagtttttgaagactagattttactttttgttaaggaaaatattgttacaaaatcttaaaaatacataataaaaccagcaataattatcatcacggaatcttattaaaccttcgatgaaaaagactaatacccaacagtttttctttaacataaatctgaataagagctacataaatgtgggaattcacaaaactcagcaaccagttgaaactccattttacttccgttatagtcgacttcgttgaaaaaaaaaacgaaagaaaaagatctactcttcaaatcagagtctatgcattttaacaaaattcttataaataagatcatattttggactcccctacaaaaaaaaaaaacaataaaagaaacgctcattcttaatcacaggaaacgcccatttgtggttcaagcaaactcaagaagattttgaatatgaaagcatagaaattacctttaaaaaaaaccagaaatgaaaatgttaggaaggaaagaagatgaagagctgcagcgtactatagaaatgtggcaaactaagattccatggatgagatgagagtaatgagagaattacaataaaagtactttgaagaaaggaaacagtaagaaaaaaggatctaaaataaaacaatgcttaaaacagagaaagggaggaatgaaatgattcaattcaaacttcggaaagtaaagaaaggaaaacagagtgtctttaaattccgtgagttgccgttcttacaataatctctgtctctgtgattcttttttttttctctctctctcgtttcgtttacccaaaaatggccttttggccaattgttttggacgaatttgtcccttttgcgttggaatttcgagacatcatatttaaaattataattaataattaattattgttagaattagtactaccattaaaattatattttacaacacttctaaataagtattatttattgattattacttaataaattttataaatattaatttatttttttgaaatagatttcattaaaaaacagcctcactattacaatatttttcaaagcaagaggagcattcagctcattaaacaaacaacctgacaaataacaggatccccggacaagacagtaggcagccctattagcagatcgataaacaaaagaaattaaaatattctttaaattggatacaatcaagcgacaatcctccaccaacaaaccaaactgagacgtcatatggacagagctattgattgcttaaaccacaactaacgaatttgtctcaataatcacatcctcccaacctttcttctttatccaactcaacgcttcctttatgccaactacttcaacaattttaggcaacacagcaccatctctagaatctgaaattgcttcaataagatgaccattttgataacgggccacacaaccaaaaccaaacctttactgagcttcaaaaatagcactgttgacattaaccttgatcttattaccaatcggtttgctctaatggttactattagaatacacaccatagcataaacagatgctggtgatttatttttagcaaccctccattgatcaaggaccgtccttaccgacttaaccacatccaaagcaaagcttgttttttgctgtcaaaaaacttcattacgtgtcttccaaatgctccatgataccatggcagcatcaacgacaacatcaccttgattaccatccaaaagctcgaaaaaccagttgctaaaattgtccagaccagaaattatagcagcagccgagaaaaaccagcatgattgggcaaaacgacacccaagaagcacatgaaatattgtctcataattgatattacataaagggcagatgagatcaacatttacatgcttaaaactaagttgtacctcctggaatatattttatcaggatctannnnnnnnnnnnnnnnnnttttttacatcctaaacatgaacttcttaaacgatataaaataaacacata

SEQ ID NO: 16563 - DNA, 10483 bp, Cannabis sativa
aactaataaaatttgagatttgactttactgtgtccactgttttctcattggcatttgaattcaattgtttaactttgtgttggttattttgcttcaactgtctcagggaaattctatatcaactaccaagtacaacttttttacttttttgccaaaaggactgtttgaacaggtaatttacttgaaggccttggccaatatgcaatagattaggtttgtagctattttcatattaccttgaatgttgttttagggtttggagcagcatttgctgttttattttagtaaaatagtcatgcatgctattattgtgtgagagtttgttgaagaaagttaggcgtgttttgttgtatagatgagctaattttgtataggttaatgattgcaaaagccttttgaaattcagctgtataatacttattcaaacaagtgtttgcggttcacttttggtgcagtctctagtctctgattttatattttggccatgtacctgataaatgttttgcttacactgacagttcagacgagtagctaatctttactttctcacaatctcaattttatcaacaacaccaatcaggtatgtaaagtgtaattgcttaaaatattagtttcaagattcattgacaaatttaattgatataaatttgtatgcctctatgtatataaagatcttatatttaataattcattgagatattgttggggggagtctttgaattatcacaatcttttggctcagatttgagtgacaattgacttgcaataattagaaggacaaatgtgtcgaaagttggaaaatggtttaactattttttatgaaaagctctatttcagttaaattgctttataagattagtagaaaatctctgacactgtattacttattatatcaatagtggactctttgtgccacaaatataatattgaactggtgtttgcgttttggattttgacatgattaataatccgggtgtgtttggtttagctgttaaattgagttagctcttttaaagagaagaccattgatctgaactgccaactttgtatttatatatttatattttcttctactttttttcttttctttttgagcccgtttccacaattgtttttggttaaacttgtattgtggtttttcagcaataatgtatttcagatttatatgagccatattcgatttgtgactagattatgcacttaaaagtattttctattaatacagtcctgtgagtccaattacaaatgtgctccctttgagtttggtgcttttggtttctctgattaaagaagcattcgaggactgggtgagttctactcttattatatgctgtatttatttcaattaaactcatgaatgctttttaggagaattttttggttgagaatgagggggatgttcttgggagtatggtttgatacttatatactacatactagatttctcactcttatcttatgttgtttttgtaaaacagaagtgtttctagaatcatacttctataaacaataattcttgggagtatagtttgatacttgaatactacatgctaaatttctcatactcttatcttattttgctttcgtaaaacagaagcgtttccagaatgatatgtctataaacaacaatcctgtggaagtgttgcatgaccaaaagtgggagagtattccctggaaaaggttgcaggttggggacattgtaagggtgagtatgctctgaattatttagtgtttttctgtaattagaaatattttatgtgtattttctcgaaatcctttgtcaggctttaatgtataagtagtcttatgccgtgttttggtttagtccttaataaaacgtttattatactagctttaaattgaaattgacattcgatggttgcagatcaagcaggacgggtattttcctgcagatctgctatttcttgctagcacaaatccagatggtgtttgctatattgaggttttgtttttgatgttttcttcgaggatttgtttgtttatttgtttatttgttttttcaataacgaagaaaaagttcagaaatgtgaagtattgctcctccatataagctgaaagattttattcttccttaaatttacttgcttgttgctctatttcagactgcaaatttggatggggaaaccaatttgaagatcagaaaggcactggaaaagacatgggattatttgactccagagaaggcatcggaatttaaaggttagccttacttttctatcgcagtgagtgtccattctattttttggcaatgcaaccagtctcagaaagggtcaaaggattaaacttagtattcacttgtggggtgttttgtatgaggtaatcctttcgacatttccatgttctgtatgagatttttcttcttttaagccctgaaaaattaatacagtgaaaataagattaatccataaataggtagtgttaaatccttctaaaagacattaatcataaaactgcgagtcacattataattagtattaaatcattttttcaaaattatatataagattcatgaatctaactatattttcatccataaacaaacacagtttacaaattttctgacaatcatatattccttcttaacattctttgtacaagatgcccccgtgttgtcgtgtgtaaccaatttacttaaagacaatcattcttttcaaattgcaggtgaagtgcagtgtgagcagccaaacaattcattatacactttcacaggcaatctcatttttcagaagcaaactatacctctctccccaaaccaactcctgctgagagtaagacatgattaatttttcttcttgcagtttatttctttccctttcgataggagtttagaaagttgtagtgttcttgtccttgcttagaattatatcatcgtttgtagcaaatgtcttcgaatgatggaaaggaagattatcaaacagtaccatgttgcttgcaaattgttttaaatttttagatattggtagaaggtttttttatcttgcacgaagaaaccaatcattaatctggaagcagtactttgttggtgtctttgacccagagttttatccatattcgctttatttttacagaattactatgaattaacattgggactatatcatgttttttcagggatgcagtctaaggaacacagagtatattgttggggctgttatgttttcaggtcatgaaacaaaggtttgttttcaagaattcctgtgagctgcaaagcctatctaactgtttagttgtagcaaacacttttgtacaaaattaggtttgctgatagttcttcattttacttgtttcctttgcaactgggataggattgagcagattttgagctccattttactgcctttttgtcttttttttttccgggaacctctgacatatggtggcagatctctattgtattttttttctctttgcaactggagattacaaaattctagaattttttgtcacttgtactgttgttttctttctgtggtacctctccgatatttgttctttctgtcacttgccaatttgatttacctttcaattgaatctttgcaggtaatgatgaatgccatgaatgttccttccaaaagaagtacactggagagaaaactcgacaaacttatacttacactttttggaaccctctttctgatgtgtctcattggagcaattggcaggtttgatgcccactaaactatatttcagggttattcaacatgtatttcctgggttgacgatgtatgcttttgatattctgcagcggtgtattcattaataagaagtacttctacttgggtctaactaaatctccggaaaatcaattcaatcctgagaaaccttttgtggtaacatatttgtccagaaatgaactactgtagaattgatagctcattggcagtttctactttgcttaacagtttgttctgttttttctgctaaattatgtttcttggtatacaggttgctattcttactatgttcactcttattactctatattcaactatcatccctatctcgctttatgtttccattgaggtaagactttttggctattatatatgtgtctacctatagcaatgaccataaaactttcctgatggctgcaaacatatatatgatttcagatgatcaagtttatccagtgtacccaatatatcaacaaggacttgcatatgtttcatgctgagagtaatacccctgcattggctaggacttccaatttgaatgaggaactgggacaagtaaagatactaccatattaaacaattgttctaatatttacttggcgatataaaataatgattatgttgataatcattgttacatacaaagagttgtatgttgtttgcatgtgtcagaaactataaaatgatgccttctgaggtggcttattctttcttattgtacaaattgctgctttgctcaggtggagtacatattttctgataaaactggaactctaacaagaaatttaatggagtttttcaagtgttcaattggaggagaggtctatggcactggtgtaactgaaatagagaggggagtagcacagaggagaggccttaaacttgaggaggtgcctccctcactttgatattttatttttgaatatatatggacaaacacatatgcatacatatgccatttatgtgtattattcagtacatgctcatgtgtgcataaacacagaagtggcagtgttctgctttaaagaaattttcatcccaattactcacaggggcaaaagtcagccaatgtggtgcaagagaagggatttaattttgatgatgccagacttatgcgaggagcttggaggaacgagcctaatcctgatctttgcaaggtggatttattattattatttgtttggaggtttatagtgtagcttttatcttatttcatattgataaagttggtggttggtactcaagtcaatcctaaagttttctaagagttccctgcttttctcctttttctgtatgggaaaaacttatatggcattttactatttatgaaatttcacttgagttatttaataagctgcttgtaaaagcatctgttattggtttacaatttgtcaatttggccttttttttttccttctttatttaggaatttttcagatgccttgctatatgtcatacggtgcttccggagggtgatgtaacatcccctgagaaagttacatatcaagctgcatcaccagatgaagctgctttggttactgctgcaaaaaactttggcttctttttctacaggttaacctccaaattctttttgcttaaattagttgtaatcttgtgccccctcttttgataaagctatatgtggttgatccataccaatcactttttgagatctctaattattgggagacgccctgctaaattatgattatggtcatcagttttttcctgctaccaggttcctttgagggtgatatgttttttttttttatttccaggcgtacaccaacaaccatatatgttcgtgaatctcatgttgaaaaaatgggtaaaattcaagatgtttcatatgagatcttaaatgttcttgagtttaataggtaagtataattcaaatttttacataatttgggacatcatgattgatagcattaactttacctgcaatatttgttatccaaatagtacaaggaagcgccagtctgttgtttgtcgctatccagatggcaggcttgtattgtactgcaaggtaatactttattgaaacttcttcattgtataagcatgctgagcaattggaagcaagtaacattctgtcaggaaaactcattttacagggcgctgatactgttatctatgagcgattagctaatgggaatgatgatttaaaaaaagtatctagggatcatttggaaaatttcggatgttctggtcttcgtaccctctgcttggcttatagagatttaagtcctgatatgtatgaaagctggaatgagaagttcattcaggcaaaatcttctctacgagatcgcgaaaagaagttggatgaggtaatattcgattggatttatgtgtactgccataagaagtttggagattcctgcctgtgtagatattgaggtgttgtagttttttatgtgaaatgtgttgtattctgatgctgtgtcttatattatatgctaaatttattttagaattaagatgcacctaaaatctttgaaattgtactgcaaatttcatgcaggtggctgaactcatagaaaaagatctgattttggttgggtgcacagccattgaggacaagcttcaagagggagttccgtcttgcatagagacgttatctagggctggtattaaaatttgggtgcttacaggagataagatggaaactgcaataaatatagcttatggtaagtcaattatgcctaaaaagtggtgataatttatctttccctttgattattgctttccttagtttcattatgattattattttttcaaatatctctaacttggactcccaaattttttgttgtagcatgtaatctaataaataatgaaatgaagcagtttattatcacttcagaaactgatgcaattagagaagttgaaaaccgggtaagctagattttgattaaggatggtgattcatgcacactgttgtagtgtataatgaatgcatgcgtttctaattcctatctatgcaataatgtttctgttactctgttggtagggtgaccaagtggaaattgcacggttcattaaagaagaagttaacaaccagttaaagaagtgccttgaagaagtgcagcactatctccatacagtgtctagaccaaaattggcacttgtaatagatgggaagtgtttgatgtacgcattggatccaagtttacgagtgattctactcaatttaagcttaaattgttcttcagttgtttgctgcagagtttcacctttacaaaaagcacaagtgagtttcacatggcacaaagttgatatatctgtttttaattatcgtagacagataattgcttgaactaggctgctttgatgctagttcaaggggttgagtgattgtgtgtgggcaaaggatctaggatttgaaccccaactgggagtcttggcaccaaggactgactgtttctacgatacataagcaaatgataaacttgtgctggagatttatttggatctttccatcatagaatgagaacttttcaagtgccgtttattcttctagcacttgcttagcaatcttgaaaattatttggtactcaagtttgtcaaatactaatggagtgatgtgtatctcaatttgtagactcctttactgtttagcaatgcattcacacttaatgttcaaaaaggatgagtggttgattactttagctattataatgtaattattattcttgctgtgcacaggtgacaagtctggttaaaaaaggtgcaaagaagataacacttagcattggtgatggcgccaatgatgttagcatgattcaagctgctcatgttggtattggaattagcgggcaagagggcatgcaagcagtgatggctagtgattttgccattgcccagtttcgttttcttactgatttacttcttgtccatggacgatggtcctatcttaggttatgcaaggtttgtgtttttgttatattttgcaatgttgatatcagtgcgagtttaatgtttatgcttctgactgaatctagtttcaacttacaggttgtcacatatttcttttacaaaaatcttacatttactttgactcaattttggttcacctttcaaactggattttctggtcaaaggttctatgatgactggtttcaatccttatacaatgttatatttacggccctgcctgtgataatggttggtctttttgacaaggtattgctgtttttttggtcaaacacacaacttgtacttttaagctacgggaagtcataaaaatatgtacagtatttgcagtttacagtttagtattttttttaaggttgtattcttattagtaaatgcatgtccatgtataacttccatttgagatgataaaaagatgattattgattggttatttctgctcttttcaggatgtcagtgcatcactttccaagaaatatcctgaaatatacatggagggaataaagaatgtattctttaaatggagggtggtggccgtatgggcctttttttctgtctaccaatctctgatcttctactactttgtgagctcgtctagttcaaatgctcaaaattcatccggcaagatgtttggtctttgggatgtcagcacaatggcatttacttgtgttgtagttactgttaacatacgtcttcttttgatgtgcaattcaattacaaggtggcattacatcagtgttggaggaagcattttagcatggtttgtatttattttcatatactctggtattatgactccatatgatcgacaggtgggttttgatttccttgtttcttagtgttgatttttatttttcataaatttcatcccattattctttgtgctgatttgcccatttctggaatatttcaggaaaatgtttattttgtcatctatgtcttgatgagcacattctatttctacttgacgactctacttgttcctattgttgctcttcttggggatttcatttaccaagggtatgaaaataacgtattggagagagaatgtgtggtttttatattaagttttgcccatgatatgaatagctcctgatttttgtcatatgtatataggattcaaagatggttcttcccctatgattatcagattgttcaggaaattcacaggcatgaaccggaaggtagaaccaggacggaattgctggagattagaagccagcttacaccagccgaggaaaggagccacgccatagctcaactaccacgagagttatcaaaacacacaggctttgcttttgattcacctggctacgagtcattcttcgccgcacagctaggtgtctttgcacctcagaaagcgtgggatgttgctcgaagagccagcatgaagtcccgacccaaattagggaataagaaataaactacacaagattcttgtataaaaatcccattttgacactagatttagaaaaatttgtaaattagtttgttcgatatcttagtattagttatgtttttgatatatatatgtatttacatataggttacatttgaattttgtttccacttttatggactttattgagaagctgtagttgttctagggttgtagccaatgtacatttaaatggtctataatcatacactgagtatttttttctcctacaaatttttgaaaaaagatattggccataaaattatttaaattttatgttttttaacacttaattacaaaaattgatttttatggaaaaacttacattctattttatttttttacacttctgtgtcagtcaagtgtcatagtgaactacttatttgtacacaagggtatattgatttttatggaaaaacttacattctattttatttttttacgcttctgtgtcagtcaagtgtcatagtgaactacttatgtgtacacaagggtatatgtggtaaaattttaatggttcacacaattttaattttaaatacaatagaaataatttaaaaattatagaaaaaatttataaaagcaattttttttctcctttttcttttctatctctttattcttgaaagatcaaaatctcccaactccatttcttcttcctctacctttcacaccaccaccataacaccacctccattaacagcacctccatcaacaacaccaccatcgcatctattatcaccgtcaccattaccatcacaccaaaatcactaccattaccaccaccataaacattttctctaaaccaccacaaccacaccactgaaaccacctcaccactgtagctactgcaataacccctactactattacaatttttaaatccataaaaccacttaaaaaattaaaatttcctcaaccgaacaaaaaaaaattaataaaacacttgaaatgaaaataatttgaaaactctctccagagctccactgtagtggtggcggttctcggtcaaatgaggtgtacgaagtatcgggcgatagatccttgaagctcttgcaaggggaaacaaaaaccaggttcttttcgctcgttgagaaacagagacaaccaggtcaaagccaaaaagtctcgactccgacaagagagagagaccgaaaaaatggagaaggggaactcaaggatcacgagattgggggtttcaaggtgctcgaagttcactatgaactccattttttccattaatgaccatacactctgtcgtcgtggagccgagtggaacccgaggaacagagagagacggacgatgatgtggctcgctatctttttttgtcaaagagagagatagacgagagaggagagttatacgattaaaggtggaggaaggaggtggaagaaatagaagaagaagaagaa

SEQ ID NO: 16564 - DNA, 5878 bp, Cannabis sativa
  modified_base (3778)..(3779): a, c, t, g, unknown or other
tatttgaacgctactgcccatcgacagaggcactattggattcatcatctcaacccgattctccagaggttgataaccacagtgatgcccatgttgaatcagtgagaaacgagatggattttgatgatccttaggaagctttagacattgctgtcgataaggatctcatccgagatggtagcaaagcacaaccaaagttgaatcgcagttcgctggaggtagaggaaaagctctctgctcgaatggagattggggtttcaagaatctcgccaggtcttgatcgggcaatccgatcgtcttgcgtgtacatacaagaagatgatgctagtggagtgtttgtggatcgtaaaatggtgctccgagagattgtttttagtgttaatggtggttcaccattggaatcgattcacacaccgcagaaagatcggaggaggatctttgatcggggacgtcaatggatctttgatcgaagacgacgaacgaactttgacgaagatgaacggaccgaaagggtcactggcggccgacgagaagcttggtcgcgtcggatcgaatcgcagatagcgcaatggcaaacagaagcgacgacgatcctggctgtgtattcactggtttgcataaaaaaaaatataaaatatatatacttatatacatcttttactggttattttctgcaaataaatatgtggttaaaatagtgagtggggatgaagcttcaattaaggaaggatacaatgcatggaggtcacaaactcaatatgggcaaaggttggagtcggctgctgcaaaggttgaagatgataccattcgtaccctaaggtttaatctattagagaaatgggccaacaaacaattgggcttctttttttaggaaaaaaaaaatgggctgcaattagttatttatttttttatatttgtacttgttcttagttttattttttttatttttaccaccttgaggacaaggtgattttgaagggttggggagtgttacatgaaaagttatagggactaattagcaattgttaatattgcctagttagtataaatatgtaatactattacacaaatggggatcaatgaatgaaatgagagaaaattaggattattcctattggaaagagtacaattggtaattgtatcatgatactactaataatctttcatgcacttactaccaccgtccaaactaaagaaagctcacatatctatgatttggtctagttttaaaatctagtatccaattttttggttattttattagacatcgacttaatatcaagacaactgtgtatggtaccaagtcattaatgtcattactcattaatcaagaacatataagctaatgaaatattttaaatgcgaaaattttgaagaatcctctatgcacatgaagtcgtacaatcataacattaacaaaaacaaaactccttatgatctcgaaaactaagagtacattagcaaaccacaaattacctcttgattagtgcaaacacagtcccaccaccgaccaatcttggtttacttcactatattgccaaatagtttaccatgtcagctgtgcacgtgctccctcatatttgatatcgattaaccttgatttctccctataaataccacatagttctcccttaaatcatatccattatcaaatcactaatcagtatcacttattgttcaaagctttcttattactagattggttatctctatatttttcatttgcttgtgttgttagcatacaatggccgagaagcaccaggctgagaatggaggtgagactgccgataccggatgtgggatgtttgattttttgaaaaagaaagaaaacgacaagccgcagcagcctcaagaggaagttgccaagaaagatcagcatcaccagtctcgtgatgctgactctagctcggtaagatacagcaacattgattaatgataacgtttttttttctgcttttagtcggccaaatatgtgactgctatgaaattttgcagtctagtagtgatgaggaagatgggaatggagagaagagaaagaagaaggggttgaaggataagattaaggaaaggatttcggggaaaaaggaaggggaacatactgacgatgttcatgcaacagagataaaaactaacaatcacatcgaaaatgaaaaaacagtgaacccagaggagaagggatttttagagaagatcaaggataagcttcccggacagcacaagaaggctgagaatcatggtgcaaatgcagagtgtggtgcagaaggccacaagagccatgatgatgagtccaaggaaaaaaagggaatatttgagaagattaaggagaagctgcctgttggccacaaggaagaagagagggccaaggaaaactaggcaaacgttgcctatggatatctttgtctaggctagtcaagcttgttttatttgtgagaacggaactattatgttatgcttgttttatttgtaagaaaaatgattcatgaatcatgtgcttgtattaaacttccaatccaagtttcttttcttctcgtttgtaatctggtaatctggtaatgtatttgtactctgcttgttgatttaaagccactttctaaggtccgctactatggtttctaggcaagatttaatgttgaacaaacatacttaaacaagcaaactcagaaaacattttacctgtcacagcataggattcaggcatttaagcttaaatatttttgggattttccattcaaaacaacttggaaagtcaactagatcactggcacagtagcatctataattacagttcttcaaagcttgcagcaatgaggacaaagccaggttatataacttttacagatgaacaaaatggttagacaaccaagccaaaatggtaccgtccaaattagaaaatgagagaacaaataatttattcgttataggtacatgaattagtcagttttaagggcttgccaagttttttgcccctgaggatgacagagcattggacttttgtataaaacttagactttaccagcttgcccaaaatgtaggcccgtgacctcatcttgaatgtcagtttcaggggaacgacaactttttcgacatcatatttagcacctccgacgtctgaaattccaccatagagaggaatttggtgtcccaatactatagtcactattttccgatgacttttcctccgttgatgaaacttcttcatctgtattcaaggcaaaaagaagagggtttaaaatacattctcttatttcaaacaaaaaaaaattgtaaaagataacaagattctactaaattaaatgaacttaaccaacgggtagatatgataatgtaaacaaaaattgagcttttcttataacgtacaatgaggaaacttcaaaactttgttttttatcatatctaagccaaaacaagcaaaactaaaatcccacaatgccaatcaaagtactgtttttcagaaactaatttagccaacctgtctagattttcatcaagatgtgttcggttcccctcgacagtacaatcacatgcagatatatacgagctgaaagggaacatctagcgtacaaatgatgttcaatggaagttctttaattattagagttgctaaagatattgtagacattgtcccacattgaataaatggtaaagtattaaaccatatataagaacatggactactccacttatccacccattagttttgagatggaacccgattctcgacaaaacccatgatggcatgatggggtataatgccaattcttttttttttttttatttnngcgtttatatattacaaccatgttttatctagaacttgaaaccttcaacacaaacccacctatggccacttgagctagcctcaagtggttataatgccaattctcttaagattagaaagaaactgcttattgactataaattgatctaccaaccaagttgaaattttcattttcaatgaaagaaagactgatttataactcatcacgcttcccaatgagaagtggactgattattgttggtgtgggcaaagaaaacagactttttcagttttaaaggcagccattaataaaagacagagtactgttcctcatggatatgtcgcattattctaactcccaaaacgacaaacatttgaccccactccaacaattcaaaacaaaagcaaaactatactttacaaaactataacgttgaatcgccgcttatactacacaacaccaccgtgagaatactaaatgaccgtattacccatatgtatgaaacaagtttgtcatcataaagaaggacaaaggagacatgaaaaataataaaattttgtttagagtcattaaacacacctctccagaggccaccttgagctggtagtagtgaagctcgagaggagtagaggtgacgtggacgccgaagaatgtggctggatttctgtataagatcctgaccgtcgaattcagtgacaacatatctgtggctacccctgttcgatcattccctgcctgaatatcgaatcgcctaataacaatattctgttataaaaaacaaataagtattaatacgaacgagttcactcagtaaaagcaaattctcacttcaacacggaaccgagttgactcagtttctcaaatgagaagaaaacaacagagttacctcaacgacaacttcaggcttgtaggacttgctagcaccccaaagaatcacagaaaagagagtaaaaagaactacaaaaagcaaagtgaagcctaacagtctgatatttctgcccttgtctcgcgaaacgaagctgttttgatcgtcgtcgtcttcgtcagactcctgtcctggctgaatctttttccaggcagagagagtcctggggttttttagtgaggcagagaatctggaggtagaggactcgcgggaatggtggattggggagcagtggtagtagttgtggtggcgaggtgaccctattgggcttgacccgtacgacattttctccacgtcgtggttcgatgggctctggacgtaatagagcggccgccgtggggacctcgggggagtagactggtcgaaactcgttacttccgagtctgacttgacgtgcattgtcgccggcggagccgccatgggagaggaagttagggtggtattaggtttttagtttctctttcttcgttctttcaatgtttttggtctaaaagtgtgaaaaactttttgtcaatataaacaagtttaagggctaaaaagaaaatattcatatgtgaaagagagaaaaaaaaagaaactctggaaaaggaaatgacaggtaattaaggatgaagctaagtctccttctatatacgaaaactttgaatttgcagatcacttgatattttatttttatttcgaaacaagtgtaattttataacgactaggatgcgcgtcgtttgtagcctctacgctttgacagaagtacacgcgccaattgggttggagcgtgtgacacaatctcggaaatagcgtgatgtttgttatcgaggatgaatcggattaagattgagaaggatgtttttctggttaagtgttatccaaataaaaatacaaaaataaattgagccaatcaaagtaaattaatttgagtaacctaattaaaattaaaagtaataatatttaatcacacattcctgtgtttcatcagtgctttgcttgcccatattcacacagtctctctcagtcacataaagtcttgattacaaattattgctcccagatttataataaagttaagagtcatatgcattcattttgtcttctatattagagattctatttctactcatgctatatttaaccagcttataacgttttattgctgggtcatatattattaaaataaaaatggcatttggaaagaagggtgtga

SEQ ID NO: 16565 - DNA, 7223 bp, Cannabis sativa
aactttttgcgtaatattttcatttcacttaattatttgttactttcttctgtttctaaatgtttggcctttctaatcaaaaagcaagtttcacatgaaattggttcttaacgagattgtggtgttgaaatgttgcagcaactatttgaggcagcaacatcaagccccccaaaataccatgggttacactttaaggagacctttaatgcacagaccccttttgttggaaaggggttattatactttcgaaaaaacagatgacaaaaaaagcatcatcaaaccaaaacttgaaactgttatgattgataggaatgtgacttaatactgaaaattctgcaccaatgatataaatcatatcactcaaaacttcacatcatagtatagtttcccttgtatttattcctttctccttgccagagcatctaagctcctttatttgaaaataattggggtcggcaataaaacttgcaacaacatgagccgaggaagattttgaaaggtgcagaactccccaagctgagcgccaagtcacttatagctgattcaatgttttgtgttgatcaaattcctgatcacatatgggagaatgcccccgtgatcaaagtaagcaagttcaacctacaccaggaagaccgggatgtttatttagagaaataaaatgaggaaatctaaagcatcaactagatcttcaacaggatttacacagatttgtaagagcacaatacctcggtatcgaaacgtagtgtacatgcaaacgacttgccattgtccgtcacaactgtcacatcttgaccaggtttaatttcactaacactggctggaagatcaatgctgtatcgttcgtgaccagttaatccaagtgtatctgcatcttctcctgccttgaagcatagagggatgacacccatgccaaccagattgcttctgtgaattctctcaaagctctttgctatgactgctttcacaccctgagaaagaaaaaaaaaatagaagtatagaaccgttaaatcgattgcaaaagccaccgaccatatatgcatggaaccttttatgtttaaaatataccagtagcataggacccttagcagcccaatcccgggaacttccacttccatactcagcaccagctaaaacaatcgtgtcacgtccttcactcttgtacctctgtagtaattaaacagaagtatttaacataaaaacttgaaaacaacacgaccaaagcctatatctagaaaatatatatatatacatatatatactaaccacataaagacaccctacaaggccttgctttatgatttagaaaagacacttgtgacaaacatatatcccaaagataataaaaggtaactagttccttggtgatattcttacttctacataagaatttcaacacctcagaagtattttagagggcctaaccttcctatcatacagaatactactggagaaataagaggaaattaccatggcagcatcaaacacagaaagtttctccccagtgggaatgtgaacagttttaggaccaacttctcctttcaaaaacttgttgaccaggcgaatatttgcaaaagtgcctcttgccattatttcatcattaccacgtcgacttccataagagttgaagtctcttctatcaaccccgcgttcaagaaggtattttgctgcggggctgtccttgtgaatgctaccggcaggtgatatgtgatcagttgtaatactgtctccaaagttgagcaaacagaaagcatctttcactccatgaggacctggaggagacatagtcatatccttgaaatagggtggctcgtgtatataggttgatttggggtcccaggaatagagggtgccagaaggtacagataactgattccacatggggtttcctttggttattgcttcatatgtagccttaaacatatcaggaagcacacttgattgcacaacctggaagaaaatgcaagatggaaacataataaattccaaatcttcaatctgagctgcgacaaaaaataaatttaaaatccaaatgaactcatatctatgcaattcagaatctcacctctgctatttcttcgttagatggccaaatatccctgaaaaatatattcttcccatccttgctcaacccaattggttctgtttcaaaatcaatatccacctagagcatttccccaaaagaatgagatacataaaacatcatgttatatcacctagaaattctagacatggttaaatcacttaaaatatgagctatacttgcaaacacacacaagatctgcaaattgatgggcaccagaaaatcatatataaatgatttcatacaacacaagatcttgaaattagtagaatctaagctgcataccgtgccagcaagggcataggcaaccacaaggggtggagaagcaaggtaattggccctagttaggggatgaacacgaccctcaaaattcctatttccagacaaaacggcagatgctactatatctgtagataaaaaggcggacaacaaattaatcatttctcaaaaattcaatgagaggagaaacttagtacaagctaaagccttaaacttataccattttcagagatagctgatgccactgcttcatgaagatctcctgaatttccaatgcatgtggtgcatccgtacccaacaatattgaatccaagctgattcaaatacttttgcaacccactacagcaatgaaaataatgtcttggtaagaagagaaacatatatttcccaatatggtataatagaattgaaaacacaccttttctgcaagtatttggtcacaacaccagaacctggagcaagacttgtcttgatccatggcttcatctgaaacaaaaagaaattatagtaaaacttgagtccattttatccggaaaaaaaaaaaaattattcttgatccatgcagcataaacaggtaaggtccaacagaatgcgtgttttgaaattctgcgagcaataagcagaccgaacacttgatgttccaatttaactaacactctccatcaaaccagaaacacctgattatagtctaaaagtgggcattttcatgtatagtagagtagaaaaatttactgaacaaacatcacagtgatgtatcccacacccatcataatctctaaaaagaaaacagagtaaaatgctcagttatcagttaaccccaaggggtaggtctactggtaaggaggagtgttggatagtgcttggaggcatttgtttcaaggttcgaattcccacagactaaaaaaaccttggggccacttggaggttttcctggtcccaaggccaaaaaacaatttttttttaaaaaaaaaaaaaaaacataaaaacaggcaccaattttcaacgaacacaaataaagacaaagccgagtaaagcatagattctgttccaaagtagaacactcatactacattattgtacctcttcttgcagtatctactatctagtgaattatcttttcgtttttgataaaataaaaaaggaagcataaatcgtagcaaaaaatagcgacttctaacctccaatcctagctcacaggctttctttgcaaccaaagcagctccaagcattacactggggtttgaggtatttgtgcaacttgtaatggctgctataacaacatctccatgcctaagctgtgctggggtcccgttaaaattgaactcaacaaccttactttgtgactccttaggtactgcaaaaccctgcaattcataccaaaacaaaaaccattagcacaatacaaaaggggagcaaatagtaccaatttaatgtataacagttgaagtacataattcaaatcaagcaagttaaaagagctctggaaaaattaaaagacgtcatttatacacttgtatgaagacataagaatgaaattttcaacaaataacttccaaagacgacaaaaaccatcccaaattaaattcgtccgtatgatatcctacaatttgtaaggagataaacgcacatatgtaatcttcaaggtgctaggtgataaatgtattcataatagacatagaggattaacattgataacgagtttttcaaacttggtctccaaacaaaagtcaatttaaaaaaggatcatttccagtatatattgtttcttcaacaaaagtgtggccatataatggtctcatagagaccttgtgaaagtttaagcaacctcttattgtggagaatgataatggatttttgtatacgattctaaatctaaagcatgcagtttttttcttggggaaagcaataacaagacttcagaattacaataagtaactccccactcaatggggttctctgtgtttccaagtaagtattaaatattaataatcaataacatttgtctgttttaattaaaaatatttcttaccttgaatccaactctattgtcaagacatgaatgccaatctgctttcatttctttcaaaggaacacgatcatgtggcctgcaaaaagtaagattgtaaaagccatgtttggaagatagaaacatcttatcttcttattagatgactgcatatcagccaaagaaatcaagaaactacctctttggacctgacacacagggttccacatcctccagagatagctctagatatgaggaatacactcgctcaacctggggctggtatcgtatagcaatacttaagtcagaaaccatattgttaaaaacttgaaaatgacacatggacctaaaagtaggattttcagcataatatacctcactgtagtccacaaacatcttgttggcacgtaaatatgactctatcatagcaatctgcacaaaagacaacacatcagggagtgaagaaacaaaacatttcataaaaatgaactcttatatttccttttaaaaaaagagcatacggtatcgtcacttcttccggtcagtctcagatattgcaaagttatatgatccacaggaaagaagcccatggttgcaccatactcaggagacatgttagcaatagttgcacgatctgctaaagacaactcactcatgccttcccctgaaatagcaataaagaaactaaaatgaatcatcttatgaaattgcagctgcagaaaactaagcatagagaaaatagacaaatatgtttaccataaaattccacaaactttcccacaaccccatgcttcctcagcgtttgggttactgtcaaaaccaagtctgtggctgtcacaccatccctcagctttccttttaatttaaaccctaccacaccaggcaacaccatgctcattggctgttcaaatgataagatgagttaatatatgttgaaataatgcttgtgaaagtaaatgcagaacagaaaataccatgaaacatataacacaacaaatatttatacacatttgctgcggggatctcatgatgcaaccctatatcaatgacatgcaagtaacacaattgttaaagttaacagtccttacctgtccaagcattgtggcttctgcttctatccctccaactccccagccagcaacacccaatccatcaatcattgtcgtgtgtgaatctgttccaacgacactgtcaggataaagcaagccacctctgttgaacacaactctaccgaggtactctaggttaacctgcaaataataagccttagaactttaattcaacccaagcttgtgcacaggacttagaaataagaaaaagaaaaacccttagtcaatacagcaaaggctacatactctgtgaaagcactgtgagatttattctacaatctgcaattacctggtgaacaatccctgatccaggaggaacaacaagcatgttatcgaaggcatttgatccccatttaaggaagccaaaacgctcttggtttctccggaactcaagttccatatttgcctgcactgcattctctgatcttgccacgtcaacctgaaccgagtgatcaatgacaagatctacaggaacctgcattgaaagagagaaacaaaaacagattctaagaactaaggttcactatccgaacttaagtaataactatatgttaagcttccgagtctcgaatcaactcaccaatgggttaatcttgttagaatcacctccgagcttattcattgcgtcacgcatacaagcaagatcaacaacggcaggaaccccagtaaaatcctaagaaaacacaatttgaatcacaatcactaaaatactaaatgcgaaaatgtagaatcaataacatgggaccgtaaatctagaaatagccagattacctgaagaagcaccctagcaggtttgaatgggatctcaacctgtttgggactagtattctcccagtcaatgatcttttcaacatccttactcttaacctgaaactcatcgcagttacgaattgccgactcgagaaggatcctgattgagtagggtagcctctctacaacacaacacaacacatcaatctcaacaaaaaataatcatctaaaagcaaacaaaaccaaaatccaacggccaaaaaacagaacagaccgattctgggatcgttgagagccggcaagctatagtatttgccgaattcaccaccatcgggcttctcaagtcccttcaaaatggcgttgaacgggttttgactcgctgaaacaaatcaaaacaacaatcagaaatcgatactttatggtaataatggatttttcatttctgaaaaaaaaagagttaaaatgagttaggtagagaacccatggtgatcggaatcaggagcaaagatttaggtgggagaaatgaataagatccggatgaggtgtaaatggaaatatagggttgttgaatggagttgggtgagagaaatggcgataatgatgaagacgaggacgaagaggtggtctactgacccttttcgttttagtgttctgtgtcgtgtcgcagattccaactttttatatatataggtcctatgaatctgcccacttctcaaaaattaaagataaattatggatatttggggatcagaggaaattataatatgtggacgagtctaccatcagtgtcatgatgattcatgagtgttcaattctcattcaaacacaaacatcttgttttgatttgttattattattattatttattatttgtttcttttcttttcaagaatccgtatacattcattttagtacaaattaaatatctctataatctccgaccaaccaaaaatataatttttgaagttggcaaaaatcgaagaggctcgccacaatttct

SEQ ID NO: 16566 - DNA, 2244 bp, Cannabis sativa
aaaataaagatgaaattttgacttaaaagaaaaatgggtttgtcttacttaattctgttgtgagttaaatcaagcggtgggtgcagattaagcatgcttttttggaactagagagagagaaaagaaaagaaaagaaaagaaaagaaaagaaaaaggtaagtgaaaaaagaggtatatggttaagtaaaagacaatgagattctcgggtgtaacactataccaggatgctttgcttacttgaataatacttctgtttgggtctttaccttacccatttcaggattcattttggctttcgtcaaacaaagaaaggttgtctgtgatatttcgcagaactgccaaaaaagggtgaggtggagacactagacaggaccagtaacagggaaacttggctcttttcttttttcaccttctaaacttggcctattttatttttctcttctttacgatttgtttttcttagttaatgtcaattttcaaaacacgagtgcatttgaggagcacctaagattttagcttctggtaggagacgtctattgtgtctgctcctctgatctgaccaagatgggcttttctttttctttttccttcttttttttcccctaagcttcaataacatggttctctgagttggtaagttttccctttaaactctttgagtttctctgcttagttgtttgccctccatttttgttttcctttctgctttttttttttttaatatatatatataattatgttatctggtcatgcttggtttctcagaaaccttagctgctccaacaagattgaaaattttgaagaatgggttgtgtttcaaaatgggttcttttttctgtcctaaactagagcagttcatcttcgtaactgagatcgcttagtttcaaaataatgttctaaactttaagttgcagcaaaggttgcatatagatctagtttagctaataaagcttctaagtagatctggcataattattgttaaaagtctcatcttttagctgatcttgtttcttattcttcctcaaattagctcatttcactaattgatgacaatgctgaaatttttgttacttaaacgggaaatttgaaactgcatttttttttttttttttgggtaaaaagcaatacctgaaatttggtaactgttacagagttttgagtgcaattttatcatatttttcatcttgtttttcttttttcttgggaaaaattgtggcgaatttcattgtcgtggtgatttatattaacagtagatataattaatttggtcaatcgagtatataccaatgcagtattttaattttcactagtgttgaatatgaattttgctttgccaaccctagtaaagttgtaatgaggattaaaaaatacgtatatatattaatttattttgggttgactgaaatgatttgtaaccttttcttctttcatatgcctttgccctttaaacaaatgattaatcgtgaacgctgtcaaatgaacatggttggtttgtatcatgttaacaagtctgcatactttttatttttaatattaataaacaataattctcttgtttcacaatcaatggatcttgacaactgctctatgtataggctggagattggcattgactaccaaaatctggtgttacacattcacaaacatgaaatttggattaaagaaagggtggaaatccattggtcctcttcggttgagggggaaaacaaccactcggttctgtctgttttcgaaaacaaagtcagccaattatggtccaggaagatcaccagtttatctgaatgtgtatgacttgactcccatgaatggttatgtctattgggcaggtcttggtatttttcactccggtgtcgaaggtgggggatacaaaatgcttctctaataaaatattgcaacatctgtgctattctaatggagattataagttcttatttcttgctcattgctttaaatttgggtttgtgctggttgcagcattgtcatcatcactgggatgagcataacacttgttcttgacaactaaatgacttttgttttttgctaaaacaaaaagggttattatatcagaaacctgatagattttctaggaactcaaaacatctgcatttctagaaaacagttcctgtgagtttgctcacattttagtttcagaatcattttggtttttgcaagtacattattagacattaagaatggagcaacaacttctttgattgaaagtggctgttctctctctctctctct

SEQ ID NO: 16567 - DNA, 8632 bp, Cannabis sativa
atacattaaaaataatttcaaacaataactaataatattttttcttcaattatttattatattatttgtaaataaagtagaaaatacctaacataaaatcaaatatacgtgcctcgcacgtacctttcttctagtatatatatatatatactagcagaattttacgtgcgatacatgtatgctaatttttatattagactgtttattattagtggtaaaaattaggagaatggtgttagtttgtagattgttaatgggaatatatatttaaattaaaatggtgtcttcactattttgatctataaattaaatgactattgttagtgaaactgattacaagtaataataatgttatgatattaaaaaataatgtataaggttttgatgattgttcaaaaaatatagcatgtgctcaagcatgctatatttacactaaaagagttacaagaaagtaattgtactaatagcttgatagggaatgcacaattgtcggcaagattgaaatttttgaatatcaagcagatctctaaattagacgaagcagccactctgccttctccactgatatccgagtttgtattaattttacaagagcatgtgctcaaccatttagccttgcatcgctcaagatttataatcttactcacccaagtatattgagtatattaaggcaattttaagctaaaaaatttaatgaacccatctttcttctctgcatcatctcaacagctcaaataactctttcttacacaccatttttaccaacaccttgcattccaattttctttaatctttggctcaaagcctaataaacaatagcaaactggattagttgttatgtcatattttgtattagttccacaagagccatagtttcacacacaactactgcaattaataaatgaaaaagagtcccaatttttcaatgctattcaaagtatatatagtactcctatttctaagtacacaagaaaagtttatttgcttcaaattgctttatcactagcataccaaactcttgtttacacaaaaagaaaaaaaggtgaaaacatgtttctattgttattcatctttaacatctatgttccctttgtacacactcaaaagagtaggaacttgctcatgatacttggtcacatacttcttcaagaactttgactcaacactttgaatcacaccacaaaagctgatatcttttttgatcaatccctttcccaataaaacttgaacaacagaacatctgggtagaattctcttctcaaagctgtaaaacagaaccaccggacactttacaatattttttgaggaccaccccatcttgtttaccagaaaatccattgttttctctatcttattttcagacatagccatgcaattcgggtgcctcttaaatgcatttagaatatcatcttcagaccaaccgaacctcatgtaagccttgcaattcctgttccaagttctgttaaaatccttcctagagaaagtgcaaactgcaaaccagaaagtgaatttctttggacaaaatcccatgtctttaaccttatccacaatactactaaatctttcaggtttcaggatcagaatctcaggaaaattttgcaacagaaaagcaatattagtgaaacctaaatctttcgacaacccaagattggcaatcacagatttccaattttgaagtaaggataccctttggtgcttcgaaccatagaccaaaagctcattaggcaaaacactcttgagtaggttataaataggtgcaatgttcttatccaagcttctatacaaaatacgagtatcagcatatataagactcgccaggtccttctttgaatacccttttgagtagaaaaactcaaactttggcaagaaagttttcttcggatccgctgaaagaatccgtggccgtaacctaacaatttttgagaactgggtatccgagaattcgtgctctctaaagaatgccaatacagaatcagctctttctgggtttttgagctttaacttgcgggaagcaacaatggcggattctggggacaacccacatgagtttacaaggtaagctaccgtagaagtagaagaattacccttttcagattttttcagaacagtcgttacagatgaagagaaggtagcagtaatagtagtattagtagcaagaaagcccaaataagaattcgagtttgacccgaaaatttcataactgagtactgaaattccaagtcttcttctactgagaatacgaagcatatctgttatctaatcaactgtcagaaaccataccaaagggagtgttactcgactaatttactagactcactaatcgtcgtgttcaatccgaaaacaggaaaatgaagtagggctagctatgcatgcattttcgggttcttcttcttcttcttcgtctggtggggttcaaaatcaaaatgaagacgaaaggaataaaattaagcaagtaaaaggtgaaattgtgaaatcacatacctctctaccaacaaaaatgagtacagagaagagagatttgagcgggctgatgaggcagagggagtggagtgagggaagaaagtgccaccaattaatacaagctcaccaaatatcacaatcataaaatattcacctaaataattaatgaaaatatttgttaaaaaaaataataaataatgataataaaatcaatgaaatttctatgctgcactctttttgaataaccttttgataattttttagctaattttctttgagcattgttatgaagtattgatggtggtgtctagcactacgataaagtgtcattttataattgattagtaattttctctaatatattattagtgtaacccgatattaaattgcacaaattataatattatacttcacaaaagtgctaagtaccataagtgtcttatagcattttttttttatggttgcagtgcaatttgagacattctacaaaatttgaaaaaaaattaacacaaaaatagagtttaaatcgtttatttattttatactcgtttgaaataaatttaaatacatataacatatataacaataaaataaattacactactttgcataattcaaaggaaaaacaaaacaaaaaaacataatgttcatatatgatattatatatatattttaattatatgttttatatatataaaaataaagatatggacttaaaattttgatttctctataatgttcatatatgatatttttttggaatgaaaaatataattcattaacatagattccatgttatagaactcaaaatcattagtccatgcatactttcctaaactagtaacagagataatcaatgtgtgagcaaacaccattcatagatcacgaaatagcgctgcaagaaccaccaccaacatgagctaataaagaattaatatctaataaaataaactaaaaaataaaatttatgtgaaacttattaatccaaccaattgttacagtagaagcaagtaactctgccacattaatagaaaaatcacctagcacaccaaatgaccaagtcagcccaaccacacccgcaacatcccgtatcactccactcaatccgacaaagcctctctcaggaaccaccgaagcatcaatcacaagagcaaatgaatcaagaggaggtggcatccaccaagaatgtcatttttcaactgggtttgcaaagcataatcccaaatgaaaaccctgtcgaacatactccttgaattccgacaagtaattatgggctaaatctagaacatctaatattgactgcatattaccaaacaataccgagattttatcgtactaaaaccaccataaagtaatcatcatcaaaagcctcacaagaatatttggtattcttaaactcaaatttaatcaatataatttaattttattaattggactacatattctatgttattttaaaattttattaatcgaaattagtattaattaaatacatggtctgataaaacacagaatactaaaaagatacacaccccataaataatcctgattctctttctaaccattctctcattagaaactttattgttctgagaatataaatgtaattctatatgttctattcaatatttagggacttgtacaagtcatgtttaggatgatcaacataatacgtgaaattctataaaaaagtagtcagcgctaaaattagtttaatttgaacaatcagtagaggccccaaattagtttaatgttgatcttgatacaagtccaatcaccaacactagtggaaccttactttactcaatagtgtcaattgcatggtgcatgaaaaaaatctctggtgcaaccaacgattgagaattgagatgtccctagccttaaccttaatcactcagctctagcaaagctgatcgtgcctcgacccaactcggtgttattgaggaagaaggtgaaactcatcatacaacataccaagatagatactaacatagggtcataggcatgtggtctcatatcagaactacaaggaatattagtttgtaagataaatagaacaagagattcatcctagaaatttgacattaaggaactcattaaaagaatcaaagactgtaaatgtaatgagtgagacattaccattgtgaagagacaggatgtaaacactggctaaccatggcagatggctcagcctcaacgctttatataatatgttaagcataagccctgagaacgaggcttaaccagtaaagtttgtcttaaacattgatatatttttacaaatgaaaaacaccaagccagaattgaaaataaaacaacaaagataatacaatgagccgaaaccattggccaacccccccaattctcacgcacaacgctctctcttgttacaacctcaaaggctcaaacaagcactcaaaagattttcccaatttcttccaagcttggcaagtaaaggcagccatgactcagaagttttgtatgtctttctctctgtcagatcatatgaaggggtatgttgcactagctgaagcatcctatagcattttcaaaactcagtatttatttatttaccacacctcatgatacatggaatatttgaccataatcttgagtacagccatgacatatatatagagagtaataagtaaagctttcatttttctggacaataactagttacagttcaacttcaattataagagttaggtccacatactggtatgaacaaggaatgatttcaaaccaatactccggacagaattatacagtttactgcaaatcaacagttaaaaacgataaactacaagacaaaagactctgcacaagataagactggtgaactatattttatttagccaaactcaagcaatagaaaacaagctcaaatttcaaaagttcaaatagcaactaaatgcatgaaaaggtatgaagaaacaccaaagaagttataagataccttctgccaccattgatgtagatattgactcaaattgctttacaactagcataccaaactcttcacaatgaatgtgacttgaaaagaaacaaaagggtaaactcttttgagtaaagacagtaggattaaaattatgtttctccttatgcatcttcaacatttactttccctttgtacacgctcaacagcagaggcactttctcattatacttggtcacatacttctccaagaactttgattcaacactttgtatcacgccacaaaagctgatatcttctagtctcatcaatcccttcgccaacaaaacttgaacaacagaacatctaggaagtgttctcttttcaaagttgtaaaagagaaccacaggacagtttgaaatctttttcggcgaccaccccattttgttgactagaaaatccattactttctctatcttattttcagacattaccatgcaattcgggtgcatcttaaatgcattaagaatatcatcttcagaccaaccaaacctcatataagccttataattctgtttccaagttttcttaaaagtcttcctagacatagcgcgaatcgcaaacaaaaaagtgtacttctctggacaaaatcccatgtttttaatctcatccacaatactactgaatctatcaggcttcaagatcagaatctcagtaaaatgtttcaatgtagaagctatttgtgagtcagtgaaacctaaatgtctcaacaacccaagatttgtaatcacagattcccaatttttagctaaggacacccattggtgtttcgaagcacaaactgacacctcactaggcaagatagtcttgagtaagttaaaagtaggttcaatgttcttatccaagcttctatacaaatgatgaggatcagaagatataatactcaccacttccttcttagaatacccttttgaggagaaaaactcaaactttggcaaaaaagttttatttggatccgacaaaagagtctcaggccgtgtccttacaatttttgagatatcgtcctccgagaattcgtgttctctcaggaaatccagaacagagtcaggtctttctgagtttttgagccttaactttcgggaaacaacaatggcagattctggggacaacccacatgaattcacaaggtaagacaccgtaaaagaggtacctttatctgatttttccagaacagtggtcgcagatgaagagaagcttgcagcaaaaacacccaaataagaagttgagtttgacccaataactccatagctaagtagtgaagttctgaatcttgtacagagagtactaagcatatctaatcaaaagattgtggtggatcgaattaactacaaacggtgtgctttatgtatataaatgtggctttgttacctcagcagtgcgaggcagaggcagaggtagagccatgagcgagagagggaaagcgccagtgaaacagcagctttcatagttcattccacgcctgcagtgctgctccgagtgaaaaaaaaaaaaagagagacagcttgtaattggttagctcaacattacaaggggattcatctaactctatcttaaaataataaaaaccaaaatactcatattgtttgatctgtcccaccaaaaaattgaaactcattataaaacaattaagcttaaaaaagaaatatgttaaaagtagaagaaacaagataatatgaactttaatccataaatctttaacacaagctttttttatcctagttgaagaatcttaattcttaattctttatagcataaatgattttccaaccttttgcatgaaaggataatgttttatttataggttagagtcaggtatgagtgaacttggatgcggtaggatttagaggtgtcaattggatccactgatggggttaaatacaatatatattgactttgggccaattggtgaggcttaattcacaagataacggtcatccgtacgaacggagaccattcagtgatgtcaggtgtcgtgcgtagccatgttggtaccgagaatgtcaaagaatatgacattagacaaaaagatagttcattttttggtggtgtgcacagtcctgtgcctgacataggggacaaacccctaacatagtgggaccttgtgtttggaggatgccacgtaggatgaaatatggaggcttccaaacctctcttcggttacctgtattcggattaatcctgacagacctttcttcttctgggaaaagttatctttttcagaccaaagtagtccgatcttatcgtgtctgtaaggtgggcttacatttggattcggagtcgtagcctaacacctcttatgggttgatttattagcttgactgggcctaggattgagcatgctttggctaatatagggccttggaagtgtacacgtcatcaacctggaaacgcgaataactgttgattttttggtactaaattacgtacgcagcagaataattgtatatttgattatcaatgtaccatagtcccaaggatctctagatgtatgtacattaaatcaaaacataaattgcatggaagaaataaatacctcttgaagcctatcagggtattttttatttttttttctaagttgtatcattttaggttgattaaaaactcacatcgtagtcttccaaatcaatctaccacacacaaaggaatagtgtgggctactaggataaaatgtatatggagtttttgtaaaaatctcaacacatgagcaaaaatttttatgtaatagagagaaaaatccttttggtaaaaattctttttaggcttttaaaaaaattatgtgaaaaattctatttcaaaatttatgttcatcgttatacgatatatttaaataaactcaataaagattttatttaattaattatttaatttaaatctatttattaaattatgtttgattgtttgaataaataatataaccgaattctgttataaatatttatatctaataaccgattgagaatatctctcaaccacttgagaaaatatatcaactactttttaaattcaaatatttatcacaaatatggaattaaactcttactaattatagtcggggccaagtccgagtctagggtccgggtcacagttcgaatctaagtttagggtccagaaccggggtctggggtccgaatccagagtcagggccagttcgggtccagggtcgcaattcgtgtctagggtccaggtctagggtac

SEQ ID NO: 16568 - DNA, 3302 bp, Cannabis sativa
actcactcaatcatctttttttacggttctttttgttacaaattagttaacatactcaaatactttgagtaaagaaacacataaagcttaaagaaaatcagagtttagtttcttgataataatctgtcactttatcatcgttatgggttagaacatcaatattcaatagcaaaatgacaaaagacgaaaagaaaaggcattcaaataaagactaatatgaagccttgaaaaatgtactgtttgaaaaggatatggaactggggagtggtggcagtagtgatgaacagaaactccacaactaagattataatgactccaacagcaaaagtccaagcccaagatatttgtagggtcaataatctaaaatggtatactggatcaattttcttattaattagttcattttgtgactttccacaatctaccctaaacttttcttctgtatacattgaacctaaaatgaagggttatatagtcaattacaatatgtgattcttttcatatatctaaagttttagtaaagcatagtgtaataattatggggttaagtaataagctccaaacagaggcagctcttttgttcaacctgcttataattatttagtattttagtgtgctttgaagtttgaactattcaacctgttttgtttaagctaaaatcttaaactagtggcaaacttggtggttttatgttttggctttttatagtgataagcaatataagcctatttcttgtccaagtacatttcaatataatagaaaaagttcattgttgattggtttggtcaattgattggtgactttttctttctgtattttgaattgagaaatgacttggaaaacataataacagtcaatcagaaaaaaataaggtgacatacttatataaataataatgcagacacaattagcctccttaatagtagcagctatttttttaatatttttattttatttttaaagtaaaattaaaaatattcagtttatcaaattaagtaactaattttagtcttcataatggaatataaaataataattttattgagttttaggagtttaagtaaatgactaaactatatgtagtgaagccaacaactgcaatatatttatttattatttaacctaaacaaaattgataagattattattagccaatccatagccttcaaaaaatggttgtttattcctggtttcactaatttattatactgagacatcagcaaagtgacacataagttttcctttacttgattttcttaattgaagagtaatgtacttggtttgaatgttgatgtgtccacatatatccaatttataaacatgtgttttcgtatatatcatttatggcatttgattttttctttcagataaattatcttatgtaattttttcttaaaaaaataattaataattatctgatcaaattataaattaataaaaaaaatttgaccaaacagatcaaattataaattaataaaaaaaaattagactgaacagaatttatctctcttcgtgataagtccaaccatataaataaatatatattctgtcacatttgataatgtttttattttaatttttctaaataagaaagaatcacatgatgcaaatttttatgtactttttccatagcttagacaatttcagtatatagaagaaaatcactttagaatggaatagaatttatttatttggtttctcgtattttggtttcacattttactacggaatctcaatcacttttcatccatctaaaaaattgatactctctatagaaatagatgaattcatttgtgaataaattttatttgtctttttgtttattattttattttattttatttggaaaaaagaagaaataatttacgtggcactcagtaggatgacacgtgtcgtacaaatttagacttagacggagtatactcacttttggttccgtccagatcaagtcatagccaaatcaattaagtctgaacttcagaatgatccatctgcgcaggccccaagtctcgcactactcttagtagatcatcatgtcaagcaagtgtcactctccagaaagaagcatacaactgtaaagatctttagatatatttttcttaaatatctagacaattacagcccatttaaaatttccacctttataggattgactttatacgattaaaaaattatgggatttgatttcagtttccctaatttttctcatattaactcgtaataattgtatatgtaattgtcatataaatagtgaggtcatattactgtttaaggacttcatttttgcattctaaagagtagtcactctgcaaaaatacttgtaagctttttcgagattatcaaaaaacttatttggtcgaatcttgtgatcttgataattctctataagtaatataactaaaagaggagtactattatccagagtcaaacctctataaatcgtgtgtgttctattgctttattttattaatattattcaatcaatcaatatcatcactttaaagatttagcctcattggttagaagcaagatcaacaatgtgcaataatgtattttttttttatttttattaagaaaaaaaaacaacaaattattatttttagttaatatatttaaataaaagaaaaaaaaaactacaaaattgcatggttttgtaattaacaattagaacaaaatatttttatgttattattgacctcaaaattctctaaacaagagtctcgtggtcaaaatgataatagagagattcgaaaaaagaaggatgtccaaataaggctatcatcttgggacaaaggccaaagatcacaaggtcaccctgaggggaccacgtgtcgcgtcgttggggttcccccttggccatggtgccacgccactgggtgacctcctctccatgttttcgcaccattgggggttcctcccttcatggggtgctcaaggttcctaaggaggaccctcctcctcgcaccaatcgatccccaaagaggacccctctcgtgccatgactttaaggctctagtagccattcaatagtctaaggcccaaaggaggggtcaccacctctcaagaggtccatgcctccaaggaagggtcaccacctctcaagggatcgaagaccccaaagaagggtcaccacctcccaagggatccaagaccccaaagaagggtcaccacctcccaaggggtccaagacctcaatgaagggtcaccacctcccaaggggtccaaggccccaaggaatggtcaccacctccaaaggggtccaaggccccaaggaaggctcaccacctcccaaggggtccaag

SEQ ID NO: 16569 - DNA, 8105 bp, Cannabis sativa
tttttcatatagtttttctattatggttttctatttttttcatattgttttgtttttttttggtgggttccattcctattgacctgtttagtggtaggaatttttttgttggcatccttctttgtttgggtttaagtttcgaatttcatcacatcttttaagttttcacttcatgtggcactgtcaatggaatgaaaagtaagaactctctaagtatataccgataattcaactaataaagaagatgaggtattaattctctatataactgtcaaatgattctcaggtttaagctactaaacgagtaaggaaaagatttgtatcacataatctattttattttcagataaaaagaattaaagaaatgtaatttttataagcatataatgttcaacaatcagtttatgcaactcagtagttgttaaaatatatactaaataaattaaatcaacactaaaaattgtacttcgaactaactatttttaaaatacacaactcgtaatttattgattttctttgttaaaaaaatgagacacattttgatcacagtgctgcagtgcatatgcatcataataaacttttcttaaacttgccaaaaaagaaaaaaaaaagtacttttcttaaaattatatgtaataataacgattttaaaagcaaggtgataaatggtaatattaattattgttcttatcatttttgtgcatggatacatgtaattatttcttccccttattatgatatataaatattataaaatttagtgttacatgatgattaatttcaatatttatgattgcatttattataatgataaatgctgataagctcatgttggtgtcaaaccaaattttttggggggacaattatgtggattcttaaacttttattaagcatcgaattttcacgttaaaaataaataaaaagggcactggtggcctcctaaaacatcatcataacgattcccatataaatttcataaacgtaattaatgttggaaccttcctttccaccgtatcaatttttgaaatttagaattgtagccagtatttcatagacaccatttattgttatttatttttcttctttaatatttcgtagaatgatgagcatggccaccgatttgaaatatcaattattatgtatattgttgggtaagaaaactttcaaattaatcccaacatttccattccccatttaaaatatagttcgaaatataatattttttccattaaaaaattaaaaaaaaaaacaaattcaaaataggcctaaaatgcgcggcggcaatgacaataaaattaggatgcttttaatagttgtagttttatatactttcttttgtattagttttaattttatttattattataggaggatgtagagtttaattaccagcttataaaataaaaaactctaataattttttttttctaaagtattaaaattatcataactagtaaaaaaagattttttttttttttttttacattttaaaattttttttttttacattttttttaccaaaatctatataaaaattcacacaataactaatgaactaacataacaattattggaccaatcaaaattataaataaaataattttttaaaaaaattaaatttgaataccaaaaaaaaataagagataacatttacagcaatctgtcgctctcacacgtgggaaatatttggaccgtttaaaacttaaaataacctttaaaagtggcaacccgtctccacctcactcgtggcgtaaatttccacgtcatcctcttggaaatgtaaaattttatatatttaaaaagaaagcatattcaaaattttaacggtcggattttttgacatacacgtaatcacagccgtttgatcctcaatcatgttcgacgtttaaagcttgcttttctttacatctcttagctgtccagctaaaacagtaaaataatggcaatatgttttttttttttaacagagaatctaaagggacaggggaagagagagactgacattttcttccatttggagagagaaatagagagagtttgaagatttttcaaatacaaatttgattgtctccttccctgcttgctctttctgaatcagttatttttctattaggagttcaaataagtcaaagtggcaagtggggttttcatatctactaccactctcgtgtccttttttttgaaataagaaactattttagcttctgggtactctctgattctgagaaattcgcttgatgaaagtgagtgacgatggttttgtgaaggtccacatctgtattttcatggctggttttggaatcattgtggagatatgaaagtgggttttggagttaagagagagaggagagattttttttaaggggtattttccttttaatattttgcatagttgatacttaaagtgagagaaagtgagtggaagagaggtttgaagatgaagctatagtaaattcttgggtttgctttcttcaaagagaaaaagacaagtttctggtttctgagtcttaaaggttggtgcttgaggttgtttttactttcttttcttactctcagcttcagaatacgaaaaagtcttttcctttttttctaatcatccttaattaactgtgttatctttgtaaattagatgcatatatatatatttatatacctatttgtataactaggctatcattgttttttatttttaagaactgttggggtacatcaggagtaggagaggaaagagaatttagtttgacaagtctatatctgatgattattaaggatagaaccctttgaaagatcttcaatctcaaatcaatttgaggtaattttctacattgttttgtgttttcttaagaaatttatagtggggttggtccatcttggaaaattttgagtacactctttatatacaactgtagatagagactcctgtcttctcttcaaagaaaagtctctctcccctcttactctaccagatagcttaggtctttgggggttatataaggcaataaggcaaataattctcctttcccatccctttcaagaaatcttgaccataggatacatacaaaatgccgatcaagatcgagtcagcaatcctcccattttctatattcaacagctccatttttgaaaagtaaagatcgtagctttaatttcattttaccaatttaccccaatgaagtaactagaaacggctcctatgttcaagggcatatttggtatagcgtatgcatgtgccgacggcttcttaattgggggagcacttattttttagccgttaaaagtaacttctttcattgtcatcaacaaattttatatcttaaactttaattatcatattaattagtttatgaatatattttctttccttcatttacttttcatttggcattaaatgatcacttgcaataagctagaatattaataaagaactcgtgggccatcattaggtacttcgatcttgttggtcggttcttgtttttcagcaaacaagcattgtgtgatttgtacaagattctcgaagctcttgatgtggtgctgtttgttgtttagatttttttaatgcattctgtgcttatttaatttcagccatattctatagttaaaatgttttataataattgcaactgctccacggctcctaatttttttttatgtgaaatactatttgtttttgtcattttttataactaataaaaggtttggttttcttttccagtttttcagtttaccaaatttaatcaaagccaagatcgaaatcatggttgaagaaagtggaaatgaagaagttttggttgatgataacgtgtcaactgaagactggctgtcacacgcacaagagcttatccctgttgcaatggctaaagcaagagaggttaaaggattcccaggtagatggaagatgatcatatcaaagcttgagcaggttccttcacgtttatcagacttatcaagccatccttgcttctcgaagaacactctttgcaaggagcaattacaagctgtgtcaaggacattgaaagacataattgagtgtgcagagctctgtatattggagaaatatgagggcaagcttcggatgcagagtgatcttgatgcactttctgggaagcttgatttgaatttgcgagattgtgggcttttaatcaagaccggggtgcttggtgaggctactctgcccttatctgttgcgtgttcttcaactgacacggatgttgctgcttatggcaacataagggaactctttgctcggcttcagatcgggcacttggaggcaaaacacagagctcttgactgtcttgttgaggtcatgaaagaggatgagaagaatgtcttgactgttttaggtcgtagcaatatttgtgctttggtacagttgcttacagcaacttctcctcgtatacgggagaagaccgtgactgtgatctgctcccttgctgagtccggaggctgtgaaaattggcttgtttctgaaggtgtgctgcctgctctcataaggcttgtggagtctggtagcagtgttggtaaagagaaggctacaatttcgcttcagagattgtcaatgttggctgaaactgctcgtgaaatcgttggccatggtggggttcgtccgctgattgagatatgtcgaaccggggactcagtttcacaggctgcggctgcctgcacgttgaagaatatatcagctgtgcccgaggttagacaagctctagctgatgaagggattataagggtcatgatcaatctcttggattgtggaattctgttaggatcaaaagagtatgcagctgagtgcttgcagaatctcactgcaagcaatgagaacctaaggaggtctgttgtctcagaaggcggaattcgaagcttgttggcttaccttgatggccctttaccacaagaatcagctgttggggcattaagaaatttagttggctcggtttcaatggatgtgttggtttcccttggcttcttaccgcgtctggttcatgttctgaggtctggatcacttggtgcacagcaggctgctgcctctgcaatctgccgggtatgcagctcagcctcagctgagacaaagaagatggtaggggaggccggttgcattccccttcttgtcaagatgctggaggccaaatccaacagtgcccgtgaggttgcagcacaggcgatttccagcttggtgacactttcacagaatcgcagagaagtaaagaaagatgacaagagtgtgcctaatctggttcagttgcttgaaccaagtcttcaaaacacagcaaagaaatatgcagtattttgcttaggatctctttcttcaagcaagaaatgcaagaagctgatgatttcttatggggccattgggtatttgaagaagcttagtgagatggaaattcctggggccaagaagctgcttgaacgtttggaaagagggaggttgagaagtttgttcatgagaaaataggggaaaaaaaaaaaaagttgcaaataaaatatattgagtcttgtataatgagaaaaaggtcttaattttcagcatgttagctgtttcattgtctatatgaaacaaagtagttaatccatgaaatgggacacttatcaatctcaaatgttctcctagttatttatgaaatgtataatctcaaatcactatgtttctcttttgattcctatttctacggaatgtataatataccttcattttcttggtatcttattctttttcttacctttattcttattcaaataagtgtgtttattgcatgaacaggagaactagactgacttgtatcatttttaaaggtgctgtttttggtggaacatttggtttgctttcttagccactacatgtaattgtattaatttataaagctggtactttcttattataattaggttataattactcttttggactcatagtcacaaatatacttcttttagcttgatctacttgccgacaatgtcataaaaaaaagataaaaaatgatttgattacaaagatttgagatttgtgtttagctatagtgaattgtgcatctaccaactatcaaggtcggaaaaaatcaacatgacatcatatggaagatatgttagttacaatatcaagcaaagcacaaaggattcaagttaaccccaccattattttgtcatatgactaatattttggttgagcctcttgttaactatacaaatattatcaatatatttttttcttcaaaaggtctttaaaaataaaaaagaacagaataggagagacaataaacgatattcccacttcaatcgtgtacatcaaattgtaaggggaactctataaatataaatcctacttttttttaataataataataataataataaattcatgtgtcgtggataggagggagggatttcattggtgttggggggcgtaattagacactcatgaatgatgagcacctcaatcaatttagtgatgtttttttttggacgtgaagttctttcaacttcaaaaccaatgtggactctgaaccacaggagtggtccttcccgcaggcaatcctcattccttgccaaaataatagaattgcaattactgatattgttcaactgtgataaaaaaccatgagcaaaaaagtaaagcacaggtccaatttggtggagtttttctcttcttcagtttttcagtctgtcaaaatagcaaatattcttccagcttcttctgttgtctaaatatattcactgcaaccaaccacagccaaaccagcttgtccttcttattaggaaaaggactctcttggaatcttttgaagcttctcatattacaaagggctgattactttggtcaaaactccagcaaaacttgtattggtgtctgcttcccgtgcactaattgttcattttgatgtagacaagacagccatgtctcactgtcaataagaatatgaaagaaaactcattcatcatatttctggccaacactaccagcattcaactttcttgtcattaacactgcttttcatcttgcacaaagtccaaatttcatctcagtggtaaagcttctgctagtaccctccacagagacatgccattttgcatgtagatttttgggcagccaaattttcctccaaatccattagttgtgcccttgcagaccagagtattcttcgaacttccagtcctagtagggtatccaatggaagttacaagagagaagctacttttttcataatagttctggcttctaggattcctcttaccattggtcgctggtcttaatattgctttgcacttaggatttcaagtgggcgttgcctaagttataattagattgttatttcttgattattcaaaaggtacgtctgctctctttattctttgagaatcagttgattattttttttatctgaatttccaaatcattaataattctattattagtccaagagaagtttgtacatgtctcattgttgttacttgttagtaatatggaatttcaccgtagacttggaaacatgtagcaaaacagaattatttacaacaagaatatgaaaagggacagaagaactgaagcatcagaagggtttgaggattaagcgactaaagaactgaggcatttatgtcttgggttttctagtttaaaccatcagatttgtttttgttaaacccaaatacaaataacactataattacaagatagtgacaaatattatatggtttagatgagatttaataatggataacgaatctagacagacattgctattggtcttactcaagccaatggtctctggtatcccataataaacacagaaaaggaaaaaagaaatgaaaagaacaaatattggaatgtatcgacttgttcgaggccataatcaaaacgagattaatttgataggcacggagaatcgatattatttgatatagccaaccttcaatgcaaactgcgccattttatacgacgcttttgctctgcaaattggcctctatttttcaataacataaatcataacttaacataaacataaaacaaataagataaggaaacctaacaaaacaaatagaacaacccacacaaggcaaatgacaattgcaaaacttattgtggaaaagaggcaccttaagcttccattttataagct

SEQ ID NO: 16570 - DNA, 2580 bp, Cannabis sativa
tactgaggatgatggttgataagtctactgaattgggttcctttgaaggattttgtgttaggaagaacaaacttagtatgagccacctccaatttgcagatgatacagtattctttgtagaagacattagctcaatccgaggatcactggatattatacaagcattttgtgatcgttcacggatgaaagtgaacatgaataagaaccagctacttggattttgagaggacatatgggtaggagaggaaatgctagacctttttcccggatttggcaagagtaatctactgcaaggaacacaagggtcaaagaaatggcggtcgaggatataggagcatcaatgtttaacttcggttggaaccttcatttcagaaggaacttgcaagacacagaagtaacaaactttctggttttgcctcagttacttgagcacaagccagtggttggaatgctggaagattcaagaatctggaatttggataccagaatccagtggcactttttcttgcaaatcagccttccaagagcttgtttctgggccacaggaggttagaggaagggtaggctaaaatgctgtggaaaaattgcgctccttcaaaaatctaagttttcggctggcttcttgctttaggcaaactaaatgtccatgaattgatgcaaaagaggaggcctttcaaattattaccactgggctggtgcatttgctgtaagaacagtcgagaaacctcttcccatttattattagagtgtgtgtttagccagacactatggaccagaatcagcaggttgatcagagagtttggtgtactgtggtgcatgcccaaacctgttgacagatgttactttgcaagctaaagggagatatgagggcttccaggctttggacgacagccatattagctatgttctgggctgtatggttagaaagaaatgtgagaattttgaaaattcagcaaaaagtacagaggaggtgtgggaaaaggtcaaattctgggttgctacttgtgtctataggaccaaaggttttgagggtctgtccttccaggatctcactagagaatggagttgcattctgcaacaagatttcttcgatttagcctacgtttttcaagctaaggttttatctgagaattactaggtattacttatctaagattactgctctttacaataaatctgttaccaagttattcctccactgcgaggttccctaatatacgtgggaggtttcacttgacctctgtctcttttttaaaaaaataaataaataagatcgtgtgttgtttcaaggacaccatcagcagctaaatttagagctttttttcttggcatttgtgaaggaatgtgattagaagcctacctaatgagctaagagtgatgatggaaaagcctaccaagatgcgtggtaacaaccaagcttccacgagtatatataggaaagaatcatgattatgttcatcatgacagggaccaaacacattgatatagatggccacttatctgtgagaagattaaaagtgctctgttggaactggtttacacttctacaatacctcatgtagcggatgtgcttactataacttttccggggactaatattgaagaactaagttgcaaggaatgcttgatattctccacctagcttaagagggagcatgggaataatgtgaatatattattagattgatttgttgcacaaactctctctctctctaatttcttttttaaaacaaaagcatttactcgttggaatcatggattatccatcctaatattgtggttcttgaggctgtacggtctttcctgcataaaattcagaaattcctattcctctctaaacctctcaaaaaattgtcctttacctgccactctaggaagggtccaccggtcaataaaggagaataagcattgcagtgaccctaaaagaacactgccaattaggtaaaagtgtgatttggtactcatcttgtataggatgtgggattaaatttaaaatgttaaaatatatgaaagctggtagtattttccccctaccttctttcataaggcaaggtctctcaaaccagtcaccagaataacttcttgtcctattcagacactattttgttaaactttaatgcattttttctgtcatctaaatatctatccagtgtgattgttttcttaacacatggttttacttgttgatttggatacattgtgtgttttcttaaaaataaatgaaaaacagtttatgacatcattttatatagagagcttgtttaactaaaaagtgcttcaggtgaatgtcagtcaaccgattggaattgtgcagtatcctggtgtggcgaaagggctgtatgttgcctctccctcaggtttgtctgctaaatttgtgattagaaaagaaactccttaaacacaatttttgctgataaagttttacatgtgctctctcacacctcttatgatgaaacttgggttttcatctgtagaaaatagtgattcgaattgtgtgttgatttcatagaataatacatatttatatacaaagttaggagactaaatatctaattcttttacagctaatatacatctaat

SEQ ID NO: 16571 - DNA, 6946 bp, Cannabis sativa
  modified_base (2162)..(2162): a, c, t, g, unknown or other
tggcacattggtatataaaataaagtttttttcactcataacaatgtaataataaaacaaaaccgtttgtgtcaagatacattttgttgaagacattgatagtttacgaagcatctcactctttttctgcttttcctattactattcattttttatttttttgtatcgtgtaagatttgtttcattacacttttagtgctgatctctttaggttgtatgaggtatataatatattcttagagctttatattgaatacaggtaaatcacattgaatgcaggagatggattataggctagaagcgcagaatggtgtcaagtttaggtaagaaaaagaaaaaaacaattcgaaagttattggtgacatgcttttcattattgattgtcattcagactagtagttggtgctgctaaggctacagctctatcatgtaccgaaatctatattttatgtgctatcagtagcaattagtgtatttgtgaagaacaacgcaaatttaaatgttatcttatcagcttctttgtagtattaatatatcttttcaaaagtaaaaaaggaaaagattaatgatagttttctttatagtttggtaacatatttcttatcaacagtattgtcctttgatagtattgtggttatctcctgatgatttttttcttattattttaatagataccatatcaattagtctgcatctcagtttataacttcatcccatcatctttattgaatgtattatatagttggccagtcctactgatggcctgattgttattcatcttgtgcctgaacagacagctgtatggtaatctgccggatgttgtggtaccagaaatgtatgtgggacaaacttcacgccgagttctaattatggagtgggtggaggtattttatattttaacttgtttcctctttccaattttgttaatttatgttgtcctacaatggattgtaaaaaagttcagctggaagttgccaaattgtatgacatatccattttccatgcactgatgaaaccggaaacttcaaaagctagtttagactcacaagttgtttagatttgattcaggatgaaggtaggacattaaaacttgcaagaaatataataatatgagatttgactttggtctggagtacaatcttttcatctgaaccaatgctttaaatttgaaagaagacactaattttgcaccagtagtccttacaattagaaagacctatccaattttgacatctgttttttcggtggataaagataattattaatatagttgtcatcttttcctggatatacttatgtatatttttctctcttccgttcttgaggaaataaaactacatatttttgtgcgccttgattttggatgtaagctaggtccatttactgatgtgtaatttaggtaccacactgtataaaataaaaaaattagaatattttaatagattaattaaaccttttagatataccatgcatgtagtgattatggtttatttacttcttacattgatgttgtaggggcaaaagctgtcaggtgtgaaggatttgtacttgattgaggtcattcactaaactaatgtcacaatggctttttgaaagtgaatctattttcttttatttcaatttaccctttggcttaatgaggtgtcttctttctcatgctaggtgggggtttactgctcgtttaatcaacttttagagtatggtttctaccatgcagatccacaccctggaaaccttcttcgaacaaatgatggaaaacttgcctatataggtattgttttgttgtgagactagttacaaatgttgggagcccttaggctcttttgatgcaaagagtgatttactccatacatttcataccctcctctctcttactcacctatatatatatatatatataataatttctcactcaaaactatacattgcacaccctcctttctcttactcacctatacattgcacaccctcctctctcttactccaatgtggtatcaaagccatacaccctcaagtgggaccgacgttgtggaaggggcgacctgcggctaggcccagagtaggctactgtagagtgggctgccgtggacgtcggctccaaagggggatgtaatgttaaaatcccacattgaccaagtatgggattggttagtagtatatanactacttgggcaccctcctctcttaggctagtttttgggagtgagttctacctaagtggttgtatcattcttgcaacttgaaacttaatttattctttattatctctctcatcatcgtaaagtctctatattgtctctcttcatttgtagtgtttgagctgaactatgcagactgatttattagaccagtttttctattatttgcagttatgtttgtacgtacataattttattttttcccttccagattttggtatgatgggcgaatttagagaagaactccgtgatggcttcattgaagcttgtttgcacctcgtaaaccgtgactttgaagcattggctaaggacttcgtcacactagggtatcaagtctactcatcttcctaccgtaaccaaatattattcattgatcttgattttaatatggtttgatacaaaattttcagccttattccaccaactgcagacagagtggctgtaacaaaggctttaacaggtatctctttgaataacctacgaattcatacgcaaattttcggtatatcacatgttttggctttcttttataaagagtttctgataattggtatataacgccttcactaattatatgcaggtgttttccaaaatgctgttgcgaaaggagtgagcaatattagtttcagcgacctttcaggaaacttaggagtcactatgtaaggtgttctcgttttattatatgcaaaatatgcatcttatgcacaaacaatataatatagtactttgcaaaaaaagaaaatgcacaaacaatatagttagccacatgatcaaactttgttagtttcttatgcaaatttactctaggaatgtgattgctaaaatgtgcagacagagatttatggaacaatgcttcactcacaacttgttgggcactttggttagaaaagaacaatataatttctaaagatacattgatggatttcaaacaaatttggaagaaaaattatgggcaactgtatggggttcaatacagaagattttaacatttatcctttttccgatatacctgaagattggcctttatgtttgttgtaatcaagatgatactgcattaaaaaaatattttatatgtatcatatttggtgctaaatttctttaatgtttcatttgacagagtgttctctctcaccctttaacttgcataataaagtttggtccttctcgattgatatatttcttttaatgtttcatttgactgtgtttttccttaccttttttattcttcaggtataagttcaaattcagaattccttcatacttttctcttgtcattcgaaggtacctaatttttttttgaaaaaaatgtctagtggacttagttatttacttttttgatctcaaagaaaaatctgtattaatcgacaaacaagaatagtagacctcgtcattgttaccttatcagctaatgaaattgcttgtaatgtttactgtctctacttttctagtgtattagtagtttttaaatgtaaactcttttgttcttctcttggattttagccttgctgtgttggagggaattgccatcagttccaatcctgattataaagttttaggcagtacatacccctggattgctagaaaggtactaactgatagctcacccaagctgcagtcatctttgcgatcgctcctttataaggtgaacccaaaaccattgatttctctttgcttttcgtaaattgatttcttagttgtgtaaatctagtacactttttctctttatttaccaatatatatatattcatatatcttctcgtgtgcctgattctttgacggttttggcaggaaggtgtttttagaattgatcgattggagtctcttctatccgaggtgaattttattctctcctccatcgtcaatctttgacttgtttaacatcattcaatcaatttttggcaatgtccacttttatagattgtagaacttttggaacatttttctcatatattatgtaattaagcataaccgatttattgatcacttcatgtacttgagtagtttggcctttactttctcaattctgtttggtattttcctgccccatggttccaattcgttagattaacattttaaagtcactgtttcccccaatcatagtcacttcgtgccagagcaggaaaggccttggttcagaatcaagaaggtggtgagtccagggtggttatcaagcaagtcctttcctttatgctaactgaaaaggttagtgttgtatgcggtattgtattatccactgttaatacacaagatcaaaaatttaatatctaatgtgtgaatgttttgataatgacaatttttagggttcttttgtgagagatatacttcttcaagaattggcaaaggtacacaaacaactgaagtttttatgcttactgaaaatctcaatcagtgctttattgttacatcaataaagctgcatacccatgttggtctgtttctcttttaccgaatcgttatttgtacatattttgcttctttcttaatcacttttcatttgttacagtgttacattaatcatttatctatggctctattcgacgtgtatgttaaaatttttacttggttaaatccatagggtggcctataagtagctgatgtagaattctgaatcaagcttagttcttaaatttgttccgttattaatatattgtcttccatgattgattacagggattagatgcacttgggctagctttatcttctgcagcaactgcaaggctcccttttggtattactttttcaatatccagaatgactgatgaagataaaattaacttgacaaccttgtatcgccttttgctactgatggcgagcgttcaagaaacaggcaactcgcagaaggtaagaggaaagggacaggaaaaataataaatcatttgaccaattccattttctcactcctaatgtagattatcttataatattatatgatatataactgtcataggtagttggagttggccaacaaaagaatcaagaaataaacttggaggatgtctcatcagtgttgaatcaacttgcttctatcgatgaagttctacctatcctttctattattcccgaggtaaaactaaacaacttattttaattttattattcccaataaccgaagaggggtagctgaaatggtcagacattaggtttgaggttcgagttcctcctaggtacctacataggaaatatgattgtagggttaagcggagatctagtttcaaatattgtagtttcgtataacatgtgtactctcatctcactcatctcgtaataatacattggcagcttccacctgaatcacaacagcagttgctaaatcttccagtggatctttcgggtcggttaatttctcgggttgctgcaaggactatcagaagagtttttgtatagatatacaagtgtttttgtacaacttcttcattaactttctagtttctataatacaaaacatcatttcggcttacagtcgataacccaatactgtagatagtctacgttttcatatgagccaactttctttccctattgttctgcaaatttttagagaatttttggggatagtcattcctattggttcaaaatattaaatctttttgagaatatcagagttgtctttatattagagctctggttcatcatgttaaataagtcttgatgaattgatgttagatataataaattatcgaaatattaaattagttgaattgaatttccaaaggcattattataatgaggattgttagtgttaatttcctattataatctctcagttaaatttcgtatttagaaatacatgctagaatattttttttttattattttttcatgatgttatttgttatgcttacaatatcattcttgtaaatttttgaaaaatttcaataatttacactgtcgaaaatatatttgaaatttctaagaattttgttttcggtacattgtaaattatttgaattttttgaaaaatttataaggtgatacgaatacagctatgaaaaaaaaaattaaataaaaaatatttcactatatgatttcgggcgtaaaaattgactaaagattgtaattagcacacctttattatatattaacaagacaagaattggttgggtcaagttcatgatacactgatcccacacatatcttgaggtagaagacaaccaaatcaattaaatccaattcttaatttaaaaatcaaatatgctatataaattaaggtagacttaaaacattaaaaaggaaaattaattcaactaccttaaattagcagaaatcaagtataatagcgttaaacatataatcgttaattctaaaaatagatacttattcttagaattacactgcatcaacaaactgttttagcaaaataaatcaaatgtcatcaaatggaacatttgtaataaaatgtatattaatgctagtaactaatggtaagagttttatttgtatataaaatcatatataactctgatatatgtatatgcacttatatatgactgtacaaaatattaaatttgagtaatcatataataattggaatattttcaatgatagcatgaaattattaaacgttggttttttcagaatccttgaataaaaatgtcttccatttttctcttcttttcttatctttacagttatttctatcaatctcaagaccccatgtccaatatcttcgtttctcagattctttttacttccacactttgcttcattgtcaagttctgctttaattacaaagatctaatgtattttaa

SEQ ID NO: 16572 - DNA, 4075 bp, Cannabis sativa
aaaaagaaaacactatgatcatattcaacaaaacttcttttctcaattaggagttcttattctaatgtatgagcccttctgaagataatttgacacttctgttaaggtttttctgcatttcaaaagattttatttttattttattatatttgaaataacattaagaaactaccagaagtttagtttgaaggatttatttacactgaaatgttaagaaacatgtaatttagtacagcaagcccttctcgttctcatatagctttgtgtatatttgattaataacatgtttcattccttattttttcgattataatgatgtgtttgttctgaaaacttccaggtaaggacactgtaagaaatgcgctctcagttagcaatggcgtcgaagaatagaatccttaaaagagagttcaatgggcttaagaagaagcattcttcaccaaccatgtcgagtgttacctacgttgaacgaaacaacatcgttaattgattgctttcttaatttatttcaaagatgtcacaagggaaactgccactggcaaatccccaaaagttcaacttcttctacggtcaccgtaagccttcccagaaccgccccatagtccgaggtggcctcttttccaaccgtcaaaccatcagacctccaaaacctgaacccaaacaccaatcacagccgtctgatctctctaaatgggacccagatcactttccatcccaacagtcgaaaccaagcaatgttgcagccgcaacactctcctttttgtcccccattgctcggttcattgtcgatgcttttcgtaagaaccagtcccagtgggggccacctgttgtttttgagctcaggaagctccgaagggtcacccccgagcttgtggctgaggtccttaaggtacaaactgaaccagctttagcttcgaagttcttccattgggctggtaagcaaaaaggttacaagcataactatggttcttacaatgcgtttgcttattgcctgaatcgtactaaccggtaccggtctgctgaccaggtgcctgagttgatggaatctcagggtaggcctcctagtgagaagcagtttgagattctcattagaatgcactctgatgccaataggggtctcagagtgtattatgtgtacgagaagatgaagaagtttggtgttaaaccgagagtttttttgtataataggataatggatgctttaattaaaacgggttatttagatttggctttgtcagtttatgaggactttaaggatgatggtttggtggaagagagtgttactttcatgattttgataaagggtctttgcaagtccggtcgaattgaggaaatgtttgaggttctggagaagatgagggtgaaattgtgcactcccgatgtgtttgcgtacacggctatggtgcgagtattggcttccgaggggaatttagagggctctttgcaggtttggaaggaaatgaagagagacagagttgaacctgatgttatagcttatacaactatgatcaatggtttgtgtaaaggaggaagggttgagaagggttacgaattgtttaaggatatgaaggagaggggaattttgatcgatagagctatttatgggacattggttcaggcttttgtagtagacgggaaagttgggcaggcttgtgatttgttgaaggatttgatggattcagggtatagagcagacttgggtatttataactctcttattcaaggactgtgtaacgttaagcgagttgacaaggcacacaagctcttccgagtgactgttcaggaggatctagggccaaactttgagactgttaatcccattttggtgtcttatgcagagatgaaaaagatggatgagttttgtgagttgcttgtgcagatgaagaagttgggatcttccgtcatggatgatcttaccaaattcttttactttatcgtgggaaaggaggacggagtaaagatggcgatggaagtgttcgaggacttgaaaatcaggggttactatactgttgcaatctacaatattctgatggaggctttccacagaattgggatggcaacaaaggcactgtcacttttcgatgaaatgaaagatatgaatgttcagccagactcatcaacttatagtattgcaatcgagtgttttgtcgaagatgggaatgctaaagaggcttgtgcgtgctacaataagataatcgagatgtcttgtgttccatctgtttctgcatatcagtcacttgctagagagttatgcaagaccggtgagattgatgcagctatgctgctcgttcgcgactgcttggctagtgtgagaagtgggccgatggagttcaagtatgcacttactattatccacgcttgcaaagctagaaacgctgcagatgtcctatcggtgctgagtgaaatgatgcaagaaggatgtcctccggatgatgttgtatgctccgctgttatcttcggaatgtgtaagtatgacgctatagaggaggcaaggaaggtcttttcgaacttgagagagcgcaaagttttaagtgaagcgaggacgatcgtgtatgatgaaatactaatcgaacatatgaagaaaaaggcggcagacttggttgtatctggattgaagtttttcggtttagaatctaagctgaaacgaaagggttctaccctgctgtcgaattgaagatctgaactcggggaaacttactttcttgcctactaatcttacagaaaggggtcctcaagggagctgccgatgatgatgctattatgtgtcatgacgtcttagacaggttatttacttccacttaattctgatgctatataaatgttatttgagattatacttatcttatctgtgagattgtttattgtttattgttgcccttaaatgtgttcatctgttactcccatcaatttcttaaattaaaatgagccctttttttattgcctattatgtgatttattaagaattaagagattatttttgacagaggacgatgttctaaattagtttttaaatgtttgttttagatgttgctagaacgggttgagatcgattgcaatacaataaatataaatcatgactgatctgttgttatttttttgacataaataatcaattttctttttcttctttcaaatttcaaatgtttctgtagtttagtatttagtactgtatgagcacttgtgaaggagagtttgaatctaattttgtgactttccttggtgctctttcagcttgttctctcatgctaggctggtagataagggtctcaagatctcaagatgaagcgttgatcttttggggtgagcaaggcgtttgaatcaagctcgggagtttgtaaaggcaatacctcagaagcccaactcagatgtgtgggttgctgctgtgctgaatttagtttgtaagatttcatacaactcttgctataattgtggcagtggacaatgattgctactctcctttgaagcagcagtagagttgtgtcggctcaaatgtacgactcgctgatgacaccagtactgcagcagaggaaaacagtagagataccaaagaagaagaaaaagaggtttggtcggagggttttcggttggtttacctgctgcttaaaactggtagaattttcaaagaattgttatgataaggagaaacaaacgagtgtgataagaatttaagagttaatttccttaattgagatttcatttcagtggaaataatatcaataataatggaatcgaatggtttaatctgtatcttcttcttctgattggtctcaaaactacacattaatttgttgcatgaattaatttataagtgtttgtctttgccatctctctttattttcttcttaatttaatttcatcattatttttccattaatgggaatcgtacgtactggagtgatcatatcaaaacatatgcttaaatttgagaatatcataatttatatttatcattagctcttgcaaaactttggatgtgtactgctacatatgttgcttgtaatcttcaatactcaacagaaagaataatttactgtgactatgactatgagatatgcaaaactggattgaagaatca

SEQ ID NO: 16573 - DNA, 3166 bp, Cannabis sativa
gtaaatgattttatataccattatgatattgacgtgttggaagggcaacaaatgtgtgaaacaatattaaaaaaaaaaacattgttgacaaaaataattacaaataagaagaaccaattagaattaagaagtagagactgagcatttatttggtgcgggtagcggtatagagtccataccattggcataggaccactgccagaggattggcttttgggctttatgctatgaatttatggattttaataaaaggcacgttaagcagtagcacccttgctattaatatactatatctgaattttaaaacatttctaaatattttcaaaaatatgtgcagcttgtcacaaatgcagagttagaagagtctcctatttacttcccactacatccttttgacgaaggttcactattctcgtactatattacttttccttcaatattatttgcatttatatggatattgaaattgaatgtcatattttttttaaaagaaaaaatcataaagaatagtaaattaaaaaaagaaaatgtaattttacaactaccaaccttaattaaaaagatatttgatgccaaaaaaagaagtttatttattttactttttttaaaggaaaataagtactttaatatttattagataatgactttctttttattagtagcccacttattggtgggccatcatcaaattgaatataggtgaaccgtgtacgatattttaaggttgtttaggctaggatatcttgaaactaaggcaaattaatttggtaatcctactttggtgatcctgttgatttaatgacattgcttctcagttctcaccagccgcttctaattatggcaacaccactgaatgaatcatcatcaattcatcactcaagaaaaaaacttcctttaattatattatttaaaatatctaaatttatatatttattttattatttaaaattaattaaatatgtttttttaataaaaaaatttaaaagatatttaaaaaatataattgaatttattatatttaattttattattattatttaaattaataattaaataataacaactctaataaactctatagaaacatgtattccatgttactaatactattcactattttttaattgttattattatttagatgtgaaagaacatgaagtgaaatgcatacgctctgagttatctccgctagaaaaagttcaagaagcaactgaatgtatgcctctcacctcacaaacaacatcaaaccaatcatttaaacgatggactataatggattattcaaaggcatatacctctctacaactcactcctactgtggtacgtacttataattaattaattaatatataattgtaattaaagtgtttcaactttaggcattatctatcttaataaaattttgcattgtaatcaacaggtggcagagagatttatagaggctgtacatgaatcttcagaaatgtcattttttatcagctacgacaccaaagatattcgacaacaagcccaagagtcaacacttcgatatgcaaaaggtaatattgtcatacactcactcataaatagtaaagtggatacagtacataacatattgatcatattgaaattgatttacctctaacgtttacgtacattacaaaaaactttttatattttaggagagcctatttcagctttagatggtgtgctaatagctatcaaggacgaaattgattgcacgccctatccaacaacaggtagcagtaccggtctattcatattttcctttaaatgtggtaatattgaaattaataaatcaattggtatttttgaaaattatggctatcacaactaggtccttaatctttcaaaaatgaaaaagacaaacaaggttcacaatgatattaaatcaggctagctaatagctatatcaggttttaccaaaataataatatctgtagttactctaaaattgtccttattacttaattttggacaataccaactatttctatatttgaaaataccatcattataaacctatcttgaaaaatacaactcacatatttgtatattccaccttattatttcaaatttctaaatacgtatatttgtttgcaaatttatattaaaattattaatattatgtgtagattaatttgacaataaatgtaggaggaacaaaatggttacacgaacaaagaccttgtaccaatgatgcatgctctgttaagcgtcttcgactctgtggtgccatacttgttggaaaaaccaatatgcatgaacttggggccggaacaagtgggataaatccacattatgggtaagcaatacacataaatatttccgatcttacaaaaatacccatcttttttattacttttacatttttactactgtattaagtttttaaaaatattgtgttaagtgtgaaaattataaaaatactgtgttgtagtaaaataaaaaaataactaagacaactaaaaaacaattctaaaacaacttaacaaacaaaatgaaaataactataaacaacacaaagacaacttcataataacaaaaaaataacaaaatatttacttaattgcaatgtacaaatagctgagatacaaaatagccatagatttagaaactaaattagtaaatgtctctttttttaaaaaaaaaaataagaaaatagttaaatataataaattagctaataaaatttataaaaatacatttatcggatatattttttaaaaaatatatataataataaaattaagttaatatacttttttttttttagtattgcatgtaacaaaaataaataaatatattagatcagtaaatatatacagctatatttgatatatcgtattactaaaaattaatataccatagtaataaattatatatcataaagaaatataacaatactaaattaatactcaaaaacgatatatatattatgctaataaaattatatataccactattaaaatatgaatacataccaaaaaatttatgtataataaaataaaatctaaatatcatcttaaataaatgatatattatagacaacaaaaatcatataccatacaaaaaaatatatacccacaaataaaaaataaaacaaaataatatgatattattaaaaaaaaattatatatatcatattaacaaaattatagatcac

SEQ ID NO: 16574 - DNA, 10459 bp, Cannabis sativa
aatagattcatttgtataattgtagaggtggagatgaaaactaaaatagaggagcttgaagctactagttctgagttgcggaaaacaattgtgatgcttgaagagaaattggccaatgaagaatcagataagctggtaagattggcttttttcctgttgaaattataacaattttttttttaatgatattacctgtttgtttctcatccatattttactctttttgtcttaaaataggatgcaatcaatcttcatagaagagaaaaagaggcaagggaagctgctgaaaagttgcaagcctctgtctcagctgagcttgaaaaagcaaagcaagaaaaattaattgctgatcagagggtactacaaagattatgtttggatctctggtctaaacaattatttttacttatgaattttcatgcctattaaaatatttgttcttttacacgttcaggtctccacaagtgaggatttgtacgagcgagcccaagagtataataagagtctacagcagtacaacagtaagctccaaaaggatcttgaagcagccagtgagtctctaaaacgagtggaaatggagaaacttgctattgtggaaaatcttggaactttaaggggtcacaataaatcattgcaagatcagttaatttcaattacggtgaatatccttgtgatatacttactattgattttatctatttggttcctattctatactgtacctaaattctctatagtgctaatttactttgaccttgtctattttattcaagtaaattccttgtggtcttgccgcaggcttcttgggatgatgctattaaacagaaagagtccttggctaatgaacttaaacacatacgggtggaactacaacaagtgagagatgatcgtgatcgcctagtgaaacaagtgcaggaagcgtctgctgaagtggagaaatttaagaatgttcatgggaggtcagttgcagagcttgataacttgtcaatgaagtcagatgcattggaggtttgttagtaacatgtctcgtgatttgttcatttatagcctggtaatcattgtaatgttgctttattttcattccacaggccacttgttcatcacagagggagcgattatgtgctcttgaggttcagctagctgctgccaatgagaaattaaaggtagcactagtacacgattagaaaaatgtgccacgtcgcatgccacatttacaaatcattcaaaatttaattatttgctttctttcagatggccgacttttctacttcacaagcaagggaagaatttgaagagcagaagaaagttgtgcaggagttacaagaccgtctggcagaaacagagatcaaagttgttgaaggagagaatctaagaaagaagctgcacaacactattctggtaacaatgagacaaactgctgttttgttttcataaagtttctatatttttattaaattatttgttttggcaggagttaaaaggaaatattagagtgttttgtcgagtacgaccgttgttgccagatgatggtgtcggtacagaaaaagctgttgtttcataccctacttcaacagaagctcttggtcggggcattgacatattacaaaatggtacggatgtatttcatttcttgcatgcctcacttatttcattttccgccacagattttctaatagctccattttagccattctatttttgcttttgggcctagtgttcaactgttttgattggaactgagagtttaatctagttcttatttgtgtgcagggcagaagtttccttttactttcgacaaagtgtttagtcacgaagcatctcaacaagatgtttttatagagatatcacaactggtacagagtgcgcttgatggctataaggtgagttttgattttagttgccactcatatgtggatatgttgttatggttgataactctttgttttgtggtgtgtgattaagttttgtaccgtttttttttttttttgaagaaatccaatgtgctttggattattggtgcatttgttctacagtagttaattaaactgttttgttaatgattgtacacacctgctggtgtgatatttgtttctttttatttaaccatgtctggctattcctttctgctgaatactgcttttttgtttttgttttgttgatacctgttctgtttacaggtttgtatatttgcttatggtcagacgggttctggtaaaacatataccatgatgggtaggccagaagccccggaacagaaagggcttataccacgttctcttgaacaaatattccaaataagccagtcactaaagtgccagggctggaaatacaagatgcaggtattaaatctagtaatcatctttttactctgatgatcagtcaggcttcttacaatgctatcacttttgtaggtatcaatgctagaaatatacaatgagacaattcgtgatctgttatcatcaaaccggtcaagtaattcagacctaacgcggacagatagtggtactcttggaaagcagtatacaattaaacatgatgcaaatgggaacacatatgtttcagatctcactattgttgatgtatgtagcataaaagaaatttcatctcttctacaacaagcagcacagagcaggttcaaacataagacctttttcatttataaattattcttgaatttaggtattgattacactagaaggccatgtttgtttctgttttccgtacagacttttaccattttgtgcaacttctcaactaaatccgtaccatgtatatatttttatttatagctacatatatgtatgtgtttgcatatgtatattaatttcttcaagatatattaatatttttatctgtatgacactagatctgttggcaagacccaaatgaatgagcaatcatccagaagtcattttgtgttcacattgcgaatttctggtgttaatgaggtttgttgttctcttgcaattcaacagtctacctactcctgcttctagttattttcctaatatatttatatatatatatttaaataaaataaaataaaataatgctttgtagggtactgaacaacaagttcaaggtgtcctaaaccttattgatctggccggaagtgaacggctttccaagagtggtgcaactggagagcgtttaaaggaaactcaggtagttcttgttactttttgactcgtatgtgtagttgttatattcacacacacaaaagatttgttactaatttatcttgtcaacaggctatcaataaaagtttgtcctgcttgagtgatgttatattctctttagccaaaaaggaagatcacattcctttcaggaactctaagctgacatatcttcttcaggtatgtaatattttctcctttgcacatagatattgccatacagtagaaatttagatttttctttcatgaaagaacataatgtagtttacatggttgaattgagttattaacagtcaattttcattgtctaaacagccatgtctgggaggtgactccaagactcttatgtttgtcaatctgtcacccgattcttcttcagttggggagtcgctctgttctctacgatttgcttccagggttaatgcctgtgaaattggcattcctcgacggcagacaaacctgcggatcgcagactctcgcttgagctgtggctaaaatcgttttgacacatttttatttgtgtctgctcatctcatggtttgtgtgtaaaatggaagtagtaatgattgggttttgtatcattgtttgtagatttttctgattctaagctgctaatttgtacgtgtagaaattatattgagatcagtataaatttattgtctctactctccagtgagtgcgacgaactttgaatttcataatccatatgaaactccgtcactggatgttttctttcctagcttatgaggagtctgtaacagctcataaattcttatgtatggcaattatttttctgtctttttttttgttttacataaaaagatatccaggactgcttgtagttcatgcactgattttcctttttcttctttatgttgtacttctttgatttgatgaggtcaaaattatacaattgagtagaagcttcaagaagcaactaagaaagaagtcgcttcaaaattattaatctcaactcttagaaaagaaaatatgttacacctaacgcatacataattcattctataggtccatagctaatttgatttgatttagtgtataatttaggggtatttgctaatctgtcatactcgattaactaacggtgccgtgactgctaggccaatctaaaccatgtgatgtgtgttagaaagagggaaaatggagaaagttaacaaggggcgttttttttattatttaatttttctttctttctcttattgttctggcactttagaaaggaccaaatttggatgaaaataagatgtgtattaaaagagagtgatatcaaataggaataccccatcttgtacattgccgctgaaaaggtgggtccaataccatagttcaaatcatattcatatttatccgtttaaaaaaatagtttccctaaaacagagtgcgctgtaatcgtaggcaactagataaagttcaaactaggctgaagagagctaagcaaagcaaaagtaaaatcaagggatagagagaagatggaaagtaacctagaagaggggattaagtctaaagtgttgaatgttgactcggtggagtcctgggactcatgctttaaccaggccaccagtcaaggctcccctgtgagttttatattttgtttatgtagaaatgggcatctatgattctgtgatagattagaaaccctctaattctgaataccccatcttatttttttttttcttttttatgtttcaaatttctagcagttattatgaactttaggatcaaatgattaacggatacaagttctgatttttgttttttgttttgatattgaatttgttggtttagaaagaaatttcttttgaattgaattaaagggtttttgatattaattgcagattgttgttcacttcactgcttcgtggtgcatgccttcggtagctatgaatccaatatttgaagaactagcctcaacctacacagatgtcttgtttcttacggttgatgttgatgagattaaggtaaattgactggaaagaactttgaaacaacagacaaagatctgttatggcgtgctgtgatagagcctaacctaataataatttagaaatgagtatatatctattaatatattgaacatgttgagtggagtggataatattaatatgatatgtggatagagtttaaaaatgttctgtttctttgttgatatttttctggtgatgttgtttggtagaatttttttcatgtgagatatttgtttaatttcgtatttgttccatggaagatattttgagattctatttacaagtcgctgggctggggcctagttggaatgtatctttaaattggctcttttcatcgtatctagtaaagattatgctaactgcttatttatttttcgttatcagaaaatgcttttaatcataaaggcatggagatctaaataaagtgaatatagaaaatgtattttagaacaaaaatgttctcttggttcctgtaatgaaactctctctagaattaagatatgcactgatggatatctttcgcttttgtatttttcttagaatacaatcaccatgaacttctttgagattgagctaataagatagttataggaaatgatttccctttcagagttgatttttacattttacatggataagatttgggacttctatgttcaagacatgtatttattgatttttcttaaaatgattttcaaccacgtgttaattagtattttcctgaaattattcccaagcacaggtgagcaagcttggtaaagccaacatgatatttttgtgcttaaacttgaagtatatatgatttagtgcagtgtataatgagcatatatgcttgatatgaatggtaattgtttctattcgatattggtttgttagagcagcttcaattatatgcatgctgatctaaatagtttgatcttatctagttttgctaagtagattctcataatcgttattcgttagcaacaagttaatatatctaattgtcattttatctaaccgggtgtattgtcattttgtcttaatattagtggtaaaggcatatctaattagtgattttctatgcttaatgcaaatccataaatcacgtgtgctatacagtacatacacatcgctttcaatcaattattctgccactagtgagaacctggaactccttttacacccaccaatcagtataaagtttttagtacagtccataaacaaaatagtcaaaattcaacacacagtcagtacccgagattatataatctgaaactttactttagtttaggatatattctgacatgcaagtttaagagatattcttgttgtgaatggtagaataattggaaaagctaatctatcacatcaaagtcaaggtatccctttcaatcattaaggggcgtttgagaattgattttgaagaagtttggcttttaaagattttgagaggcagttggtgttttgttgttttgtcaggaggtagcaagtagaatggatgtaaaggcgatgcccacttttgtgttgatgagaaatggagctcaggtggacaagcttgtgggtgccaatccagatgagataaagaaaaggattgacagttttgttcagtctagtcgcgtatatgttgcctagttagttttcgtgtacaatgtacatacagaattgaataagtggttgtgcttgtaatagttgtggtggtcagatcagcagcattggttttgaatttgtcaagttatttgcttttcatgatatttttatgattttctttccttactatgttataacttagtagctgctgcagccgtaatggtttgaaagtgtgagcttcatttttttttttaaaaaaaaaagactacatgaacaatttcttttcagatattatattcaacttttgctaaagaaaagtggaatctgcacgctttaaaatatttgattggaggatagatttttgtagcttgatgaattcatccttcaatattcaattttagaaaagtgaaaaatatcagttcggtgtgtagtaagtagtcataaccagaagacaaatattaattattgtgcacctaatttagctaatcaaactatccctaacaatccccccaaaaaaaaaaaaaacaattctccctaacaaatcagtagtatatattaaaaaagaattataatgcaacaactaatctcaaaaaccatattgatatgctaaaatcattgtcatgcactaaataaattataataatttttttagaggaataaaacaaattctttcatttcattaatatcccatgacttatttcacatacatctttaagagtaattatttcaattttattggtaacttttccatgtttatgaagtgaaagttggacaaaggtgcggtagtggggtagtgcatactgttgggcctctaacagcccaaagaaacacagcagtggcccaagttaattattgggtatagattcggcccaaacacagaagacacgcaacaggaaagacaaaattacaaaatcgatagaaattcaataaacaaatgaaaaagggaataaaatatagaaaaggtgattcgatgcgatgacactacctgtggtggagatggcgccaagagactctcccccattcccttttcgttctttttctaacgaaccccacttccttaccaattcatatcctaacaaaccaatcaagttcactcatttcgcttattcttcttcctccttgatttttttcttcttcttttcaatatccttctctcttctcgaccatcttctccggcggcgcaaaagctttctttcagtgcgaatcaccggaaacgactgccgtaaactttctggcaactgatcggagatgagttcggcgggaaatcccaactgggtttttgattacagcttgatagaagaccttccgacccttgagccgcctggcttcgcttggccttctcactcgtttacaactcccactgatctcaggtgcttctactctctccccacttgggttttacttcatagctgtagttcattcgagatgcgttccacattttgaactatcaaattataatttgcttaatctatgcattatgttgataatctagatggtcaattgttttttaattataaagtaaaatatttttgattttgttgttgttataacacaaggcttctgtatttaaattgtaattatttgcttgattttgtttttacttaacatttagttttctcgaaatgaatagtaaagagcaagagtttgaatattggtaaaatgatttaaaaattaagttaatttattacataattttttcagatttcagaagaatttgttgagtagcatgaaaaagaaaattgaagttatctctttgtagaatgtataaataaacatatacaaatatactttttctttaaacacctatttagcatataaaaagttcttaagttcgtcaggatctcattttattttgttgtgttgttttgttctgtcagcgtggactttgatgactcatttgccaacgatgatgggcttaaggaaactggctcccggaagcggtatgcatatactatactgatatggaaacgggttgtgggaatagtttattattactataaacttgttgcaattttttgggttttctttacctttgacttgtgtaaaattttctggggtttctaatcattttaatttctctattttcactttggtcacctcccaatcccatgatacaatcattgatcagttttgtacatatttattgtatcgtagggtgagacctggatcatgcagtaccaccggttcaaaggcttgtagagagaaaatgaggagggataaactcaatgacaggcatggtcgagtactctgattctctctccctctctatatttgtttctctatctctttctgtgtctcacgttgtgcattggcatgatatgaaggttccttgaactgggttctattttggatcctggaagacctcccaaaatggacaagggtgttatattgggtgaggctgttcgaatggttaaccaattacgaatggaatcccagaagctaaagcagtcgaatgagagtttgcaggacaagataaatgagcttaaggtttgcttttgcttttcttgttgagagaggagtgctaattacaaccttttagttaaccactgtgcttgaaaaacacatgttagaatattttttttataacggtattcgttatagttacaatattaaacttgtaatttcaggaactatgttgtaattataactaacatcgtcataaaaaaaatatttcggcatgtgttttcgggtccaaagattgactaagaggttgaaataggagattgcagtaaaattccacaaaagtgtttgtttgatacatgatataaggagattttctttatgttgtaggccgagaagaacgaacttcgagatgagaaacagaggctaaaggcagagaaagatatccttggtaaacaagtgaaggccatgacttcacaaccaagtttcatgcatcctcctgcaatgccgtctccatttgccagccctggccaagttgtcggtggcaaactggtgcctttcgttggttaccccggactctccatgtggcaattcatgccgccagctgcagtcgatacctcacaagatcatgtacttcgtcctccagttgcataacttgaccttaggcaggccttgtttttcagaggtctgcaactgtgcagtaaggagccatttcctttttctacttacaaacgtggttccgggatacttagttgttttatggggataatttcaaaggttctttttaaccattttggtaaatttggtttaccaattttgattactctagaacaaatgttgctgagcattaatttagagacatatttggaggcattggttagaaatgtaatgtaatgatccaacttattcttgttacctctatttcccttgacatatatgaactattttattattaatttgtttgtttttactgtaactacgccactaacagtggttcttaagaaatttgtgtggcaatattgtttttgattatcaaaacgtaaaggcaaatttcagcttatttttaattcgtttgtacataagctaaagattaagtgatgcaggagcatatttctattttatattgtttcccctgtttgcatattatgcaagtattttccaattatgttactttattctatcttgagccttttatttttttttgaaaagagaaaagacccatttgtctagggtccttcccattatttattaataaacctcacttatggcggaggaaaaccttggttacagataggctatctaggaagtttataaaaatgttttccattctct

SEQ ID NO: 16575 - DNA, 3907 bp, Cannabis sativa
ttgtatgttttactcaggtttcttggaaacaataacctaaatggtaccttgcctcaaaggaaaagtgcatctcttctcaccatgtaagccaatatatatgaatttaattatagttatataatagggtatgtttagcaagattcatggtaatgactctaaaatgtgcaatattttatgcctgcagagatgtaacatacaataatttagtgggaagtattccttcttgggtaaacaatcaacaaaatttagacatgtaagtttctttgacatttcttagtttgtacctcaatttgtgtgtttatacttcactttttgttgatgcagtaacttggttggaaacaattttacaatagataattcaaacaacaggtaaatttttcttcatacaatttacaaaaatcaatgtgaaatttattgagtaaactactttcttcttaattgtatgaaaatttattattgctttgtgttatcagaactcttcttacaaggttgaactgccttcaaaaaaatttcccatgtaatcgagatcgtcctctctgtaagtataattagaacaatttatgttggttatttctgataaagtctttagctaaatgtcatatgttttcattttcttctgcagattataactttggcattaactctggtggtaatgaaattagatcttcttctgacaatcttgtgtatgaaaaagatgatgaagctcttagtccagctgctcattttgtcaccagctctgagagatggggagtaagcaatgttggacttttcgtagggaatagcaatgctacctatacaagtaattcattatctcaatttcaaaatactttagaccctgaactataccaaactacaaggctttctgcttcatcattgagatactatggtctggggcttcagaatggaaactacactgtcaaacttcagtttgtagaaactgctttcgactatcctagcagctggaaaagtttgggcaggcgtatgtttgatatttttatccaagtaattaatgacagcctaattgtcttgtcccaagaatattttcaatcttttttttcaacattaatgttccatcaactgaattgttcttgctctttatgtctaccttatttgtgtgcaattatgatagggaaagcttgaaataaaagattttgacatcagaaaggaggccggtgcagtctctctccgagcagtccagaaggaatttaaggctccggtttcagagaactaccttgaaattcatctttattgggctgggagaggaacttgttgcataccagctcaaggtacttatggagcatccatttcagccatcagtgctactccaggtaaccaatctaacatggtttcatatgacttcttttttggatgataaataaagtcattctaaagaagttatttttcaaattaaaaaaagtagaaacttagtcaaactgtgccgatcatagagttgaatagtgttgtttggaggcagatttcgaacctacagttagtaacattcctccaagcaataagaagaatcgaactggtttgattgtggggatcattgttggggctgtcactttcatccttttgtctgttgtagtagccttttatgttgttcagagaagaaagaagtctcaaatgaatgatgatgaaggtcagcattttttttcttatatgtttcacattagttggtcctaattgaaagagaaattaatgatcaggaaagtatgattattgtattgtgatatgcagagttcttggggatggatgttaagccattcacttttggttatgctgaacttaggacggcgacaaatgatttcgattcctcaaataagttgggagaaggaggatttggacctgtctacatggtatatttcatataagctcattggaaatatagaatgcaataaaattctttttgacaattcttttggtataactaataatagggaacacttgaagatggaagagtaattgctgtgaaacaattgtcagtgacttctcaccaaggaaagagccagtttgtggctgaaatcgccacgatatctgcagtgcaacaccgaaacctggtcaaattatatggatgttgtattgagggagagaaaagacttcttgtttatgagtatttggaaaataagagccttgatcaagcactatatggtatgagaataatgcatttgttgcttatacaaataacactaactgtattttaagaaccaaaagctatactaaacataacaaataatgtaactatcatgatcaggtaagaaaagtttgaatctgaattggccaacacggtttgacatttgcttgggcattgcaagaggtcttacttaccttcatgaggagtcacggcttagaattgtacaccgagatgtcaaatccagcaacattcttcttgactcggatctcattcctaaaatatcagatttcggtttagccaaactttatgatgataaaaagactcatataagtacaagagttgcaggaactatgtaagactttttctttatgattaaacattgttatgttttgtgcttattttttcactgaacttttacatttgtgctgcagtggttatcttgcacctgaatacgccatgcgtggacaccttacagagaaaacagatgtctatgcatttggagttgtggcattagaaatcgtttctggcagaccaaattcagactcaagcttaggtgaagaaggagcttttcttcttgacttggtactaaatcctttgtctcttctcatgtctcatatcatatttaatgaactctaatcttaacaaacacaaatttcacatcattcatatagttcactaggctaggaactatatgaatttcatcttactttacaacttcaaatttcttcatacattatatcattgttttttgctcaattagggcttgggatcttacatgaaaaagaccgtgaaatcgaacttgttgattcaaaactatcagaatttgacgctgaagaagtgaggagaactataggagtagcttttttatgcactcaaacatcacctgtagctcgcccatcaatgtctagagtggtggcaatgctttcaggagacactgatgtgagcactgaagtttcgaggcctggttacttagttgattggaaattcaacgatgtcagcaccttaatgagtcaaattgaacaagggacaactgatcctaccttgtatgactcatgttcaagtacaagcatagtagcagatgcaatgccatcacaaagagaaagacaaactcatccaatgcttcaagacaatggtgagtgaagttgatggagcaagggcttgggagtgaaactaacagcccttgttatgtagttatggttttctgtttatgaacagaattacaccttatttttgttctgtttatccttgcttatttatttgtgtcaaactgagataatctggtttgggggttgagaatggaaactacactgtccattctcaattaatagttaccaactttcttgttatgatgtttgaaaataaaaaaaacaagactcagtttacctactttagttaccaataaataaagtacaatcaccaactttctattttgaaaataaaaccaatattaactaatgtcatgggagtataatcaatattcatgacaggcacaaataaagaaataaacaatgtagaatggggagatatacaatgtgaagcaccagagtccaaaacccatgtagaagatgacatacctaaaatgctagtggatggttgacctacaaaagaagagacagacatgacattattaggtttagtaaggaacttatgaaactgctctgagagagcagcaaaatcataagagccagatggaggaacatttgcagcaatactaaattgtggaggttgtatttggttgtaaagcagtggttgattatccatatgaggaggtttaga

SEQ ID NO: 16576 - DNA, 4400 bp, Cannabis sativa
  modified_base (700)..(730): a, c, t, g, unknown or other
  modified_base (4350)..(4350): a, c, t, g, unknown or other
ttaaataaaactaacactacgtggcgtggcacgtaacaatcacctagtactagtatatatatatatcaaaatttttctttttttctcaaatttttgtaaaaagcccaaaaaaattattgcgctatcaataatttatcattatattttattatgtaaaataaaataaaataaatagactagcatttactgttatagtaaatatattaataaaatattaaaaaatacataaatataaatagaaaaatattttatttattataataatgcaaatttagcaaaaaataaaaatgcaaattttatatcatagcaaatagcaaatgttatgtgaaatttagtataatattagatatatgccaaatttgtatatttttttaagcatattttttctcaaaaataagttatatttcaacttaacatcatttttttttttttttttttttgcatcgtgggagatgctaaaatttttcaataatattttctactttttattggaaagagagcaagtcctataaagaactcgtctaattgttttagctagaaacatcaaaacttacaatctcatcacagtcaactaatgtacctaatgtgttatcaaaaattagaaaatggaaaatagatagtgtgcatgcagcctataatagagccttggtaataatatttacaacaccttaattgtacaatttattattattattattannnnnnnnnnnnnnnnnnnnnnnnnnnnnnntattattattattattaataaaacattggtgttgtacaattttcaaaccttattttcagcatcacatgcagattgatcaaaaaaagaaaaaatacaggataacaaaattataactatccccaaaacataaattgtagccgtaggtctatttttggggatgaaccacataacagaatattttaattaatcaaggatgatggtgactagctactccctttgctggaggagggggtggatttggtgcccttaccaatttccgagtaataacatgatgatctgcaaattatagttgtattaattaatactttgtgtctttgtaagaatcattactaattaatgcattaattttttcctttaatgtatatatgatataagaaaaaattaagcatttaactaaatttaaacaatatatatttcaaccctagtgatgttttatatatgaatgtagtacacacctgtggctaatacgaggaggaccatgagtaacacataaccaagcttcaaacaagagaataatttcatttcttactatttattaatgttatcatcatacataaacacacacacacacatatatatatatatagtgttgatcacagcacatcatctttgaaaatatattgtgaaagcttactaaaactacttgggtagtactattcatttggagaagaattcaacatggaaatcgtgtctaattaataataatatttaattatgtttggcgtgtttcattcactaaagacctcaggtcatccatcattataatgccagacttagcaagaagccaatcaaaatgaaattttggccctaaagaatatcttattctgactagaaaatgatcaaagtttgacataaaattggcttagattcaatgagcacaatccccaaattaattaaccatgcatggatgtagacgaccgccacaacatgtatcaagtttaacaaaaaagctttgaaattgtagatcaaacaccatatagtacacgatgatgcatgcccacggtgacatttttggccggagaatcactcattaatttattggtagatattattttggattctgtgttttacaaaagttatcaattgaactttctattttattaaatgacaaaatgaactctctgtattttttaaaatggtacaaataggaccttgaactaattttttttatcaaaataaaacttaattataatctaatctagatgtgttatgacaaaattgtctatattttctatatttatttgtattaagaattgtcctcaagttgcttatattaaaaaaaattatagaaaattgaactttaaggtcatatttttaccattttgaaaagtacgaggtcaattttattatttaacaaaacagagaatccaatatatcgataaatttttgcaaaacacaaaatctaaaatgatatttactcttaatttatagttatttgaaattaaaagttcagaatggtatgtaaaaaaaaaagagatctcaaaatagtacctttaaaaaataaatcaatatgataattcctcaaattatttcatattattaaaaagaaacatttttgttaaaatttgtccaatatagtcaataaagactaacatacactacaataaaaaagagctttaaaggcattatttttgaacataagacgtcaattttagcgaaattcaaaattgacgttgttccaaatgatgctaaagtaggtatgaaataaccgactccataggggcctatgaagtcggttattatgaaataatcgaagccatagagtccctatggaatcatttatttataataatcataactataaggtccctatgaatcagttatttataataagacaaggtgaagcacaacaatgttattcttaacaaatatttcaagaatcattgacagtactatgatcaaatatgatttaaccaactaagctaggaaaataaggagaagaactgatcaggatgatctaatagaaaaattatgttcatcacctcaaagagagcataatatcacatatgtatacaacatctcattcgaaagatagcacaatctcaatttgctcgagatacactgctctgagaatatcgcaattgtactatgctgatcgtatacgacatgctcaaagtaagtcaaagcttatttatttatttgtattttgaatatagacgagtcatttgtattttccttccccgcacgtacatttaaatatacataaaatgtgggttataattccattatgtgtaccttcccactaaaataaggttaagtacactcaagggaagatgaacgataaattttatacatagaaagtctatcaaaaaaacttacttacaattacactcagaaataacactaactcgtgaactaagtaaagtgtagctattaaatcacgtaaaattctctgtcttctttattattgttggataaattccactcctaaccattcctatacaagtttccacgtcaacatacaacaacaattaaaaacagaacaagaaattaaacctaacgactttgcctctacaaaatgaaagatcttggtgacgcctcttttattttaggaattcagaaacatcgagatcgttctcaaggtattcttagattattataagagatgctatatcgataaagtacctaaaaggtttggcatgcaagattgtagaacaggtgatatccctgttgctaaaggagataaatttagtcttagtcaatgccctaaaagcagctttaaaattcaggaaatgcaaaagattccctatgcatcagctgttgggagtctaatgtatcttcaggtatgtatgcgtccagatatcccgtacattattggggtgttaggcagacatttaagcaaccctggtatagaccattggatagtagccaagaggattatgagatatcttcagagaatacaagattacatgctcacatacaagaagtcaaatcattttgaggtagtggggtattttgattctaattttgctggatgccaagatagtagaaggtctacatcaagctacatttttttgttagctggaagagctatatcctggaaaaatgtcaaacagacacttatagcttcttccactatggcagaaaaattcgtagaatgttatgaggcatcaaatcaggaaatatggctgataaactttgtcactaggctgtgttttttggagaatgtagaaagaccactcaagatattttgtgataataaatcagcagtgttgtattccaataacaataggagctcatccaagtcaaagcatattgacataaaattcttagttgtaaaagaaagagtgcagagtggacaaatatccatagagcatattgggacaaactctatgatagcgggtccgctcacaaaaggattgccacccaaggtctttcatgggcacactgcccatatgggtgtagtattgtttgaggatatcatgatttagtgggagtttgtattttttttctttatgtttgtctaagacatttatgtatttggttattttttgatcagaaataaagttttcagttcattcactctattttgtcatgtttaagtctggcctcactttggtttagtcatgaatgatataacgaaaactgctttgatcctatatgggtatagttaatggacnagattgttgtgaatacctttacataataacaaattttgagctcataaggt

SEQ ID NO: 16577 - DNA, 7418 bp, Cannabis sativa
cttcgttgatttcccacccatcttcatccagcacggtaaggtttgaagctttggcaaggagatcatccatggtgatatcaggcttttgcagcatatcggtttcggaaggctcttctccaagagagagcatatcggttcatcttaacatccactactcttaattcatgtccaaatccaaatcgagtatatattgtttcatttatattttatttcattatctccaaccaaaagtcactaagttcaaataattagcggattctgggtttttgtggttgtattttaatttacttggcgccaaaatcatgccatttattggggatggaggtgagaagatggatagacggagacgagagcgcaggtgatatgctcactcgattttcaatcgaacgtccctttttgcttcttctgccgccgcttcatcgcgttcctcacgcgtgggcaatgttctcgagctcgtcgggccttcttcttctgccaaaactctcatcctaattcaggtccaaattttaggctttccaaccttttcttgcgtataaccaaccatttctcttccctttcagtcgctgaaccagtttagggtttgtaatttttgagaatggttaaatttgttacacttaggctgctatcagttgcattcttcccaaggactggaatggtgttcattatggagggttggggcggctggttgtgttcattgacctcgattgccgtttcgacatcttatgcttttcgacaatgcttaagcgccgaattgggcaagctaatggtatgtttctttattcatcgacatgtgttgtttccaattgctgaacggtaattttctcaattagtgctgaagcagccagtaaatctttctctccattctttttgtatgctaatgtaagactcatgatagattcaagcttaaatagtttgaacaacttgaattcttagaaaatgtcttaattaaggaagaaaagaaaaaaaatcatgcagtaagttgaataaaatatcttgtcaaaaaaaaaaaagttgaataaaatgtgtattaagtttatgttcgctccataaatttatccaattcgatgcaattagaaagacatatatgattctttttacatatctttatttttcagaagcttcatgttttgaatgattgtgtgttaacattgatccaaaatttccttaggattgctgggtaagacaaatgtggggcgggatcatcttgatacacagaagtgtgatgaaagaagaaaatctactttagattatgatgaggaactatatgctctatgcatgagacggtttttgtatgtccgctgttatgatagctttcagtttcttgcctctcttaaggtaagaatacactttgctttataagctgtattgaaatttgaaaggaaataatggttcatttgtttatttttagacttagctgtcattatgttttattttaattggttgttgggtggctgagctattttaaagaactagttgggtagttaagggcacttcaagagcttctcttttaaggatgtgtgcttattgtgactatgataagagttgaagctcttctgtggagataccaagcgtctaagagcttcaaacctttgtaatttgttcttcaacaccaacaaaaattgcattttagattttatctaatctagtgtgtatcaaattagcatgagcgggtctctcaacaagtaagagcaagagttaaaaacaggaagaaatatgtggaggttgtgaaagaagaggttagttgtgaagtaagctcaatttaaggaataaatagcgtccattggaaaatatatgataagcttttctgaaaccaagagaagctagcaagatgaccacgccaaccgatacaaggaagatgactcttagtttattgttgatgataggaaacacataagagggttctgcacattattatgatcatagggaagagtttttgttacttagtgtggaaatgcctattttcgatggaacaaatctggatggttggattatgaaggtcaaatgctatttttccttacaaagattcaccaatgacgagaaattagaagtagttttggtaagctttgaaggagttgctttgctgtggtatcaacgagaataatagcaaaggcatatgctgttatgagaataaatgaaattgctaataagaccgatgatcttaatggaataaatgaatctgtcaatgctgaaccagtttcattcaatataggaaaggtctttgtacgagcaatttctagctgtactacaagatgtaacaattaaggaatattgcaaaagacttattgagttgttaccacctttggacaatgtttttagaagaggttacattgaatcactaaaccaattcttaaattggttcaagaaaataatgacttgaggatcttggagcctagaaatctaactcaagtgatgaagttggtgtacaaaattgaatgtaatttttgttcagtgttccttttatttacacaactcactacaacaagcaacatatgtcatacttctcacgaggacaaccacaaactacaagttaaacacaaatggaaaccatttggtgaattctattggctgactggttgggctacttcagatgaacaagagcatttgttatctttgtgatgaaaagtggtcccaatgtcccatggaaagtgctaaaagaaaatatccgggattattaaaatagttaacggggatgggggagcactccccgtctttaactcgtcccatttccatctctaactctagtttccgaattacatagttttatataatagattcctagctatgtatatatatgtgtgtattactttttaatgagagtacaattcattttcaccaaacattacatgtggtacaacccactccttcatttttgccactttattaggatcaactgctaccccttgtctcaaaataatgtgacccaaataaattgtttgttgctgcccaaactcacacttctttctattagcataaaattgatgttgttggaacacttggaggacgacaaagaaacgctcttgtagggcctccatggtagctgtctgtcgtctcagcttcgtagctctcgtgttcgcaatcacaacaccattttgatagacttttcttagattagaaatagtctaattaagaattgagacacaaattttgaaagcccaccataaaaactctttattgaatcttcaagaattacaaagacaagctcttcaccagaaaggtattgcagggaagaaaaaccttttgactcctccatgctctcttctctctcctctttttgagagacatatccatgcatacgggggctcccatggccctttcgaccatgattggcatcgaaaccccactggttttgagaaaaaaaaaagtcattactcgactggttttggctggtaaaatttgtctaaacatctaaacaattaaggattccataaatattggagttttcaaactgaacacaaagtattcacgatcactttgattggggacggtggagctgtaactgtaagagtttgtgaacgtactaggcttttcgtgttccaagtctctgtgaccattgatgccgctgcgtggattatagatactttgcaggaaatgcagacgatttcctctagaatttgagtctctttggcatagggtcactaagagtcgttatatcttggctaataatttttgggattcaaaaaaaagggatccgatgtccccgaggggaccgtggaaggacatttcggatctttatgatgaattcttaagtttggtgaagtttaaggctggaaaaggggataaaatttgtttttgggaagatgaatgattaggcgactcatctttgctacatacttaccctgatttaaccctgatttctaaagctaaaaacgtaagtataaaagatcttgtggctgtggaaggtgcagctggagaaagtgtagtaagttgggatttcaagttcagaagaaatttgttagaaagggaaatacctagccttattgggctgctacaacagttggaacaagttaaattacttaacgttaatgttgatatcagaatgtgggaacttgatgccaccagaatcttttcaagcaaatcagctttcgtttggtttacttccaaccaaaacgtagctaaacccccttggtcctaatctttacggaaaagtatagccccgccaagggttaaaatctttgtctggttagtagcgcttgggaaagtaaatgtgcatgacgttttacaatgaaggcgaccttttatactcatttcccttgggtggtgtgtatgctgtaagagtagtggagaagaagtggatcacctatttctgcactgtaaattttcctccagcttatggtcaaagttgttggaggagttcgggctgctttgggctctacctagaagtgttcctcaaatgatagtgagtaagttaaaaggaagcaaacgtaaggatgttctttggaagatggctgttgtagcaacactttaggttatttggctggagaggaacaccataatttttgaagatatagagaactcaacagaagtggtttgggacaaaatcaagttctggacaacaacatgggttttcagagcaaagcatttcgaagacctttcatttctagatttgagcagagaatggagagtcctgttgtaatttagtttctgaattgtaactttttttatttttctgctttttgtactctctcttactctattttaagcagttttcctccctcataagtgaggggtcttaatctataatagagggaggtcagtctaagagaacgtcctctcctctcttttcaaaaaaacaaagacaagctcttcgagagggctttctctcctattccaaacttttaagaggtttggtctctccacaagagtaatctgccaataactcctagctgatctaaatgaggttgctacctctctatttatcttaggccacctaggattactatcaaactaatagatttttattttcttttctaaaaaagagacaaaggtcaagtgtcttacattgacctcctcccatttatattagggagccgcacttgtggcataggaaaactgtggtaacaaaattgatacattaagacacatcctaagacagctgactcttagagcatacatcgaggagtaaaaacatttagaacatcaagatgtctaagctagaaaggacttggaccaatagaattaaaacgattaaaatactaagataactcagcctatgtacattgactaagtatttcatttaatccttttgtgatacacttgataagtgttaggcttatcacataactatattcagacttggaaaagataatggaaccaaaaaacttaggtagtgtttggtttacatgagtgtaggaatggaattgctattcctaaagaaagatcattcaagtgtttggtttgtttattgtcattagaaacttattccaataggaattgtaattcatgtaaactaggagattacttttcctaaataaaatgatttgaaaactccttctataccaaccaaaaattattttgccctatctacccttctcttaaataaatgattaaagttataattatatgggtaacattttttattttaaaacatatatctacaatatttaatattagaataatatgtttactgtatttttttgtacagaattataggagagaaacactattattataattatatagataaacgagatgtgtaatgattaaattatgtgaataacatttatgttgatacctaaatatttaatataaaatagactaataaattaaatatttatgtatattttattatttgataattagatctaaaaaaatacaatttgaaagtgatacataaatatatgccattttttaatttgtaccataataattttataaaacaaaaattattttaaaagagtaaaggatattttggtcaaaataataaaaattccatttcattccagactataccaaacatcacaattcttattcagttattgattccgtagtctttatcaaacaaaagaacagaaattccattctattcctattaccattcccgctcctattctatttttattttgtaaccaaatgccaccttagaggaaatcagacaaaatagaggcaggaatgcaagggacattgaagtacttataaagtggaaagctctaccagattttgaatcatctttgattgagtacaatatgatcaacaatcagttttcagattttcacattgaagacaaggtgaatgttcgggcccagggttccacctattagtcttacttactctatgcatcagccaagaaataattagctaagtaattttcacttttgggcttaactgtcattgtgttttatttaattggctggcggggcctagttgttttaaaaaattaattgggcaatccagggcttagttttgagtcaatgggttgagtatatatgtatatatttatatatactcagcttttctcttaaggatgtgtggttattgtgattgtggaaagtagtaaactcttttttgtggaggtaccaagtgtctcaaagggctaggaaccttcccaatctaatttgatgccaacacagatttcattctagttttctccaatctattgtgtgtcaacctgtgggtctttttcaatgttatcttctctttttggattgcagacattgcattatcagcttaaacaggttgaagaagctcaacagtctagtgtctatttgctaatgattgacaggtttgttttggaatgtggtgtatttgaattaaatagtattttttctcttaattgacaggtttgctttggaatgtggtgtattttacttaaatagtatttttcgcttctatagttctaaatcatttttttttaattgccaacaacttattgtaatacaaaggggaccctttgcatatgtctcagttcaactaaataaagcacctagaagctggaaataaatgatagtgtttctgaagatttagaggattttttagattttactggataaagcaattattgtttttatgggtgtttgataccaaagaatctaaagaattaccttttactatttacatagaagctgctgtagtcttataatttgttattacttttataatctcatttcatctaaatccttgttcctctgtattaaacaaatttactgatagattgatattaataataaacggctaatctattctttttttcagcattggagcttttcattgggttgaacgtgcttcatcattttctcagtcaagtacacacaggtaattgtatctatgtgttgaattggaacaatagatgatacgtcccattaatttcctcctttactcaaaatttaatgaactgtcatgtgttaggattgtatccttagcttgttagtaaaattgtaagagtatatgtattggcttaccttgttagtaaaattgtaagagta

SEQ ID NO: 16578 - DNA, 6147 bp, Cannabis sativa
tttggtggtggaagtcatcttcagatgaggtcatctactaggcaaagtttattggcattttggctccaaagactatcctctggaccaagtcccagtggccctggtcactgatgatatttacactcatgttttttttaatcaataatcaatctattcatttatttatttatttttctctaaagagaacagaatataaaatattctttttattcaaattgttgtaaggttggttttcatggattcatttatttatttttggacttgaaatgcaataataaaactgtccctatttatttatctatatttttgtctttgtaaataatttattttatttgtgtaaaatatttgatcttttaacattctaataacagttgtaatcttatatcgatttactttaatatacacttatggtttctattctctattctcttagctgtatatctgttcagaagaaatatgatgttttcattagttttcaaagaaatctgtgtagactgtagttgtcttcactcaaaattatgcaagttcaaggtggtaggagtaggatgaatggaaaagaggaatctggatgttttgcctgtttttgtaagttatgaaattatgaaactgcatttctggaaaatgaagaacagtttcctcaacataagataaagaaaatggcagctaatctaatcattctggatgagatacatacaagtacgggttctctctctgtctctacctttactgttgtttttactagtttcaatatagagggaaaatgggcaaggagaactatgaatttgataggcttcgagatgctaagtcgggagttgagaagtggctggacaagcttcgagatgctgtggaagatgcagaggatctcatggaggaatataagtatgatgcactcaaactcaaaggagaaaaatggccaaaaccgaactcagctgttcaataaagaaagaaagaaatgaagaagattcaattctagagcagatatatgcttttaaaaatgataagttcatgcaaacaagtgctgaaaaaaaatcccattaaagaggccaccttcaacattttccattattaattctgaattgttctgtagggatgatggaaaggaaattttgaaagagaagttgctgtcaaatgtagcacatggtgaaaaaatatgtttgattccaattatgggcttaggaggcatcatggctttatgtctcaaatgaatttgatgtttagaaagtaacgaaaacaattcttgtagcagtaactagaaagataattgttacaacaagaagtgataattagcatcaattgtgagaacgattgaagcttgttttttaagttaaattgtcaaaattgtatgcggcagtaaagaatttattacaacaaattcaaacttgagaagaattgtgcattaggaatgttaaggaactgtaagagtggtgaagaatgctttcaatcccttcttctcaggaaaactttattgacacattcaagacaatgcatatgagtctaaaattagccaagtattacaaaaaaatgagacttttctttcttttttttttttttttgtttttccatctttttgcaattcatgtaaagcatattaagaaagagagaaattcttccaactaaacaagttctccatgagcaacatgaattagacactcacatacaaatacaataaactaaaccaacattgcagattcttaacttgtatagttttctagcaagatttttcacttaatttatagctataaggtcattgcagcttttcaacatcaaaacaacacattcttaaagataattgatacatgagattgggaataagtgaagtagcacatgcaatatcgaattattcatagtgttgaaaggagacaatatccaaccacttaaatgctctgaacaatctctcatcatcctcaccattacaagcaaaaactcaattaggcattagcctgagaaacaagtcagtctattacaatcaaatctcaacaaaaacaaattaagatcaaatctcacctaagtctgtctccgaagccgcttcctcaacttgttgtacttgtgcttgttcatctttcgcttcctcttcttcttaacgctatcagcccacaactcagtcgaatcatcctcggcctccaatgggatcgacccagataacggcaagggatttaaagaatacccaaatgggaaacttggatatatgtgggagaaagtgggcaagtaatcatttttctgtgcacccagaaaaggactttgatctgggttagaacccaaataagggtagagtttgacttggttgtaattgagttgtgtaagaggcacattgagatttggtaatggtaatggtaatggtttgggattgaaagcagtcagaatttttaaagttggagactttgtaaggagcttgtggatcgttgaagccatttgggggtttctgcgatgtgtggtctctcaaagggtcgtttcttcagagatggacttctcaaggtttatgcgttagcgagtctttggggtatagtctattgtcctatttttatttatttatttattattattttttttttttggctaattaagattcttgtcactttgatatgtatcaaatcatatttgctgaacttttaaggtcattaaaaatatcctcttaactattgagattgttggatttaaatactttttgtctaattttattcaattttactatttcagtaattgtttatgtattaaatcatgcttcccagactttgatatctaccaaatcatgcctctcgaacttctatgttagaattttttactaaaattggaaaaaaaatccttaaatccaacaatctaaatagttcagtggcatttttaacaaccttaaaagttcaggggcataatttggtatatgtcaaagttcaaagagaaatattcttaattagctttttttttaaaaaaaaaaatcttaaataagaaataaaattagacctggaggtcattacaaagtccacttagtaatattataaaccgtaaaattataaagtcatgaaataaaagaaaaattacaacccataaataaagtagagaatctattacattggtgaacataaactatgttacataagtatcaattctccagttagccaaaatacctttcagaagattaatacctatctcaaaatctttctccactatcacaaaataatgcttcaaaaagtttgccgtcttcaagaaaagtaagcaagttgtagcttcaccaataaaagtatcaacaatatctagaatctccgtaacagtctacaaaataatactcaaataatctctagccaaagccaccacacacatagttctactctccattctgacattacaattaatctcaattaatcttatcctgatttagaattgtagttatttttctaagtttatattagtggctgaaacatataatttttgagtttaacaagataaaataactcactcctatactcgtttgcttatgttaataacatatttcatattgaaactacttctggtaattggaaaaactaaaataaaattgtatgtaacttttcaaaattatattacatcaatttttttttaaaaaaaaaaatcctttagaaaaaacaaaacaaaaattattaaaataaaaaatgcctccatgcaggatcgaactacagaccttcagtttacaagactgacgctctaccactgagctatggaggcttcgatgttctcaattttcatatttaatttattttcacataaatcaattttcccttcaaaataaataaaagatatttttatataattaatttccgaaaaaatattttctttttttgttttctttccctcccgagaaaccttacaataaatttcatgaattgaatctctactctgaaaaacaaaaggaaagattttcaccataaatcgagcgaaaccttgagcgttgcgcctcccttttctttgtctgcgctcattagggtttttctcatttaaaaggtttatattttcttattgcgaaaaactacttcaactatgatgcgtttggttgctgggaaattccaataatataaactatgacgttacgatttctttttcttattgtaggagcaagatggagtgaatgcaagattttcttgaaagaaattcaagataaaggtacaatttttatttattttttcgtatttattggctttgttcgtagctttttctcataccaacatttttgaatttggttattttcaatttgtgtgtgcagataatttgtttttggccaatacccatttgccttttccgttaaaatcattaagctttgtttgcatgtgtgattcccaagaacttcattgctattatgtcaaaagatagaaatgcttccagtgaacacaatagagatggacctgattactttggttactataaatgtcaagctcaaaagctattaacacaagttgaggattttcagctatttacttcttctaaaagttccgatttttctggaaaaaagtcttccgaagatggaggggagagtgattttgtagctccttgttctctatttagtaatggagtaggagatgagctatctgatttcaaaagagaaagattgaagacattgcttcttcagggtgtaaatagtcttactccagaagtcaatgaggtattttgatttactgatatggaaaatgattcctttatattgggctgtttgatatcatcataagaggtaatcttaaatccttttaaaatggtgggttttaaatattcccttcaattttaaatcaatggacttaatatattatttattttatttaactttttgcaacaatttattttgtgtttaatgaagcaatgtaattcaattaaccgtaatctaactaaagattctcatccataactaaaaggaattataagttttcagacaatcatatcctctgctttaatattccaatcaatcgtattataagtttctttttggtagtgatcatttctccttaaaagaaaaaagtttctttgtagttattgatccttttgtttaagctggcgtaagagtgtcttcattgcagatgctatatccagttcaacaaatgcgggagattcgaatgcatcgaagaaacaggaaaaattcttcaagcttatgtgtagcaccaaaaaatggtgacattggccaatctctactaaagaaacataaaatttctcatttaacccctcaagttgcaagtccaattaatcctggatcaaatgttgctaataagatttctgtcaatgggacaactggtccagaagagtctaaggtggctaacattcaactggggagtttacatttattaatatatcttacaagtgagtttgttttaagcacttatatgtatctttcaggtgaacggtgatgataatcgacagctcctgatagaaaacgatggcccagaggttgacaacattttgaagggtgtttctgatgagttatcttcaaaagtaattctctgaaaatttctctactacatataaaaacagtgtacatgtattttctcctctggttttccatttctgtttcttttgatatgtagctgatagcaaatctgatagatgtgaatataaaagctatattcatagaatgatgaatgatgatgttgtttttcagctggggtacatggaccagcagcttgaacaacttcttaatatcgcagtgtccgtgtgcaggtaatggtgtataatactaatagctcttaatattaaattttaatcaaactgcagttgaattttctattaaaagtgtcttagaaatagtgaatgataccaaattattaactggggattttctagttaaatgaaataaatgtattgtatcctcggtagaactatatagccaaatatctataggattgtaaactgtgtttgtataaattattgttgtttgatactctggctattcactatgtttatgtgtaaattacacatttgtttacatataatgatgaattcaattttagccacaagtagttttaagtgtggatcattgttttaaaactcgctgtggcgtaatcctctaggcaaggtggtgagaaaacatacccgaggctatgcctcatctgctgtcattgaggcatacgtctcacagtgatgaggtgctagaggcacacatctcaacagtggcctttatttgtgtgttggggctctttttttttt

SEQ ID NO: 16579 - DNA, 1969 bp, Cannabis sativa
caaggctttctttggatagcagagctacggttgatgcgaaaggaagcctctacccgagggagataaaaactaatgcttcgattttgaaggctaaccgaaacgaaaaccataatcatggagaagaagatgatgataaaaaccgcagatcaccaagcgtcatagctagattgatgggactcgaacccttgcagcattcagtagctgaaccggtcaagaaagctgaacttcgaagatctgcgtcggagtctcgagtgtccaaagatctgtatcagcatcgctttgtcgaggggaacggttttcaggggaagcaatgccaacaagctcatttcaacgtttctagcaatgtagtcagagataatggcggaaacgaagatcgaattttcaatgctagagcaggggatccaaaaacatttgtgaagtataacgaagcaacgaaaggtcatattcagcacaaaggtattggacagaggaaaagctatttcgactcggcagatttcttccctgagcctaagcagactgcgtctctgtattatggcgagatcgagaaaagattaagaatgagaggaatcgatgaaccagctaaggatttggaaactctgaagcaaatcctcgaagctctgcaacttaaaggtcttcttcatcccaagaagccttcgtaccataccgactacaggaactttgtctacgatcagagtttctccaaggaatcacctattgtcgttatgaagccaacgagatcacaatctccgacgggtcgctcttcaaggttcgttggaagcgaatcgccgccgccggtgagttttcgttcaagaaccagtattcgccggaatatcaattactccggcgagtttttgtcaagtccgagacgtgagcagcgaggagagatggagcagagcaaccggaatcgcagcccaagtagaagtcaagccccaacttctcggaatgagaagagtccaagtagaagaagaccgttgagcattgaaacgcaaaggaaaggaaacgatattaccgagcaaagaagagtatctcctattcaatctccaaaacttaattcgaggagaatggggacggatcaacagaccctgaatcggtcaccaaggagtcgtaaaccaacgatggagatccatcgaaaagaggatgaatcgtccaccaccgtgtcagaaagtagcattaacacttcaaccgatacagaggttagcattaactaccaagtttaaaatgcctttaatcattgaatttaatccttaatcgcagtacatttatttattactttccaaatattcagagagcaaaaatggaggaatacaaagaagggaggagtttattggagaggtgtgataagttgcttaacagcatagctgaaataacaacacccacagccgagttacaaccgagtccggtgtcggttcttgactcgtcgttttacaaggacgaatcgtccacttcccctatcatgaaacgaagcattgatttcaaaggtaatttttttttatttatttatttacataatttttaaaatacaataaaataaaaatttgtctttttcggccaagttttgatgggctagattttgtaattgacaatggtgacgtatgttaccaacttaagctcctgcattttagcctctctaggttttagttttaccagtagataagtactggctactactgctgtggtactgaatatagtaggcattagtaggcctctctgtgaatgaatgatgtctagtacgatctcttacaccaccaataaatgcatgccacatcgttactatcacacaaaatagatccaaaaactcactccaaaacctcaccagctcagcattaaatttataactattcttttgacaacgacttcatattacatatggtaaagtcgaatttataaattcttaactctagtagatcacccacttggttggttcgttaaaaactgtcccacttaaccctcccttttatagtatttaatg

SEQ ID NO: 16580 - DNA, 1776 bp, Cannabis sativa
tatttgtaactaaaatataatatttagatacaatttgtcactaaattagttttattgtgatatttaaaaacacatttagtcataacaaactgtaatttttgtaattaatatacttttagccacgaattttttaatcacaacataaaaatactaatttataattaattacaatttttttttaaattaaaagtaaatgtttgtgtagtgatttatttatttattttattattattattgcttacaagctgtctttattggataggtttcaacgataggtattattggatcagagaatacacttctcttctcatatataagacaagactacctatatatagcaataccatgaaaaatattatactatataaactactaaactaattaataaggtagtcaaaatgtgcttgcattcatcaacatatatataataattgtattttaatggtaaattttcataacatatttttgttatgtttgaaggttttctttttaagttaataataattatataacataaacaatttttatttattttatgtatttttcattaataatagaaatgtccaaataagattctcaacaaaaaggaacataaacaattaatatcccatattgattgtgtacataatgaaattaactaacaaaatttaagtgtttctgttttgaaaccacatttgtaattagttaccataaattgttataataaatatgcagggatattattaattggatattgttaaattatatggaatgattttgtaaaattaagattaatttcataatttctttctttttttcaaagttttaaataaatatattattgtaaaatatataattaggattacaacccacagtattcaagatatcatgagtgtttgccaatatctttccttgagtgataatattttcaatatagacttccatttcttttaataattaaaaaaattgttaaaatatattaaaagtcatgagttttattgaagaatgtttttcttatgcatggaattttttttatataaattattaaaatgcatgagaattacggtgattaatatctattaattgttttaagcatatatagaatagatatgttatatattcccttaatattggttaaaatatgattaaaaattaaagaaagattcttcctttgtatactttttaagccagaaaacaggaacatatattataataatagtgaaaccccattgccaataataatggtgtagctagctaattaagaggagtggtaatattttttttagtgtatatatattgggtatatatcaacataaaatttaatataagtgttctacttattttattaatataaaattatcttttaggaaggtgctcaacaaaaaacgtgagaattactcacgctcaaaacggacaatatcatattatatgtgggaattaaagtgagataccaatccaacaaaatgaaataacactacaaaaaagttacttttagtgacaatcttttagtcacaaaataatttttttgtaattaaatgtgacttttaatcacaacaaaaagttacttgtgactaacatagtatttaaatataagttatcactaatttagtttatatttgactaaagacacatttagtcacaataaattataaatttgtgattaatacttttagctacagatatttttataattataatataaaaataataatttataattagttacattttttaacttttagtcacaaattttattttgagtaaaagtaaaattttttatatagtagaagatgactc

SEQ ID NO: 16581 - DNA, 3613 bp, Cannabis sativa
ttttgtttagagttgtaattgtcttagtcttttattcatcttattttattcttccattgtaatctctctattttttctaacaatacatttacaaactgtcgcaatcttggtctcatcgagtggataactcagatttagcggcaaaaactagatgtgaaacaatgtggaagtgaattgatgatcattgtatatctcaatttatgtttatactttacattaactaattacttgtatatttttcatataactaaattgcaaatctcaattcatataactcacttgtatactttttgattaagttattgacactttcgttagtttaattattgttactatataaatttgtaaaatttaaaaattaatgcacaagaaaaaattgtagaaaatttgaattctttcctatatttccaatgtaaacgatgaaaaaaaaaacgtcgctgaaaaatagtatttttagagctaaaaccgtagcttgcactataagatatgagttaaaatcgttgtctatactactatagacaatagttgtaaaccgtcacctatacttaccgttgggaatggctttcagcggtggtttcaaactatcgctattccacccgttttgcaacaattgaataggcgacggttatagaaataaacgagaatactttatctaacttattaaaatcgtcgagaaaattcaattttttgatagtgccaatttgaaaaacactagtgattcaaggactactactattattatttatttaagataatgtattgtaatactttcatttcaaacatttctgaataaagcataggcaaagaaaaatctcctcgggcagtgtggactcctatttccatacgaaggaacatgaaattgatgtaagaaaaagtaatggctccaaatcacaaggcgaaatccttttgtggtgattaatattttattggaaatatgacattgtttccactaaactcaacaaaactaaggaaaataatagatttccactatgcaaattttaacaactcaattaatatatcaatggatttcacaatccttccacccatacatgtcctttatgtcccaccgagtttaataaaatgaatgattgaatgttaaaacaataaaaagtttcctttcaaaaaagaaaaataaaagaaattgcgagttatcaaattttaaggataagatcatacactatattataaatttatggtaaattcaggaaaaacagaacaaaaaaaattagaaatttgatgagacgattacaaaaatttaaatacttattaattgccacatttttaatgtttttcaatgacaaaactgcatttaaactacaacaatcattgtgtagtaaactaataattattatttgtacaaaaaaaatattaatttttaagataaatattattttgaactctgtatttacaaaaattatagattgaactttttattttgttaaatgacaaaattgaccttatattgtttaaaatagtacaaatagatccctgagattaattttgacaatttttttaatataaccaacttgaagacaatttctaatacgaacatatgaagaaaatttaactaattttgtcatagcatctctagctcatattattattatgttttattttgacaaaaaaatcaattcaaggtcctatttttatcattttataaaatataaggttcattttatcatttaacaaaacagacagtctaatctataacttttgtaaaacacatagttcaaaatagtatttatcctaatttttatatattacctattcaaagccactatggtaatgttattagtgtaatttcatattaaaatcttaactattttattttgaataacatctaaaagaaaatgctactattgtaaagtcttatctcacaatagtgttaagtacaaaacactctcaagatcttctttactttatactttaaaataactcaacaaaactctaatttttttattttaccttaactttttacgtttcaccatacaatttctctatatttttctctacatcattaaaaaaattatatctttaaaaaaatttatttattaaataatagaaaaataaataacaaaaaaattaaatatgtatttaaagagaaagaaataaatacatatacatttagcaagccactaaggttagcttagtggtgagggagggatagaaaaaaagagaggtcatgggttcaaactcaaaatctttaagctattaaactattaagttattaattgattgtaaatactattatgctacactcaaacaaaagtacatatacatttaactcacttgtagaaggaagaccaaaaaaaaaaaaagaacatttaactatatatttaactttagaactattatagcttatcagttgggaccgctctaatggcatgctcataacattaagactcttttatttttttcaattattaatgtttaaaagttattatatttttagtattattccaaaaaataaaattagattaaattaatgtactctttgtttgttttgtttttttttttttttgttggaaagaaaaatttgaatactcatttagttttgaaaataaacaaaaatataacaccgagctataaaataaatttttgattttgtcatgtcgattcattaagtcaagttataattatattagtattagtatatgacaagttccaattgtcatataaaagaaaattctcacagagtgcactttctctttgtccacgactagagaaggctctccgacaaccctcgtgtggtttgggattttccttgggactgggaggttggaaagtcttcacattttggaaagacaaagttggttattccttctcttgagaatatgtgcgatgggaaggtttaagggaatgaagggatcattaatttttttttccaatgatgctaatgctattgggaataagcattctttatccgctggatttaatatttgattgtctcagtggaagtcaaaagtaggccatacggacccgtttgttccccttaacgatggtgtgaatgtggatgatgctagctcttaattctctatccaaaatgatacccctatggaggataactcatcttctctacaagagccatgaaaggtgtggcttggaattgtagagggttgggacagacctctacagttctagagctaaagtccctagttcggatgtgctcgccatatttcattttttttaactgaactaaaagttgatgcaaatttgtggtacctattctaaaatgattacatttttattttaatatttatgttcctattcttggaaccataggtggtttaaacttaaccttgtaagatggtttagtttttgaaagcattattacttctcgtaaccaaattacaaggattgtgtattcgaaccctgagcgccacccttggttgttgtctagtgtctagtgtctatggtctgccgtactaccatgccaaaaagaacttctagactaatttcatgaatgtgggggataagtttggcagtccttagttaattattagggatgtaaactttgttcgctacgagtcaaagaggattggttccaatgttggaatatttattttaccgagatcttagatctactcacaagtatgttgtttaaacacgctaa

SEQ ID NO: 16582 - DNA, 6928 bp, Cannabis sativa
  modified_base (5707)..(5716): a, c, t, g, unknown or other
  modified_base (5938)..(5948): a, c, t, g, unknown or other
tataggcacactttatcactttatataggatatatatatatatatatataataagtgtatatttttatattttgttattttaacacttttgcacacaaatacttattctattttttttctctttttcattttcttactattctcactttaactattttaagctatttttctttaattaatcatattttataaaaaaaacttaattaatttattttaaccaactaaaatatgatttttttttttactttcatcatttttcttatattttttttaacaatctttctctttcttacaaaaaaagtaaaaacacgcctcctatatttttctattttttacatgattaataaaagtagtatctttttttttttggatatttttgtagtttattcagagttgatttatgaaggatttgtatattttaacaagatgatgtcttgttatttttctgttgatttatagctgacctttttttttattttatagttgtttttttttaattgttgtttaggttttctatagttattttatagttatttttttgttatttttatgtttttttggtacaattgttgtttagtttatgtacatttttaatcgtgtatattttcagtttattccagataatatttttgatgtatatatgtgcatttgttctgctatttttatgttatttttagttgtttttaagtggttttcataattttctatgttaaataattattttttagttatatttttactcatgtgtattttttattgtgtatatttttaatttattcttaatatttttttattgtatgtgtgttgctttgtaaatatagatacatatatttagtttatttttttgatacatttttttaaaatacaatgataagatttttcatttttttaattgacacgtattgacatattaattgtatatgagaatcttacaaaaataccccattttgaattaattaggttttattatttctattattaatgcaactatttatttaacttttaaaaaataaattatcattttaactatcactaactcaaaacggaaaagagaaaaaaaaaagttgaaaaaataaaattgtaataacaaattttatgaaaaaaataatataatagtacaaaaaaaataaatcaagttgtcaaaagtaagtaaaaaaaaattgtaatacaaaaatatattgagaagttgatattattttacttatttcaattaggtcaatattttgttatttttctattgctttgtagttatatctttttgttgttttataattattttcatgtcgtttgtttagttgttctagggttgctttttagctatcttagctgtttttgagttgtttcttttattttaatgaaatacaatatttttataattttgaaactttaacacagtatttttgtaaatttgatacagtaaagatataaaaatctctgtattccaatatttttataaactttcttctattttacagtattattgtaagtttcccttttcttaatgtaattaaggaaattactaaccattaaaaagttaattaggatttgtccccctattcaattatgatatgtattaaattagtcttctaaatttttcaggccaactattgataagattatggaattcaagcactttagtttaacgggcacttggcgtgaatggaagttcgggttgcacgatttggtacttgttaaagttcaagaagctagcataatttaatacacgttaaagttcgagagcacaatttatagtacatagtagggttgttcatcaaactgttcaaatcgcccgcacaaaaaaaaaaatacgatttgaaattctttgcggtgcggtctcagtttgaatttttcttaaatcgcgcggtgcggtgcaatttgcggttttgaattgttaatatgcggttcaaattgcaccgcatattataaatataaatttttatatttatttaggtccaatatgtaaaggtccagtccaaagcccgctaattattgtattgttgaaacttaatttttttttttcatatttttcttaagtcttatggtatttttaacaaatattgctcaagctttattgtatttgtgatagtttaattatttggtgatactccaaaccgtagaaaccgcaaaaattgcaccccgccgtattattttttgcggtacgatttctgtggtttttttaattttgcggtgcgggatcagtttgggaaattagaaaaactgcatgtgcaagttggtttgaaaaatggtcaaaaatcgcaccatccgtaccgcgaatacccttgtcaaattaggtgtctgttagtaaaattgaatgaaattagataaaaattattaaatctgacaatttaatagtttgatggaagtttttaataacctgaggtataatttaatatatattaaattagaaaacaaaaacaaaaagttgtaattatagatgactttaatgaatgtgaactcagcaaattcaattatccaaacaacttgagtatctctactatttttgtgtggtatgtttgaattatgcaccagacagttaacattggagacaatagaagatgttacatacatacatcaaccatagttttttggtgagaacaaggagcaaacacaaagctataaccaattgaaactacatcagatgaaagattagttactgatctgattcagtttttttatgacactattctttctatacatattgccttaacaactcttgagtagtttttatgtgtaatttctcatttattggcttactatcctacaacacaggtggctccaacgaataagaatgataatatttacttctctttcctaattatctattctttatcataataataatttagaatgtgaactttacataagatacttttgcatttataaaattggacaaaaatttacaatttactaacatttacaccactaaaaaaattgttagatttataccgagtataaactcaaatcttataacataaatatccaatgataataaaggtttattattagtatttgggttacttccatatatatagtttcacgttatatcgatgaactaaacttaagtctattgcccaattattatctatggttgaatttatttcatatgcatttcatttaggtcatgtctatcacctttcattagtgatctttttcaaacgtttagtgacattataaatagaataaccaatttaatgaagaaaatttgaatttaccgacaaattcattgtcaaaatattttataaaagtaaaatatgaattcctaaatataattacgtatataaaattgaaataaaaaaaggagactttaatcacaagcttattaatacttcatatgacattaacccaagaatgagagaagggattatgaggaaatttgcggtaaaatcatttaaattttataattagtgacacttaatcatataaaataattttttagtggtaaaattctctaaacatctcacttcttttagttatttaccatttcgtttaaaatgctctgttaagtgttacgatagatatgtcacagtgtacacgtggtaaacttttagtgagaaatattggcagtaaaactacttaaactctatgattagtgaaacttaaccatataaatcaattttttagtggtaaaactctccaaacctcacttaagttaactatatatccacttcgttcaaaaggctaggttaagtgctctgcggctggaactatcgcatctctccttccctcgttgcttcttcttcttctgcgatgaactcaccagaccacgaagaacctagggaagaaccatcaaacctagcgaaccccttgtaactgcggtggtatcggcgaagagttgtgggagagggagaatcagatccagcgaggtcgaggcgagaaataaaaacttcaaagaagggttgggtctcagggcttagaacgaagctgaagggttgggtttgtatggtcggaaagttggttttagggtttgtttgggttgaaggtggtcagaggtgactcgccagagttgtgcaagaaggagaacggaagagagaaggagtgcagatggaaattagagttataaggagaaaaatgtaaaagaaagagaagaagagtaaaaaagaaaaaaaaaatatttttaattatttttaatttattttttaaaatatttaataaattaaaataatgtggaccactaaaaatttactacgtgtacaattgtgtacattgtagcattccaccatgtcacttcacagcgtcttttggactgaaggggtaaataactaacagaagtgaggtttggagggttttaccaccaaaaaattgatttatgtgcttaagtgtcactaatcatagagttcaagtagttttgccgtcaatatcctccactaaaaatttgtcacgtgtacgcttgtgtacaccgtggcatgtttactgtggtacttaacatagcattttgaacgaaaaaggtaaatagctaacatcagcgagatttgaaaagatttaccactaaaaaatcaatttatgtgattaagtgttactaatcataaaatttaagtagttttatcgccaatatctcttatcttaattaaatgttgcttatcaattggactataataaatgtcaatactgtcaaaatattcatatttatagaaaattatattttaaccaaaagcatgggctgagttcatcttttattgttaaattttcatgttaacttaattgaaataaattaaaagtattaatatttagataattttatattttgaaattaatagggcatttatctaatccaaatactaaatgaaaaagaagatagtgttgaatttattcccatctaataaagatgggttcactaaggaccaacaaaagagtgttgtgatgcttgagttcattcaattagtaccacttacgtcatattcaatccaacttgtcacactattatttactgttgattatacacaaagttagtgctattttcatattattcatttttcaaacttcaattacaaaactaaacacaaaaaatatacatattatcttacaaaaatagatatcatgataatttataaatactaatttgaggaattttaaaaaatatattttatattttttatttataattttacagtttaaattttttaattaaaaaaatatatttgtgaagttttaaaattacaaaaatacactttgttcagcaaaaagtaaacatacattaataaataacaaaaaatcaacttcacgacaactataaataaactataaaataacaaaaagtaaccaaaaaaataacttcatgataactataataaaactacaaataaactataactaaaataaccaaaaaaacagtttattatttttactgaaaatgtatttttgtaaataaaaaaaatttaaagagtaaaaatgaattttttttttattgatatatttttgtaattttttttttaaatttttagtgtcttgtttttaatttatatgataaattgtatataaaaggtactgtatattattgtagtaggatacatgggataataaatgtagttcaattggagtcctttttggatgtctaaatgttagacacacttaaaatggttattttgaaccaatttataaaacatggaatccagaaaggaatttttcaaaataatattattgcccttagtttattaatgatataattataaattttagggaaatttccatggtatactaacttttgttattnnnnnnnnnnaatactgtcaggcggtatttttttacttttttactgtgtttttttttataagtttcataatgcagtatactgtgttaagtttttactagtattctcctagtgtttttttagttgttctactgttgttttgagttgtcctgttttgtgttctactggtgttatataaaaatacagtatttttgaaaaaatttctgtgtgacaatatttttgtaaaaattaacnnnnnnnnnnntatttttgtaagtttctctaaattttatagattttattttttatacaacaaaaatatatgtttcaaaataaatagatcttatccgctcgaactaagactcttagaatttttgtggaaaaattaactataacagtgcagaaatcaaaacaactaaactttaaataatcaaacaattatcaatgataagatttacaaacactaaacaaaaatcagagaaaaacaggggcaaacatagtatataaaaccagcaacaataaatgtagaaaataaagaaattaacactaagatatatactggttaaagtctgatagatcgatataatctatggctatactccaattctgaaacaccaccaaatcttctttattgattgagcaagaatatgtacattacactcgagaaagattctctattaagttctctcaaagcttttcaactctcacactcttacttaagaatcttcttcatctacagaatattcttcatacaaaacccaaacccaatctctctctctcttttctcagtacttccctttctacctttcaatctttttctctctctaactcttaatctcaatctaaatcatattctgaagatgacaagtcaaggtggtatttataggcttaagatcaaaatcctaaagtcaatggctggaagaattgaagttgctaagttagttagacaataactaacttaaccaactcccctatgagcgagatcttcacgtcagcataagtcttagtgcatccgggaatatatacgtgcttctaggatcacagaccaaaggcactcgctgaagaagcttccagataggataaaactagcaggagtcaactatccagaactacctttcggggagaataaccttccaggaggaataactagctatccagaactcctttccagaagagggctagctatcttgaagactaaactcgacgtggacatgtgttggaatttattttatcaggatcttagat

SEQ ID NO: 16583 - DNA, 9493 bp, Cannabis sativa
gtgcctaatagcaatgctcaaaaggatgaggtggtaatcttttccagagtcttaagacataatttcatccattttagtaaatgtttttcctttgtttaagggcgaaacattacacactccctcgactccctacgtaaaaggaagccccttctcttctcttctccaaaaaccacgctggctcccctaaggcccgcataatgcctgatcagctcagcagcgtcatggccgagccacctctctcagactccgatgcagattccgataatggtcaacacggatgcgaacacccccgccgccacgctgatctttccgattcaatattcagatcctactttgagttcactggtcgatcactcaccaccccggccgacctatccaagattcaatccttcctcacctcctcctcttccggtgctctttcctgcctaatatgtctcgaacgcatcagaccctctgatcccacttggtcctgtaattccctctgcttcgctgtcttccacctcttctgcatccagagctgggcgcgtcaatcctccgacttggccgcccttcgtgcctccacgcgcctccccatcactgcgaatagggctgccgaggtttcggtctggaactgtcccaaatgtaggtccgaatatacccaatctcaaatccctaagacttacttttgtttctgtgggaaattggaaaacccgcctagcgatgacccttgggttttgcctcattcgtgtggcgaggtctgtgataggagtttaaagcacgagtgtggccatcgttgcttgcttttgtgccacccgggtccttgcccctcttgcccaaaacttgtgaaaagtcgttgcttttgtggttccgttgaagatgttaggagatgtggttttaagaacttttcatgtaataaagtgtgttccaagttactggattgccgagatcatacgtgctctgagatttgccatgatgggccgtgcccgccatgcaaagttcgggatgtttactggtgtcaatgtggaaagaaagaagaggagagggagtgttgtgatcgagtgaattttcggtgcgaaaatcagtgtgaggagatgcttaattgccggagacatgtatgtagtaaagggtgtcattcaggtgaatgtggtccttgcccacttcaagggaagaggacctgcccatgtgggaagagaattcatgaaggaatgtcttgtgatgttgcagtgccattgtgcggttccacttgtgataaggtgcttacttgtggctaccatagatgcccggagcgatgccatcgaggtccctgtattgaaacatgtagaatagttgtcattaagttatgccggtgtggtagcttaaagaaagaggtacagtgtatttgtttaatgttttgttttatacttgagatgtcatttgattttgttcaatgttatttgttcgcttactagtttagtgaattaagttttattgaatctacaggttccttgctatcaagatatggcatgtgagaggaaatgtcagaaactaagagactgtgggcgccatgcttgcaggcgccgttgctgtgatggggattgtccaccatgcacagaggtttgtgtttgtatctaagctttattgatttttgatggtgaattgttgacttccaattaatttttttaatttcaggtatgtggcagaaagcttcgatgtaataaccacaaatgccaatctccatgtcataggtgagttcagttatttcaagttttttgtatgcaagatgatggtccatacgtagctaaataataacaagtatattatgcatagacactgaaagcagtatcactctcttctttgaactggctatgcacccatttcgtttcatttcaagtgtctttcttggcttccaaagctaagttgagctttcgatctctgtagtctagtttatctgccacctattttttattgttacaaaattaataatgtagttcatgggatgtataattcatgcatgttttacagagtactttggtttttttttttttttttttttgtaaaagcatatgaaatgtgtattgctcaggtgacattgctaccatgaactgatagctgatatattgaaagttgaaatctcgttatcttacatcactattccttaatttctaatttgattttatcaattgagggatatttatatgaattgtggtgggattgcaaattttattttgctgcaaggtatgacctgttctgttttattcttgcagaggtccttgtgctccttgcccagtaatggtgacaatatcatgtgcatgtggtgaaacacactttgaggtgtgatttttgttattatattgccttttttatgatgtaaaattgctatcaaactagtgtattaggtaatacgaaatggtatgacttatatagcttgtcacggctgaacaacggtgtgtcttgtggtggtcctttttgtgatttctcagaaatatctgcccttgtatactattttgcttatacgttcaacttaaaaattgatttgctaaatttcttattttggatcttattttaggttccttgtggtactgagaaggatcaaaagcctcctaggtgtcctaagcgatgcactattatgcctttatgcaggcatgcaaccaaagttaaggtactattggcggttttctgaatctaatgttctcacagaactcatttttcatgttttggatcagaagttgtttcatataaatataaatatatatccttatacccttatacctcagtacatgaagctgtttggatgagtacattctggataattcatggttttttctttttttatttcacatatatgcttctttttttccaacttaagtacagttattaactctgaatcagaactttagattacattagttttcgtccagacgttagtcctctttaagttagcattaagaaaatttgctattcacaaagatgagaagaatgctattcttatttgcctctttttctcttttctgtttttttttttgtgggtgaaatttgactcacttttacagcctcataaatgccattacggagcttgccctccatgtaggctgctttgtgaagaggaatatccatgtggtcatatgtgcaagctaaggtattttatttcacgttcagttacatattctgtattttcttgtgtaacactagtaaccacttcttttcttttgcatgtttaggtgtcatggacctaaacctcctcctaatccagaatttacattgaaaccaaagaaaaagaagcatgttcatcagagtgaatgtacccctggttctccatgccctccttgtccagaacttgtttggagatcgtgtgttggccaacatattggagctgataggatggttggtttgtgcatagaatatacgacatgtatcattctagctttgatttctactttctaaatcttttttcttattgtgctcctcttttcagatggtatgctcaaataaaatgcagttttcttgtgaaaacttgtgtggaaattttctaccttgtggtaatcattattgcacaaactcttgccatgccctgaagacccaaccttgtgaagagtgtaatctttcttgtgagaaggtatgaaacttccttcttgtatgttgaatatgtttgctgagaataactgggttacccgtctgttacttatcatgaatttcatgtactggtttcaggagaggacacctctatgttcacatccttgctccttaccatgtcatcccggagactgtcccccatgcaaggctcttgttaaaagatcatgtcattgtggttcaatggtccatgtttttgagtgcatgtattacaacagcttgtctgagaaggggcaaatgactgctcgctcatgtggtgggccttgccacaggtaatccaaatatgtgatcccttgtttgttttcagttcataacagcttaaatatactacattactaacacagcatcaaataattgacctgtaataagatcttttctctgcataggattgtaattttacctcagttattttcttctgtattaatacaagaaccaaattgtggcttaaaaacagttctgtttgtgcagaaaattgccaaattgtacgcatttatgccctgagacatgtcatcctggacagtgcccctcccctgagaaatgctccaaaaaggtactaattatattgatggataaataactttgtaactagattagatatgcatatgccatttttggttttaagttctcgtaatattgatttatcaaatttgtttcgttctctgttgttgttgcaaggttaatgttcgttgtagatgtcagaccttgaaaaaggagtggcaatgctacgaagttcaagcagcccatcgccatgctggttctgatcccaaagacattattaaaagtcagtacggacttggacttcttccctgtaattctgattgcaaaattaaactacaggctattgattcagaattacagcagcgcaaatctaaagctgtggaggtaatataggtcattagtgacccttctctgtctcatcattttgcctgcataaccattatgccaatagactccattactctagaccacatacaaacacattaagaaatgaaaactttgaaaataagtcatgtgattaatttacattatcgaccgaaatacatgcccaaataaactacacaacagattagatttatcaagataaacctaatgcatatgtattctaataggtaaaggtaccggacactgaaaagcatgtcccgaaacgtaaaagaagacgggaacgagtacaagaaacaaagcaaatctcaagacttcaagtaagtttctttctttaatagaagtaggtagtgaagatttattcttattttcagtgcttactaacaatattttgttctttatgagcagaaagtagcgtccacaataaagtggctacttctatttgccatttttttggtggctttgattgcatcactatactgtggctacaagggtatcctatggctcaacgactggatgaacgaaattgaggatcaaagactaagaagaagacaccatcaccaccggatctaatttccctagtagctatatcctaatgcgacttttgcactatacttaggtcagtataaattaaattactcacattatttatatatatatatatacattatatatgtataaatatacatattctttttcttggagagaagaaattctttcttggcaaatggattctttggtgaataaaataaaataaaaaaaatgaatgtttttggtcttataattaatcattactttgacttgtgtatgtattctttcttacattatatttttacacatttgaatgtaatgtagcataacatgttctttatttgtaatgttaatgtataatgattgacaatctaataattgtattactgggaaaacttttatgattgtcagtgttgttgtaatgaaatgttgttttttcttatcatatttacttcagaatcaaaccatattgattgataatatatcattaaaataatattattagattggaaaaagagaatcattaaagaaacacttttattgggccaacaaatcttctatttcgaaagtcatgacttggtgtttagtggggttgtaaagacttggaagacttggctcgcttaaactcgacggcgccgtctcaacgctcaaaatagagattgacccagatttcaactgcttcctaagtcctcaacctaaaaatgagttcaataaatttatcttattagctagatttcttggtaacctcccttttaagatttttagattttcatatcttatctaaactttacattgctacacatgctggttggtactggtttttgtttcattatttttttttttttttaaaaaaaattaaataaatagatccaatttgtcaaacttttctttcataacacaatcgtccatcttgattttcaactataccaactcctccacctctctttctttatgttcatttatttggtgctattctttattgtattttccttttattagtctgtgttttgtaatgacttgttgaaacagtgaagagtgtgaccttgtcagtctagaattttcagaattccttagatgattctaaaccctataaaatataaatattgaataatttggatgtaacccaaagcttccttagctattattattaatcggaataagaagtcaataatgatttcccaaataatagaaccattcatataattttatgttgttaggtattgttagactaaactctcataattctaagcattatgtatcatttttgacacttcttggtcttgctttctcttaatgacactaattatatactctctaaacatttatataattattatacaaaacatcttttcaacttcactgtcttagaaaaggtttgagtcgtgtcgttacataaattcggtcgtacttacattaattttcacaatagccaactcttccattttgtaaattgaaattgaatagtgctttaaaagtcatacttggaatttgggttcacctaatcaaagtataaacatttttaataaataattgaaatttaaaaaggagtggtcacttgctaccctccttcaactcattcattgaaaaccccacactccctcccctaacaagatttaatgcccataaattcattcaataattggttctactatacaattagatatacaaaaataaacattttaagatatcattggcaaaatactttctttattgaagtaattttacattttggcttagttttattaattctctacaaaataacatcaatctaaaatgactttaaataagatagtaccaaattctgttttttaaaattttcagttggttaattttttttccctaaactattattgattattggattcaaaaaatttcttccaattaaactaacagacggctaacgctaacgtagtggttgtctttgtactaaattgtactccttaaagttttatctacatcaagcatcaattaataaagttaagattgaattagaaaatctcaatatagttaaaaaaatttaggttcatgaacaaaatttagtacatgtttacacaaagaattttttttttttggttactatttccgttaataatatatttatatatatccagtttgttcttttatctttgtgttgttttcaatttttttttttaaaaaaaattgtttctaaattatttctaaatgatatttgcttgttcttatgtatattttactagatatatgttacgtgtcaagtcacgtatattaattttattttagttttagttttttttaatatcataattttaaaaattaataatattcaatgtagtgataatcattgaaatttaaaagcataatagtaatttaaataaaaacaaaaattactattatactttgtaatagtaattaaaaaaagaaattattattcgtcctaaatttattttggaattaatgaaaatgctcatctggtttaactaaatacattgatactgatgtgacaacatctaataatttgttaaatcacaaattatgttatatagctacattttatatagaatagatttatatattttctttttcttttttcattttattttgaattgattgcttacggtttttgttggctttttctaacggcatcccattagatgcatcaaaactcacctttatttattttttttatagcaaaaattcacttttctttaaaatacataagttacaccaaaaaaatatattttacatcattatatcattttaacttacaaatataaatttatatataatattaatataaaaaacaaaaagtggaaaatgtatttacgacataaatacctataattttgagtttgtaagcggtatagtttcattaattttttttagttaaataagcaccttgttagtaaaattgtaatttttgtccagttctgttattatgtaatctgttattatcttaagaataaataatttttttcccttaactatgatctttgtagagttttgtttcttaaatttttttctattgcaaaaattctcctaattacgcaaatcgttacaaatatctccatccagttatattatgctcatttttaaaataatttccttatgtggctttggattacaaaaataattattgtgtgatggctcatttaataactttaagctacctaaaatttagtttattgacattaaacatacaaacagacagtagctctaaggaggtacatacacagcaagggcagaccgacataaaggcgagatgggacagtcgtccctgaaaagaaaatatcggaaaaaaaatataaatacattttagttagttacaacatatatttctaaataaaagtaatattttaatgaacataatacaaatacaaattattgaacctaatattttattgttatttttttttactttatactacatttaatactaaaatacaaatttatctcaatttttaacatattataccatgtgaaaaaaagacactccctcacttacaaaaaaaaatatcgccccctcaacttaaattccgagtcattgatatacattctcataatttatgattaaactattatttatatatttatttttatctgaattcttaaattggactaaattagcgttatattagtgatatattaacaaattatttaaataaataattaaaatgcaacttcaagcatcatagttcagagaataaatcttaccaaacttaattttagatttgttgaaagaaaatttaaaaataatttatactacatatttccatacaaactcaataattttaaatttgggttttacatgcgtctagagtactaaaaaaatcattaaaagtttatataccattacaaactcaaaacgttaactaatatcccttactacaacatcatagcaacaagtcgtggcactgtaactcattactatttcgcagtcctattattgggttgcaaatcaccaccaaattgttgcttttctgtctcattcgacttggtctaagaaacaaatctagtgtttttagaaagctgtctttttttcttaatataacgacctctacttgtagagcatataatccttttaattttctattatcaaccttaaataagtaatttattatccaccaaaatatcttagaattattaatctagatctatattcaatggactatctttagaattcgacattattttctcagctttttgcaattttatgctcggtaacacatgttcgtgttcttttggctaggaacatttttatatctaattcagtacaattttgggcactgccaaaagaatttccaattggccaaattagtgatttgaagttaattgcatggccggttctagaaataagcaagtgaaaattacataaaatatgagattttgtaaaaaagttacaaaaatatagcatttataagtttgccaccattttttttttcacatttaagactttttatggtatttgatatgccatatttttgtaaaccttttatccaaacccatatttcatgtttttgtt

SEQ ID NO: 16584 - DNA, 4033 bp, Cannabis sativa
atttaatgatgtacaaatgcaagaaatagataccatatttaaatagtactagacattggatcaggaacaccacagaaacacacacagcaagaaattattacttcagaaaggaataggataaagatgaaggatgaattttatacctaggaagaaactcagtaataatagacaggtttggtggtcgagtaacagcacccataaaaagaacaacatttggatgccgtaacctacgcataattcgtacctgacaagatatacaagattagcaacttcaaagcattagaatatcaataacagcaggaccaatgccattaaatcctattctatcctcacagacacttctgccaccagaacaagactactaatcagcatatcaaactaccaatgtcacaatgttctgtgcattttaattccttcctaattttcacatagctaccttataactgtacaaggccttcaatttttattatatttttcaaaacaaaatttcccaaatatgattggccaacatatagcacaatattattaatccgaaagactaacttattgcttacttctcttttaaactcatccaaagcagcgcctgagaaatcctgatccaagaacttctttacagctacctcctgcaattcaccaacactcctattaattcacagtcattctttcctttatttccttttctttcttgtttttttttttttgtttttttttccctttccttttctgcttattagtttcgatcacacaaattaaatcataaatcagaaaaatcattcgctgaaaatgaaatcctctataagtgaaataagaaaaatcatataaaaaatagagctagtcatataaagcaagaattgagctattctttcggacaataaagttttctacaaaaatagatcgtctaaaaatatttctctttattcttggagaatagtctgaacctaaaacgaaataaaatgaaaaattgcatagagtgaaaatgagatgcaaagaaactcactgttccattccaatctgcatggtatacttccccatacgaacctaaaaaccagaatggaagatgggaaaataattagactccagcatgaagcatatttctatagctatacaaagagataagatttaatattaaaagatagattatcatgattagaaaacctttcaaaccttacaaagatcttgaaaataaccgataacatatttaaaaaggtaagaaactatgttccagatgcgaaatatatttcatattaaaataacatagcacccaaacaagataacggtcatgcacacacatatgtattgaaccaaagatggagaataaagttattagctgacaaaaaaaaaagaagaaaaaagtgtgatcactgttgcacttgccaaaaatattgcattacctagaccaatcctttcaccaataactagatcctcccaaggaatttcacattcacctacatctacatcatcaaatacttgatccatcctatttctggtagaattagctgctgtggaaggaccttccggggccttcaatttcatactggtctccatgaatctgtcatgtgtgccttttctacggttttttaacacattttcattgttttcaccttctttattcacgtatatccaatcagtctgcaaatcttttgaatctctgggtttttcttctgcaacactagtgtttcgatcatctcctgaagtcattgttttgaattcacttgtttgtgccgccgacaatgaacttgaattaaacgcagaatttttttcatcataattgtccttacttggtgtacttgtattaacagatgacttaaatccaccattattgaccttttcagttgaactgctggtagaagctgctaatgatgaaatattataatcattaggttcacgattaattcttgtagagataccctccaaataatcactctctttcttcttaggtacttcattacaagtatagcgacttttccacatcagtggcacaggaggacggccagggacaacattattccttgctctttgaagctcatcagctttactctctcccggtttgttatacacagagttctttcccggtccttttatttggaatggattaagatctgcaaagaggttcttaggatcctcttggttttgattatatggaactacattaatattcatcctcacaccaccatcaacagcatgagctccacggctgcctttatagtgagtattccccatggctgatgatgaaaaattatccaactgattagaaggactagctttattggatactctagaaggaccgacaatgttttcaacacttgaatctgaaaatgcaggcacagattcaattggtcttggtcttccatcttgtacagaactattttcaaccataggattgtggctgctgccctcatcttggaaaggcttttgtgtggaataagaaagtccagtattgtttaaggaatagcgagctgggactttgcttatgtttggattgtatggtctatatatagaatcttttgcatttgggacgtcaactggtataagtgttccaggatctgccatgagatcaaccaaaaactccctgaagacagaaagtgaatgtttaaattcatgtagaagataaaattgaaagcaaaagcaaacaattaggtactgacaaaattgtagaagcttatgtgcatgtcttcatctatatcagtgagttctaagtattagggtaagacttgagcactttaggggctagatataaataacatataatagaaaacacttgagataacacaacaactaaatcaccttgaaaccagtgaacaacttaaggttatcagtttaaagccactgatcagcataaaatggtaaaagaaatgaaaaacattctaattattatttttttctaaagaaaggtaatttataagacctgtgaaaattgaaagttaaaaaaaaaaaaactgtatatactatatacacaaacaaagtatgaaggaagataagctaaccatatttataataataaaccaatagaatatacaaaatctaccaataataaaatttccaagtaaaaaagcacaaatttacaaccttccatcctccagctttattacgttcacagcaccatcctcaacacctgtataatgactgcctttcagaagtctacaaggcattttgatattgtccgctaatacctacattctcaaaaatgaaaagtgtaagtatacaagtagcaaagacagataaagtgtggtgaagaagcaaagtcgcaaataataaactgcagcttaccttaaaaagtagagcacggtgtcttgagaggccaatagttatagacccaataggcaacacacttgtgtgtagagattgccttgactccatgcttcgttccatccacctagccaacatgacattagcatccttaacaggaccacccatatgacccgcaacaagctcagcaagcctcggaaccaaaatcccaatatcactaacaggacagtctacagcaatgcattgtgtaatttgaattaactcttcaagagccggatcaattgttcgattaactaataaaacttcaaagctagaactcccaatgcttgtttcaagatctgttagagacggcatctttccttgaattgctgtttctgtggagagtccatatacatcataaaaaccatcaaccactttctcttcataatcaagcacattgtactcctggtaataaaaatagccaaatatatagaactttcagtggaattaaaagaaaacagtatctttgtttgaagaaaaagtagctaaagtcagagtacacttggaaaatactacaacaatgcagactgctattcaaaatgtctgtctgctaaatgaaccctaccacctagattccaccatgccaataataaaaggaactgaagtaagtaattagtggatcaaataccaaggataagggattacaaaattagattagtgttaatcgcactcagaaggtaagaaatcatacactacccaaggtctgagcatttgggtggaaatgattctaaatagtagctgatgcgtg

SEQ ID NO: 16585 - DNA, 3575 bp, Cannabis sativa
agttttgttaagacttttcaagacttaagataagtgttcatattatggtttttgtgtgtgtcttattgtatagagatgtattacaacaagttatctcaaacctaagattgggttttcattttcagttaatttttattggaaaagttttgatttttatatttgatctttgcttttagtgaattgggtttgatataatgccatgtgtttataatacaaccttggtcagaatttccatttttgtgttggaaaatgttccatatttcaagcaaaaatagttttttgatgatattaacgaactatttgtactgtttgctgttttctttggtcttgttttttcttattttaagattagatcactggattctatggaaatcaaattttgttaggattgttgtttttaactttttaatactttagtttctcctttgaaaagtggtcttatatggtttttctgagtgtgtgtcttattgtatagatatgtattacaacaagtacatcagctggcttagaacagattctaccatggatgttttaccataaggttcttggagttactacatttttcctgtttgtggaaggaaaggctgcaactcctgaagtttcgaaagttctgaagtccattcctgtgagtttgttgatactttcgatcgtatggatgtttttttagtggcattgatttctttgagcattaaaatttacattgctttctcagggagttaaagtgatatacagaacaaaagagctagaggagaaacaagctaaaaggtagattagtcttgctacttttagtcagtccctaagattaaatctagaccgaaaagtagcctttcttctttcccacgaaatatacgaacccggttttagactaatcaatgtaattgtattgtatctttctgttcatgatgtaaatctcagtgacattttggatgaatgattatgtattttttttgtttgtatctatttggcatcatcagtcggatatggaatgagacatggctttcgagtttcttttacaagccttgcaattatgaactattcgtgaagcaatcgctcaacatggaaatggctattgtcatggcaagggtaaactcattttctcattgctttgctggtaagttttgttttagaagtttctttttttacgttgcacattgaaatattaggatgctggtatggactggatacttcatcttgataccgatgagttaatacaccctgctggtgctcgggagtattctttgagacaattgctgcttgatgtgcccaaaaatgtcgatatggttatatttcccaactatgtaagtggatttgtgtacatctttcgataaatttgttcgagtaatggtaacatcaagggggctacctgtcagtagttactagacaatttaatcaacaacagagtttctaattttcaggaaagcagtgtcgaacgagatgatattaaggaacctttcaccgaggtaaatttctccccgagagagtgatcagttcattctccgtattttgttttgcatgttagtcagtgaaattagtctgacatgttgtgttcgtgtacctacccgaacaggtatcgatgttcaagagaaactatgaccatctcccgaaagatacatactttggaatgtacaaagaatcaactcgtggcaatcctaactactttttgacttacggcaatggaaaatcagttgctcgagttcaagatcatcttcgtcctaatggagcacacagatggcataattatatgaaaactccaaagtatggttcactccaatttgtttcgattgatggctgtcatccatctgaacctacaatctttgagacgcaagaaacactaactcattctatctaatttcttttagtgagatcaaattagaagaggctgctgttcttcactatacttacgccaagttttcagacttgacttctagacgtgatcgatgtggctgcaaaccaacaagggaggatgtgaaaagatgctttatgctcgaatttgaccgaactgtgagttatatttctttatgtacaaccattcatgaatgtggtaggtatctgtgaagcataattttcacatctaattccttgcaggcatttataattgcgtcaactgcaaccgaggaagaaatgatgaactggtaaatataccatttcaaccaatccttttgttcatttcaagtcggaccatgatacaaatgttcgggattctgagtggtgcttgtttgttcttgttcttgttcttttaggtaccatgaacatattgtatgggatgacaaagaccttaaaatgaaactgctgagaaaaggcatcttgactcgcatatatgctcccatggtaagtacattttcaccgaaaaagagaatgagagcttacgcgggatatcaagttttgctttttcttactaatgctcactcgaaaaacactttctaaattttgtatcaggtcataatacaaggtctacgagaatctggtgtctttagctcggttatagcatcatcggcttcatcaaatatctcaaaggagaagtttttaactaccattggtagtactagcagcaactcaacccgagctgttgcctctgaatctcttccatcaaggaagataggtaaaatcagaaagaatcaagccactgtgaggaaggtcttaacgatcgaaaatgctgcttctgcttcatatcaagaagcagctgttcctccattgtcttccccttcaagtgatgatgttgaccatttcaccatcatggaagcttgaaagcgatgttgttagtgcaacggttgctctctgatcgcgtttttctcgatgggaagagctataggagagtagagttgttgttgggggctgcgttcgcagttggttcttcccgatcagtatccaagcggtggtgtaaaatactaagaattttaggaagagagattattttgtcaagctttgacttgaaaaccataactacaagttgtggtgattttttttttcttctttttgtgtatagaaaaccacagtgttgagatatcatttttctatgttatttttggcctttttgtaaaaaaagaagaagaaaattggaaacttatttctacgtaaaatttcaacttaaaaacataagacaagactttaatatcaacaatacatgatattacttaaaatttggtaccttaaaccatctctaaaatttgagatgtaaaagaacatgttaattaaaattaaataataaaatattaaaatgacataattataagagtattgttattggagattagtggtgtttaatattttttataggtgacgcttcacgattaattagtgatattgcttaaaaattattttcttgagttatatgaaacttgatacttaattacaccaataacagtatgacaccaaagaaagtgttaggtaccagcaggaccagtcctaaaacaaagtgggtcacagtgaaaaaacttatttttgagcctttatgttagaaaatatatggtatttttcaaagtcagttaaaatatatataattttagaaggagaaatttttttttgggaaatttacatggtatactaacttttgctaattttttacaaaaatactgtca

SEQ ID NO: 16586 - DNA, 7227 bp, Cannabis sativa
aatctaaaaaaaagattattttattacaagttttgaaatgaagatatttattaacatagatatataatttgaggccatatactataatttccctaaaatatattatatgtaattggttacttttgataattattatatggtgacttctaaaattgtaaatacgatatgttctataataatttttatttacttttataaaaatccatttgctttctttttttcttttaagacattaattttcttctttaataatattaattctctttgcaagatatgtcattttagattttttcaattgtaggtataaagtaataattcttattcttatttttgcaatttttatagctaccacaaaataatttttttttaactatgaatatagttaaaaccacactctccaacaaaatgaaatgaatttttaagtgattgtttgttagtatatttttaaagtgaaatctctaaaaatttcgtaaaaattcactcgatgactttttatgatatgcaagaaaaacgttttgtattttaatttgttaattatgaatttaataagggatatttgtagtaaaatccctttactatttgtaatttttacacatatgaccctaattaaaaaaagtaactgcaaagtaccttattttatgattttgttggagttgtacctttaagtaccaactcaaaaatacacaatgatatattattaggctacatattaaataactattatctattatttatcttatatcttattattttttttttaattaaaaatatacaaatttgaatagaaaaacaaaatcaatttttctttaatagataaacaaaagttttcttagataacaaggtaaacgttttttttttttaatttgatacatgatttaataatatattgtcacatttttctaagttagtatttaacgagcttagtggataattaaatgtacgattgcaataaaattgtaggataaaatatttttgctactatattcttattaaggttatatgtgtaacaattacaaatgttaagaagatttcaatgtaaatatatttaataaagtatttttaaaaaatttatcagctagatttctcatcctcgctcggctttcgagtctcataaaaaatattattaatcaatttgaaagtggaaaagtgttaagtaagattagtgcccaataataatttataatttatgattgattctaaaattgaaccaaagaatacatcctaattttcattataattagttgagtaatttgcggtgaaaatacttatgttttgttcgcagttgcagataaatacctaagtaaaaattttgacggtaaaaataccttatgttaaggttttggaaattccgtaaatacctggctgttaagcgcaaggtaattgtccatgtgtgatcatctcattggtccaaattattaactttttatttttcatttaaaaagtctaaaatttcatttaaaaactaataaaataaaaaaatatttagaaattcatattttaactaattaaaattaaaaattattaattaaatccttaaattataattaacccctgattaaatatgttaacaatgtgttaacataaacgtacaatcaataaaattccacaaaaataggagtataaacaatgaacaatgacatagaacaaacccatcaaaaaatatatgaataacatagatcaaaaatcagattcatcttcaaactctaacaatcacatacataattaatactttatttgcagtttcctataaaaaaaaaatgatatattttccttgcattttcttatagttcaaacagagccacaaaaattcccagaaatctcaaaaaatagttttttccttcttctttttcctgcatccaatagcaaacatatttacaagatgaaaatgaggagagattactactggcagtgaaaaataaggaaaatataagttatgcaaatctcagctcaatctcaatgagccagagtaattccatttatagatggtgatgaatacaatagagccgttaggcaaccgggacagctggcagtgaaccaaatacaagaaaataagaaaggaatcaaatcctaacaataattctaatcattacagaataattaatcagggaccacaaaatattctgtagtacaggaataacagaattgggaatatcctttgacacctcatcaatccttgataatgagaaacatgtgctgaaattcttatttctcaacagcccctctcaaactgagaggtgatcttttcactccaagtttgctaatgagaaattagaatctggaatgagtgagtcctttagtaagacaatctgccagctgatcatgtgattgtatatacctcacttcaagttgaagtactttatcccttacatagtgaacatcaatctctatgtgtttggcgcgagcgtggaacacgagattagacgctagtgcactagcactaaggttgtcgcaccatgtaacagtgggcatgatcagagggaagtttaattcattcagcaaagactctatccaagaaatttctgctgcaacatgagctaaggcgcgatattcggactcggtactcgatcttgacaccactggttgtttctttgaagaccaagagacaagagtttctcccaaataaacgcaataccctgccatagatcgtctatcatgaagacatgtcgcccaatcagcgtctgcaaaacctgtgatgctgagtttgttgctactgctgatgtgaagacccaaatcaggtgtccctttgagatatcgaaggactcttttggcttcactccagtgaactgaagtgggagcttgtaaaaattgactcaatttatttacggcatatgctatatcaggtctggtgtggcagaggtattggagtgctcctataatgctgcggtaagctgtaggattgtgcataggtactccttcgtttacagacattggtttctcagctgtgatgggtgttggacatggtttagcattttccatgtcagccttctttagtaagtcttcaatgtatctactttgagttaagtagagaccagtatcatcacggtacacttttattccaagaaagaagtgaagtgcctagatcttttaaggagaatttcttattcaggttttgaatgaagctttcgactctcttgggattgtttcctgtaacaatgatatcatcgacatatataagaataagaataatgtcagtggatgtttttaagtaaaacaatgaggtgtcggcctttgaatgtttgaaattccatctcaggagtgtatctttcaatttatcgaaccatgccctaggggcttgcttcaacctgtacaaggatttgtttaatttgcatacaaagttctcttttcctttttcttcataacctaatggttgagtcatgtaaacatcttcttctaacactcgattgagaaaagcattatttatgtctagctgctttatgatccaatttcttgaggcagctatggtgagaataattctcactgttgatggcttgattactggactgaaggtctcaccaaagtccaagtctggcctttgatggaaacccttggcgacaagtcgagctttgagtttttgaagggaaccatcagcattcaatttaattctgtgcacccatttatttccaaccaaattgtagctgctggatggtggaacaagtatccaagtattgtttcttttgagagcataatattcatcatccattgctcttttccaaccagggtgtgtcatagtttcttgcagagtttttggtaatgtgtgtggctcggtttgactgatgaaagtatggggtttgaatacgccggctttggctctagtaatcataggatgagtgggctgcaaggtggttgtttgccgtggctgtagtggttcaggttcattattctcacgacattcatagtcagcatttgtggttggttcattaggagcaaaaaccagtgggaaaatagcagcagatgctggtggagtgtgtgagttatttccccctgctgaaactgagacactaccaagagtaaaaggagaaattggtgatacctgagaagaaggtgagtcgggcaaggcatcagatgctccaaggggagtttcaggagaagaacctacaatgggagacaagggtggagtaggaagagatgatcaagttgagctgtgaataacaacgggtgcaggtgattggtaattgttgagaaagctatgttggaaaggaaaatcgagttcattaaagaccacattgcgagagatatacactcggccagttggacttaggcatttatatcccttgtaagactcactaaaaccaagattgacacacttaatcgagtggaattgaaacttgtgagtttgatatggcctaagacacggaaaacacgctgctccaaaggtttttaagaaactgtaatcaggtttggttgagtgtatcatttgaaacggtgatttgttactcaaaactggtgttggtaatcggtttattaaataaacagcagtgatgaaagcatcacaccagtatttgagaggcatgtgggcttgtgcaagtagagtgagtcccatttcgacaatatgtcgatgtttacgttcagctctaccattttgagctgaagtatggggacaaggatggtgaaattcaatcccattggctgtgacaaggtcagtaaaagctctaaactctcctccctagtccgtcctaagacatttaatttttctttcgaattgagtctcagccatggctttgtattgaatgaaagcatcaagtgcatcatttttgaactttagaggataaagccatgtgaatctgctgaaatcatcaacaaaatgaatgtagtatctatagtttgtgtttgatgcaattggggctggtccccataaatccgtatggaccaagtctaatatattttaagcacgattttgagagtttttgaaaagaagagcatgagattttccatattggcaagcatcacaaaacgattacatttcattttgagaaacttttacattagttgactcaagcacatgacttaaaactttagatgaggggtggcctaatctcctatgccacacatctattttggaatttaaagacttttcagcacttggctgagttacattgacactagaagctgctactaaaccagaaaaggaagtgtgtttcagtttggataagtgacttggaggagtggtttttgatgatggagaagaaatctggtacaatccttccttaagagccccttggagcagtgccttccctgtggccttgtccttaatcaaacaacaatcagcataaaactcaataagcaaatcattatcagcagcaagtttagagatgcttatgagatttttggctatttttggtacatgtaatatctcctttaaacaaagaaatctaccacagtttgttttcaaataacctgaagcaatgtgagagattgagagttcattaccattgccaacagtgactgtctccttaccaccatattcctgcttttgagtcatgacagatgcatcagcagtgatatggttgcttgctccactatcagcaaaccaaagatcactgtccaccacttcaggtccagctatgaaggcattcgggtttcctttgaactgttgctgctagtttccaccaccagaatctcctcccatgtaattttcatcatacttgttgtagcaaacagcagcggagtgcccatatttgccacaaacttggcaagtgggttttgatccaccattgctacgacctcttccacgagatctaccaccatttgtgcctcctctgctgccagcaaagcgatttccacttccagagttagcatatgagcctcgtccacgtctaggattagtgtttttagcaaccatattggcttgaggattcgatgcaggaggtgtgtttagcatcttgttggtgctggttagagtctgcaacctctcaatcttgctatcgaaactcagtaagatgtcttgaagttcttgccaagtggttttggatctggcttcaatctgcacaacgattgaaatgtactcggcatccagacccgataaaacatttgccaccaggtgagcttcgggatacgagtctccagcaagagctaaagtatcaccccaattctttttctgtttgagatatgttgtcatggataaacttcccttccttgtagtttgaatgtaggtacgcatatcatccattctcgcacgcgagtacacaccatagaggttttcaagggtctgccacaatcctgctgcggttgctgaacccatgaactcagttgcaattgcttctgtcatggagctgtacaaccagcccatcagaagttgatcattaatcagttagtgttcaaactcagggttaacctgtacgactccatctggtcctgcaggcaaaaattcaaggggacaaactttagtaccagttagataaccttccaatctatgacctctaacaatagtagacaccatggttttccacaaggtgtagttgttgcgatccaacttgagggaaaaaggttgattaagggtgctgaaatgttggggatatgcatttggaaactgagatgcagagggatcatttctggtgttggaggaaatttggacagcagggttttctacagctgagcttgcttcttgagcagtggcttcgtcatttggattctgtggggaggccattggcgtaagcctttcttggctttgatacaaagtgaaaaataaggaaaatataagttatgcaaatctcaactcaatctcaatgagccagagtcattccatttatagatggtgatgaatacaatagagtcgttaggcaacagggacaactcgcagtgaaccaaatacaaggaaataaaaaaggaatcaaatcctaacaataattctaatcattacagaataattaatttgggaccacaaaatattctgtagtacaggcataacagaattgggaatatcctttaatacctcatcaatccttaacaatgagaaacatgtgctgaaattcttatttctcaacactagcctcgagttgcttttacctctcgtcctccgtcgtcggtgttcctccgccgatctcttgaagtccaacttttcacctactttttcagcttcatcttcttcaaccctttgccagtggccaacacctcgatctcaactctttcaagtctgtagtcgatggccaaaacctgtcatcttcttcgctagatcaaatctcaggcctccttcatctttccctttctctttcttttactctctctctctct

SEQ ID NO: 16587 - DNA, 2335 bp, Cannabis sativa
ttggtttgagatttactctaagatatctcattcagccatatgctaaataccaaggagttgatgcttatggggcatttaatatgaagtttagacttagtaaaaatgagatggtaaagatttcaatgacaaagaatttgtatttttaaagagattttactttattaattaaaataataataatgctaatctcttctaacacataattttatattctctcaaagtttactcccttcaactctactctctccaacccaaactcacataacactgaattaaaaaaaataaaaaacataactaaaattaaaataacattccaatactttaaaataaaactaaataaaaaaataaaataaaaataacttcactttcatttcagccaatcaaacaccaccttaatgtcagcaccagtccctccaaatcttaaccatcctacattttgttactatatactttttcatttaaagaaaacacgatccaatagaaaacaattaaaaagaaaaagctgaattataaattagaaaaatgggaataaaaaaggaaaacttgataagcaaaacaaaaagtagacttgattattcaaaattaataaagcataagagtgggtcatagcaacagcacagcacacattttcttttatgagttttacatctcagcagcagcaaatataagggaacgctacttcacagcaagagagagaacgagagagctagacaaggcctagccttgctttctattcctcctcttctgcttcttccagccaattcacaaatggctccagggccttcacaaacgtttgcctgcaatgttatccaaccaaatttcacattattattattattaataaaaaaccacagaagaagaagaaatcgaccagatgaatcatccatcatacctgcccttggggttggttcctttgcggaaccaatgaagaatggtatcctcagcaagaacatcctggtcataaagggatcttacaatttcagggaacagtttcataagcttagcatcctcgtagcactgcatctgaactttgtaaatcagttccaactcgagcttcccgctcgtacagaaggcgttcaacaactttgcccatgttttcacctgtgccatacaattatatatatagatagtcaacctttttcactacactgaatgatattgtaaaatcaaaacattaatataacaaaaattataacttcatatcattaaagcatacctggcgaagagctgaattagcattctgctgctggttctttccagaccactgaacagcatccattatgacatcccacaaaattcgcaccacctcaatatcaggtagtttagcatctcgcacacgctgcttcacagtctctatgacttctgatatatcagtttcctctgttatctgggttgtcaaggcagatttcatctccttcaacttcacctcgaatattttcttatcgttgtattcaaccaatggtaccaacccttctttactgaaaatgaggaaaaaaaaaaagaagagataaattcacaaactggttatcattacaatactaatcatcaaaggactaatccatcaacagctttctatcatagacttcaccttgttccatataaggtaataccaataaatgttatcacaccatacaaacacagggtgtattgtactcgtatgataactgcaaaagattaaacattaaagaaatgaaattctttcaaaccaatgcgctatacacaagcaaaacttcaatatcaaatataggtaactcacgtgaaatgttcagagaagccttcagcagagcgctttgcagatgggaagaattcgagaagattttcctccactttacctcgtttcaaaattgcaatcaaatcatcgaggctattatcaacaaggtactccttgaaaaagtcagtaataaatgaaaggactagccctttgccaacaagattgtccttgagtagtggctgaaacacagtctccggtggaagaccagatagcttctgagagaatgcaagggcagtaaaaattgccagcttcttcctttcattttcctcaaaaagctccaaggactggaggaactttcgcatgacattttcaaggtttttaatgagaaatggcctccgtctcagaattttctgtatgtagataacagatggtaatatgacttcacgtgtggcctcataatctaatatagagtacgggtgacgctccccctcatcaggttttgttgttccaggttgtgtccgacccccagtgaaaatcacctgaattgattgtatacaaagtaaaaaattaaccgagtcacataatactgccagttcaataaagtacatcaaccaataaacttca

SEQ ID NO: 16588 - DNA, 7640 bp, Cannabis sativa
gttcgtcccatttatctatttttttcagattacgcattaaaaaaggggtaaatactcatttggtaccatgctttatccaaatacaggcttggtactttatattttcaataatacttatatgttacctgtaatttgaaataatacatatttagtattttggactcaaatttgatcaatatgaccaaactcaccacatttgtattttgataaaacacaggaatcaaatgacctttaaaacacctgtcatttttattcttatttttagctttatttttataattctatttgaggtactactgactttgctttgctgagatctgcatcagctgccctgctagatatttatttgattcttgaatgttaaatttttcagtaattgttcatttgcggtagattagtggtcttggtgtaataattatgtcccgtgcaagtaccttctgtggactatattgtttcaccttctttacttggttgaattttggttggcaggtattacaagggcttgaggcagcttcaagctgtgttgacgatatggatgagtggttaggcatctttaacttgaagcttagacacatgagagaagacattgaatcggtagggagatctagatgcaattgattgcattttatttctgtgttccctgcctggtggacaattgtgtatttgtgtttacctgggttaatgtttcacttttcaattttgtttgctcctactgtttactttgcatgtcatttatctactgtgtgtgtggtttagcatcttctcctgatggcagctatgttattttcttgcaactttttttgtcattgttttatatatagttctgcaggggatcaaattctgtatacgccttgctatttgtttctttgtatccttgtaattcttattttacatttttttatgctagaaggatctggatattcattcttatgtcttctttgctctacattcttttgattgctatttcttacttttattcttttgttaaaatgcttctgtaatacatgaatgtaaatgtaaccatttttcccctttacaaaaatcttatcctctaaaattcccttggtattcagatagaaactcgcaataacaagttagagatgcaatctgtaaataataaagcactcattgaggagttagataagcttcttgagcgcttgcgtgttccttctgaggtatgcagaccatcaccttcattgcacatttgaatacttgttatgtatctggcccaagtttttctctaatgacatttcatggattgtagtatgcagcgtgcttaacaggaggtttatttgatgaggctcgtatgattcagaacgtagaagcctgtgaatggctggctggtgctttacgtggtcttgaagtacctcatttggatcctacatatgcgaacatgcgagctgtatgtagtttttaattgtctcttatttctttcagttgataatgtttatttggataatgtagagatggatttgttaaaatgcatgcttcggattcctaatagaaagtggcctagtttctggtgagatttatttcatgggttgtacgacagacagatagtctgttatgcacaaacttaagggtttaaatttgagcttacattatgtgcaaaagtatgatatgatgattggagtgatttaacacacaagtattgctagagatacgcaaaaattacccacactgaggcataattaattccgatcacgtaattcggaatgatgtggttccacttgaatatatttgtgactgaaattaagtacgcattaatgtgtgtaatttttgtggtgtacctactcatttaagcaaattagtagtagattcttattattgtgtttctgaagtttcattattttagtaataactagttgatttgcaggtcagagagaagcgagctgaacttgagaaattgaaaactacatttgttagaagagcttctgagtttttgcgaaattactttgccagtttagttgatttcatgataagtgacaagagttacttttcacaggtaatgctaagacttttgttccttaatattgatttaaagtgtaacatttgagactagaatcatcgtgatattcttattttattgtattacagaggggacaattgaaaaggcctgatcatgctgatctgcggtacaaatgcaggacatatgctcggcttttacaacatctaaaggtttaatttagattaagtgtgttatcaaagataaaaaaaaaaagttgtatacattaattaaatggtcataattatgcttctcttttcttttctttttcttctttactgaaatctttatgactgtttttgcagagtcttgataataactgcctggggccgttgaggaaagcatattgtagttcccttaatttgcttcttcgtcgagaggtcaggaattaaatattctatacaattgtcagtattctacttggaagtttattataagtagtagtgtgcatgtgttcactgtctggagagtttttctccccattaaaaccggtagtagtgtgtgatggcgatgtgatgcttaataccttagtcttgatgccaatgctcttgttttttttcccttttaaaggacatattaactttgttttgctagttttacactccttgcccttcccgcatcacttaactgctttatgtttatggtgttccttatgttttacattttaggggtaaaaataaattttccataaaatgcaccttttcttttttgacttgatactcttgccaatgatcatttatttacaaattaagctttggaatttattctccagccaaaagaatgactattagcttgacatctccaggctcgtgaatttgcaaatgagcttcgtgctagcacaaaagcgtcaagaaatccaactgtctggcttgaagcatctacaggatcctcacaaaatgttaatgccgcagacacttcaacagtgtctgaagcttatgctaaaatgttgacaatttttatcccactccttgtggatgaggtaagagattagttgtgtaaaggtttcaaatctaaatgctgtttatgctcaagttgaaaatttcttttttcttgcttttactgcagagttccttttttgcacacttcatgtgctttgaagttcctacacttgtgcctccaggaggtgttgctaatggtaataaatctgggaacaatgatgatggtgacgatgacgatttggggatcatggacatagatgataatgatggaaaaaatggtaaaagtcttactactttagtttgtttcattattacttgtgtaagttcagtttatttgtagattttgcaattttctctgttaatctgcctgacgtatgatgaagattaaaagaaaaccagttgtttttctcagtgcataatatcttatatgtgctattgcatttggtaggtaaaacttctgtggagttagcagcactaaatgaatctcttcaggatttgctggatggaattcaggtgattacacaaaatattgaaattactctcttttgaagttacattttggatatcagaaaggatcccataatttgcataactggttgggcatattaactctggattcttcttcatgaagataggactcatattatgtaattttagtgacacttagtcttttccatgaaaaactactatatctacttaatacttggttggctggttcatggttgtgatccagaggaatgcagaatgttaatattaagtacaaaaggtgttagttggggttcactgtttgatgttgccattgattaagtctctataggtttaaatgatcttggttgaagttaattactggttggtaggtttgaaatatgtaatagagttgcaaaatttatacagataaaatttacttgttataatatcaggtatattgtaatccacttttctaacagaagagaattggagggagggttgttcctcctagactgcaaaatgtatgggaggagacctgtcttgtcgttcaaccccttttttaagcagttcttgttactgtccacagtgatgtagcgttgtgcactatttatttgtgtctactagaagttttggaccaagacacatctctaaggttctagttttgactttgcagttgtttactcaccgtgtgaatttcaggaagacttctatgccgtagtagattgggcttataagattgatcctttacgttgcatatcaatgcacgggattacagagcgctatctttctgggcagaaagctgacgcagcagggtttgtgcgtttgttgcttggggacctggagtcgagaatttccttgcagttcagtcgtgtaagttccatttttaagcttgagataatcaaccactatatgcgttctaactcatgtaagttttaatatttccagtttgttgatgaagcttgtcaccaaattgagagaaacgaacgcaatgttcgacaaatgggtgtcttatcctatattccaaggtaatggggttgttgatgctcactctttctattcagtgtcatgatacttgcccagatggtccaggtttccaatccagaaaaatcacaaatgatttgtgaaaatttctactcttttttgtgtatgtagtagttaaggatatgaattcttaggttccactttggcttcctttttctttttttctttctttcaactgtgctatttattccctttcatgctatgctacaacaaaaggtgttcaatactttttttttcttacatgttttgcgtccaattattttctgacattgggttttaaataagttctttgcacatttggcttccattttttctgtttctttcaactgtgctatttattcccttccgtgctatactacaacaaatgtattcaatacttcttgttcatgttgtatttattttgcgtagatttgcgactcttgctactcggatggagcagtacatacaggggcagtccagggatttggttgatcaagcatacacaaaatttgtgggtccttctcaacctgtagcttggtttcctttttactgtttcattgatgcaagatctcaatagtgtatgttggtttgaggcatttgttcttgttcctactacaattttcaggcatcaccagttcagctaatgaaatgttttatgaatttaatgaaatcacttgtgagattacgatatggtaatttaaagtgaagctgtactttaaccaatcgtgggtacggaaatagcaagtgcattatgctcattataagtttgtccctgtagctttgataatgttatcaaaaccatagccaaatttgtgcttattgaactacatggatcagaatataaatctcttatggtgttttatgttttattgtattatcttgtatgattatgatgtggctattgtctgacaggtaagcataatgtttgtgactttggagaaaattgctcaaacagatcctaaatatgctgatattattcttttagagaattatgcagcatttcagaataggtacatatttcattcttttattttttctcctgtatctttcatcataaggagttattattatttgttttgggtgcattgctgagtagaagcagtttcatgcagcttgtatgacctagccaatgttgtgcctaccctagccaagttctatcaccaagcaagcgaagcttatgagcaagcttgcacccgttatatcagcacaattatttacagtgtgagtatttggtaaattgtctctttttcctgttttccattttaaattccaccttttttgtggagtagggacagaattagtaaggttcttcaaccagagaagcatttcttatttattaaagtacatatcaataacagataagaaaaagaaattatgacaattaggaagtgtacattttttcttataaagcttcaaaaagacttcaattttcaagaaaacctatgtttgagaagaatcagcatttttagcaacatcaggatgaggcaggagggggtgaacactgtttagtttcaactgcaattcttatttatttaattttgttaggcatgtgcattcagttattcttttaactaggtagacttcaatgcatcttcagcactgtaatttgaatcctcatcaagtttgctctatgcagcaatttgaaaggcttttccagtttgctcgaagaatagaagatttaatgtacacaatcacacctgaagaggttagttttttgctctttgatgatgtttgaatgcatattgaacaaagtagcctcaagaacttttgattgtactgtaagaattgtctagttattgttggattctgttttttataatttctttttttctaaataaccagattgcatgtttttttttggctgtgtcgtaattttgccaaatcagattgtcagactactattgcattgttcttagtggtattacttgttgctaaatataatgggttaaaatattttttttttgttttttctcttcacaattttcagatccctttccagcttggattgtccaaaatggatcttcggaagatgttgaaagctagtttatccggggtaagtttgttggtatctcccaaatcatctcatcatccttctctattatctgtgtaataatatctttgtttctcctgtcataggttgacaagtctatcgctttaatgtataagaagttgcagaagtacttgacctcagaggaacttttgccttctctatgggataagtgtaaggtaagttggtctgtcctttctgtagaataataatatcaaacctgcgctcccaagcatatgggtaaggagattcactttagcggctctattggcatttgaactagtgccagtttagggtagatgaaaaaacataaatgaagagatagcatcgtcaatacagggttcctcttgaggtgaaaccttctattgagagagagagagagtgaatgatagcttcactgatgtctccatcttggcttatatacataaatataaaaacataaatgctgattctgtgtccttaaaatttatccaactttgatataaatatctgtaatatgagtcactctatattatggaacaaaaacagtattggaatgacaaaaatgaagagatagcattgtcaatacagggttcctcttgcttgtgaagttatgaacatataatttaggagtaaagagaagaaaacttgtgataaatttgtactcttttgctaatgttattaatacattcagttctttatctttatttcttcaatttttacagaaggagtttctggacaaatatgaaagttttgcgcaactggttgccaagatttatccaacggagaactttccatcggtagaagaaatgagaacccttttggcttccatgtaaagagtaagagtgaatttataaacataatgtttatacttccttttcttatagtttaatttattagacaaattttgcggactagtcattgagtttgaagattgaactaggcaaccccatgtatcatgccacagtatatatgttgtttgatgttgtatacagatatatttattttattattcttttttttttcccttgacgattaatggtttatttgctaatgcgataagagcatctccaatgatacattaaatttggtgttacattattactaaaattggcgtcaaaaatattttcactccaaccacaacactaaaaattttactgaaaaattattctttattattata

SEQ ID NO: 16589 - DNA, 6544 bp, Cannabis sativa
tttagagcataaaacccaacacccctctcatggctcctttggaggaggcacatcgtcctcctccacaggggtcatcttcaccgcattagcacccactaccgagcccacatcttcaagtgaaatcacattcgaaggtgggatagaaacatctgccaatcttgccttggccttccaagccgtcagtctaaaggactgtcccacagagaccgggaagtcactctgaggtggcataatagtaggggacaaggcaccccctcttttagccacttcctcactatcaagaggctcctctgaataattgtccgaagattgaacaccattagtgtcccgagcaccaccattcgggccagtacctttggggaagtctctaacgactctcttaaagcgacgaatcgacaaaccaagttcttctcctaaagagagcgtttcaaaatcaagccttcgtttcttgatcggagtggttctatcattacactccgaagtcggttggacgccaatatccacaccaaaagatttccttttatttttttcgggggatccaaggttctcaatctcatggatataatcttcatgagccttaaaaaaattaggcaaggctctttcttcctcaaaacgaactacatggtcactgtccaaaccaggagagggcaaatgggtcgaaccatgtggaagaacaggcttctcaagaggtttagagtccaaactgtatttggaaaggagctcaacgtctcggctagtaagaggccctcttaatcctccaactcccatggccccactcccaacagagcccaacacctcacaacccgaagccccacgaagcccagtactcacaacatatcctgtgtattggggagctggcaacctcacaggcgtgacacagcccaacggcccaacaggcccagataccactaattttgaaggcccaacagcagacggtcccaccaacccagtggacaaaatgaagtttgacttctcaacctcatcctcaataaccgcacctacaaaactctccaatctctttttaaaattcaaatttctctctataatgggtaagtcttcagaaacaggatcacctcccagaggctgcttcaactttccgttacccgaatcgtgcaaatccctcgcacagctagtcttcgccatctcagacgactttcgaacccaggtattgtctgttctgggtcctaggaaaacgccctttctcgagcggggcgccaaacacgaaacctgctctcgagaacccaagcctattccacagtccaaccctcccaccggtgccggagagggagaatcgttaaccacccttggccgcccattctcaacgactgctttaaccttcttctcaaaagattttgcccgagaatttgagatatgcaagttgcccacgaagcagctagcatacggagatctagagtttaaccaggggccaaacagagggtatttaccacccttaacatccaaaatcgataccggtgaaccaagggaacaatcgcccctctgatgtcccaaacaaccacaaaaatagcaaaagctacccaggttctcatacttaatctgcacccagctattaacaccatttagcagcttaaagaagcacccacaaaacaggggcttgttcacatcaacttccacctgcacccgaatccatttgttccacgtaacatgtttagactcgtctaaatcaatagacaacaccttccccgcctgagctccaattaagttggcattaagtctggtgaagaactcatgtggaagaaagtgtatttggagccacaaacgaaggttatcaaaagaaagctccttcggaccgaacccagaggaccaagcaaggaggaccaaagaattacccttaatgcaccagggtccattatcaagaacccacctcctatctgccactttttcgaagccaaaacgaaatacattagaggaagtatggcccaagagaggagtgtcaaccttcacacaagttttccaaaggttagcacagagggtttccacttccttctcctctaaagttttggaagtcaacactttcccaatgaggcagaatttggacagagcttgggtagctgaagtgctgggagccagggagagagaggcttcagaaacagaaaagcatttaccccaagtggaaccaactttctcaccaaccgtctccataaatgaaacagaatccaccaaccaccaacactgaagagataaagtcaaagggacaaaataatcacccaccaactcgccaaaaagcacaaaagtgaatacttctgccaaggagacaaaaggaatgtcaaagagacaacaggacaacgaatcacaccaaccctcaccaaacacacaataaaatatacgacaaaccagaaagagaatcccaccaacgaaaagaccaaacggcaaaaccgctcaatcaaaagctaagagacaagcagaaataaccaaaagggtcagggggaatagaaaagaaatgtggttttcaacgagaaaaaggtagaagaccattctctctatgcttcttcttctttagttaaatattatcctaattccaattgtaaaaggtacaaatctacatttaatattactttaattattactttattataacaatagtatccaatttataacaacattatttttaagctccacatatttaccatacacgttagtgtgatttaactttttttttttttgttgttctttagaactatgtaagactttcaattactaaaattatgatttactttatactttaactctattcagaataaataataaaaaaaacttatttaatattttctatttcttcatacaactctacttaatattatattatactagcttgtcatgtttgttaagtattttatactttttgttaaaatatgtatatatttttgttaattataattcaaaattattataaatcataatttatactgtattatttccattaaataaatagtacaacaaccctgtataaaaaaacattgtattaatatttacttcattttatattctcccttactcttcagtataatatattttaaataaccctagtaaggatataagatgggtgcttgccactttatttctgtttttctaaaatgcctttggttcttgcttagctgtgtactaatactatctacttttaacacttttcgcaatctttttattatataaaatatttttttttgaggaaataatttattcacatatattattattattattatgactttatgagtatcctacttttctatagttttttatataacttacttttctatatttaattattaatttattagcatcttctctattcaataattcctactcgtttctgtttctgttatcaacctcagacacactttctctttctcattattcagagtaaacagccaaagtccaaaaaccattgtcactttttcaattttctaatttctcgcctgccaaacaccttctagggctttcttcttcataaatctagccccgccatggatgctattcgaaagcaggccaccaaacttagggagcaagtcgcaagacaacagcaggtacgatttattaccccctctcaattttaccatggaagtgctttggtttcagacttttaagtttgagctcttgctcttcttagtttctgtagctgttgttttgttacatgtaattgagctcaagaaggtgggaattgaatgaatgggcaatgaaagtttgtttagagaggctacttagaaagaaggagaagaaaacattatatggccttttctgatttctgtacttaatgctctcaaacactctctcttttgctcgattatttatacagataaataaagggtgtggtcttagattgttatggtcccttttttatttttattttcaatagtttctttttggaagaccattttttgagggttttactttgattagacgcccacgggacatctcaaacaaaggtgtttgtttgggttgtttttcttaaaagaataatatccatgaatcagtggaaaggggggaaaaaaagtcaaacggctcttctttcgactttttatttagtgtgtgttgttgagtgaagaaaagaacgtagttttagatgattttgtttcataccaatgaaacctgtccataggcatacgaccaacttttgttcttgtaaaatcttgaactctaatgttccatccatgattcatcaccttaaactcgtcatcttctaattaacatttgtcacatttacgaggcccttttgttcatcattcctctttagctctctttgatttaattatcagtaaatattaagtgacaagatcccatttgagttgctcgcgttctctgttgtatgatatgtgaccagacaggtatataatggcacatgctatcacatgtgctgggtcagggctccaatacttatagtaatggctgccttggtacatggtagagtaagtggccttgttttgtgcagtggcggcatgtctaatcaactaatcacattatttgctagctcctgaaaactttatgcttattattatcaacaataggataactgccaatgtgccatctattagtagacaaatcccattaacttgcatcatagactcattagtttatctctgcagtaaagtaaccaatttggaaaatgtctcatgtgacactccctataaatatttgcctcagctttcattattttactgatagttgaacatgatatttctctgaagcttgttttacttcacaatatcataattgtagactaagctatttcattttgaccaaataacattcaaaatcctctgtgtcagtgcccagtttaccgttttacttaattaaactagcttgaatttatttcgtagatagatctcttattgttattttctatctatacacctgtatctgaattgtgataaataataaaatgataattcaattattttctgatttagctagagattggagtgttatgcttgatcgaacttgcatttcctcaattatcaatacaagttcagtttactttaataaaatataaaataataaatcataactgagtttagcttattgttgtttcatttatacctctagcactttatttttaggatttaccttccagatatgtacatatgttgtaaactacatatcaataatttgctatcgtttgcgtttctaatttccagttactctaaaactggctgtacttgttatttttaattgttaattcagtactgaattccttgtgctcatgcaactttagttccacttatttaaatttcagcccataactttccaatctgtaatgttcaattatacttgattaatgtaatcatcaaaatttagggcaatcaaaacacaatgctaaatctgatggagaacaaatttctttatgttgcaggcagtattgagacgattgggaagcttaagtaatgatgcagctttggttgatgaagctgaactcatgtataaccaacaacttcaaaatttatacaactctacaagggcagctaaggtacatattctattcctgctatgtttaccgtcattcaacagcatctttgctattgtaattgtctatggagtctaatacttagttctgctgtgcagcattttcagcgaaatattgttcgtggagttgaaggattcatatccataagctcaaagcaaatggagataggtagcgatttagtttgtgttcaatttgatatatttttctaagttagaaaatgaaattttactttttataattcagtaaaaaagttggctgaagattgttgcaagtatggagatgcaaatcaattcaatcatttgtcccttgctagagcctccacatactttggtacctctcataattatatagaaaaggagagagaatctttgcttaaggttcttggtgatcaggtaatttcttcaacgtctcctctttttaagcattatatcactgtcaacataataagattctcaaaaatttgatctttgtgaacatatggaatgttaccatcattattaaacatggcaaatatgagaaccattatatgcctttatgctgatttagccacttgaggttgactccaatggttgtgtttgtgctaggggttctaggcctgtaaccacaatattactatatttggaagattaaaattagaactaatctcgaggagggagtacctttgctttggactaaagaggttaaaatgtttcttgggtcttaatcttgcaactgttaatgtgagctcaggattttgtttgagtttctcattacatgtatgatttttgtggctgaagattgaagagaaatgataattacacttgctctataatgtgaactagtaagtttaggggtgtgtttttggaatgccacacttgaggtaggttcagataaagtgtttaatctcatggttggtgttgtttctaaaattttaaggaattgtgtaagattccatattgaccaactatgaggattggttggtggtatataactagttgggcaccttcctctcttaggctagcttctgtgagtgaattctacttaagtggttgcatcaagtggtaccgaagtcatgcatccttaagtggg

SEQ ID NO: 16590 - DNA, 3761 bp, Cannabis sativa
ggttttatattctcttccgcaataatgatattagagtcatgtccttaacgagctagcacatagtgtaaagacacttgagtttcgataaacaaaagcaaatgacatatcttttaatgaagtgattcaagaatggtgataaaaaaataaccattaattgataaaattaggcaaagagagtttcatacgacccaaacccaatttttttttttccgaaaattcttcattcttcttcttctccttcctttcttatcagcccaagccacctcaaaccttccataatcatcatcttcaacctaaaaatcttaaattccttcacccaaaatcatccttacacattcctaatcataacccactctccaatttttccacccattccctaaatctctcaaacttttcctaatttttttagaaaaaatcctaatccaaaaattacttgtaatcttgaatttttttgcaatttcttggtcgatgaggatgaattcaagcttctcaatggttccaacttacaagtaagtggttgtcattattgttttttaaaatttttggattatttgggtagaaagtatgatcaagacaaacaaattaaggatttttgtgatttttgatttatgttaattttgttggtggctaatttggactagtaatattgattgagattgaattgagcattggtgggaagtgaaaagtataggggaggtattgcccgattttttattgatttagtgtccaagattttgtgcttatgagtgaattagctagttagtatggcattcagacataaaagaaccactacccgagcccaaagaattgaacaaggctcatccctgcgtgatccaaacccccaagggaattaaccacctaaccaaccgcctccgaaattcgtcaacaatgaggcggttgaaagatacaagaaaattcaaaaagtaggttgtcataagagaacatggatttgaattctaagatgagccatttgagcgggatcgtaggtataaagtcattcgaggtgagattgtgcgacaaaattggcattgagtgtgtgcttctcaatttttgggagaagccaactacaacttattgttcgagttctttgccaattatccttacaataatgaaaataacaaggtctatgttcgaggagtttgagtgccagtaagtatttacattattaatagttttttgaaccttaccacgtttgctgagcacaaagaagaaagttggctattcactgaaaaggttgtataaaagatgatacattggctggggttttaggctaggagggcaaccgattctatactgaaggtaatgccaactagaaatttttacatcactggcaacttaacttggtggctcgagcatgggtttattttgtgaatgcacaattactgcctacatctcatgtttctactgtgaattatggcaggtgcatggtcgtgtttgccatcatgtctcagtacaattgtgatattggaagactagttcattggaattttgagtttgtctctcaaatgtgcactaatgctggcacgattcatgggattacggccttatgcagcaagcatgacattcgggccttggatggagacattattaagctacccatgatgatgatttctcgaagatatttttatacttttccatcggcctctttcacacctccaaaagagtaacaaaaatgccataaagacgataatcaacccgagggagatggtgatgaagtcaaggaggacaatgaaggggggctagtgaaactatccctcctctgttacaactcgagccaccattggattcaaggactcaaggcacatacgatcgattggattatatcatttgccaaaatcaatacataatctagtcgaatcaggctcaagttgatttttacaacacctatcttgagcaacaaaatgaattcgcttgtcaataagtaaatgaaatatattcaacttttgccatgtggaccatgaactctgatgcgtcggattactttttagttccaccaccatggcacccgtagcaaccaccacctccaccactgccatactgatgtggctttcaagtaagttccttttcctattctttagtgtcccttgggggataatgtgccatttaagtttggggaggtgaactcaattttttagttttttatttgtttgttttgcgtgtctgcttgtgtgttcgtattatgagtcaatcttctgaatatgagccaaagtgaaagtgagtatgtagcatggtttgaaattttattaattctttcaaaaaaatctatgtgcttggtgagatttcattcttaattaacttcaatttttttctttaaaggaacatgtgatttaggcaatttttagattggttgtgcctttcaagctacccttatagtctttatcttagtttatcatttttaagttttgacttgttactctttatttctatacttactttgagctaaaataaaatgaatccattattatatatctttgatcctaactataccataagtggatcttacgtttgagggattataatgggaaaagtttatgcatgttatgtgggaattaagagtaatattgagagaattttaggaaaaaaattatttgcaacaacttgaagaaaaaaaaaagaagaatttttcttgacaatatggtgtcatatttaaggagaaaaaaaaaaaagagttgttgcaaggttattaaggaaaaaaatttctcatgtaattagaaaaaaaaaaaaagatatcgagatcatttgtgaaagttgtgaggtaatttgattagagaagcttatggtatatatgaacctaaatgactattctatccacccgtgcctaagcctatcaatacaagcctagctagaaagaccttttgattcttgattatgcatctgtttatattagtggagaatagtgagtattgcaagcatatagaatatatttggttagtgaattgaaggtggtatttgacatatgttaattgttttaaatattagttaagtgttgattatagttttatgagctgaaagaaagaattgaggtgagttaagggtgtgattgagctaaattctcgactaaaacatatatgcgaaatttttgtaaaaaccatgttatttggcttacttgaaagattgggactcatgtttcggttgattgacttgattcatttatgctgtgtcgtgtttagttgttagttctttattcgaggacgagtaaaagtttagttttgggaaatttgttaggtttttattagtattactttaaggtcagttttaaagtatttttaaatagttttatgtgtgttttgtgcaattttacgcttttggtagttaatattttgcaggtttagtcttgaagaaaagtggagcaatcctgaaaaaaaaaaatatgcaaaaaggtcaaatagataaattctcaatgctagagcaacaataaattcaaaagttccaatgcggttggagctcctaaggctaagaaattagaaataatggagtggtgcatcaacattaaaattcaatgtcagggcgctaaaaggtaaaaacttagcagagagggtcacttttgacaagtctaggggtgcgcctcaacattggggttcaatgttgaggcctaaaaccaaggggagctcacttcctaatattgctcgttgagggttgcgacatgggcatgtagtatcgtggcccgtgtgaaaaaaatcaaagaggaatcgtgtgaatgaggacacgggcctcgacactggatttgtagtgtcgcggcccgcctcgcataaatttgaaag

SEQ ID NO: 16591 - DNA, 4071 bp, Cannabis sativa
tcatttgtcactaataaaatacccgatgctaatagtgatatttttttaaaaaaaatatatttgttttttgcgtcggtttaaaagggaagcaaaccttctacgctaatcttatataatctaccttaaccccaaatcgattcacacactattcacttcgtcttcaacctccgaagtctctccctcgctctagcgattctcctctatcctcttcgatctttccaaccaaaaccccattccacaaaaacccaactcagtaagtctctagtctttcccctttcccctttcccttctcttctttcttttatattttcttcaaatttcatgggtttttcctctttctctctcaaatctctcttctcgctatctcacacttcctctgttgttagtagtcactttctactgtatttggtggcttcacattgaatgggtacgtattcttcactttcaattgcttttggattctttttttttttaattgttttaagttttgaagatttgatttttgtttcaacaataataaaagttgggtgttttgtataatagtagatacattagcttgaatcttgtatcaaatgttggtggcagttttcattttttttatattaaaaaataatttttgtatacaattctttttttatatatttttataattttatatatatatatattgtacactacttgtagttttcttttgaactaaaatagtattttgattgtgtatgcagtagaatctgttgattagtttaggagggtttatacatgtgtttactgtatctaaattctagttcaaactgttcttggtaaatcctcatatccataaaaaaaatcaatatcatttctgtacctaacttttttcttttttattattgaaatccctgttgattctcatgacaagtctctttatgaatgaagttttggtgtccatgtttaggagaaatatttggaaaatgaatttaagtgttgtctgattggagataaacaatagtggtggttgaggcaattgctagcctgtgcttgatgaagtggtagtacagtaccaaaggatgagagacattttttggaataagtgtttaagctcttagaaaagataagtatctcctaattaatatatatatatatattatatacatggctattaagtttctactaaaaaaatggtcaattaaaaatcatcaataagttctaacttctttgcacttaacaatcagttatatgtaaaatataggtagatatatctttttgactatcccattgtgtagtgtctctttatttttttgttgttaagctaattattttcaataagtcacttttcatggttgtgatagcaagaaaaagctagaatatgccacctatttgtgcattacgtaaagtaaaatatatggttggataaattagatggaggctgctcgataccaacttttgtagaattaaagttatcaaacttgggatgaagtgactaaattataatgagattatgaaatgtatttttcttctttctataatttgtttttgtcaaatgagtttttcagcagggcatgtcaaattcggtatcattacaaggtaataattttctttaatcttttactgcaaaaatattttcggaacgtaaattatcatcttgtttgtgtgtgtgtatagttagacattataaataacaaattagttacttgttagaatagaaaatcatgtttgatctgagttcttgattttctaagtccattggttaggactcaaggttttaggggagatttttagaattgtttcatgagctagtttctttcgaatagtggtaaactgaatgagtgtacaggggttacctattcttgttgggagttgtatcattttctttattacagattctttcttctccccttatgagatattatacttctattaggtttgttattgtgcttatctttgtgtttgttaatagtatattgtgctatgacttgaattggtagtaaattttagcctctttgattttaatgaggataaggcctgcctattctcttactcattattaggatgttcatttgtggtagttcatggtggtgttgagtctctacctttttttgtgcatgcatattcattcctcatttcagctcttgtgttttttaatttattggagcatataatactaatttgcggttaagttcttggtggttgacttgttaaatttgttaatattacacacacgaaatgttaattaacattgttttattgtattgatgactggttttttaaggtaatggaactaatactaaaagtttgctttgaacttgggataagggcacaaatacaaattcatctaatgcttaatcttgtggtttaaattgatcagttgtgtaaatttcatcactttgaagaatttttgtttcttgcttttaatatggttccaaatttcatgtcttgtttgctattctatatcatagtttggtttgtaactacaatgctttggaagtttgccaaaagattaggactttatttatcatgtcgaacttaggtgttctttttttatgcaggttccattgtatgtggtaacaaagatggcatcaatcaagagatcttccttctttgttccatcgattgatggctatgctcgaccagtcatgcattggataggttacaaacctcactgcatatgccttactggcctcattcccttctatgggctttggcaaatgcattgccagaaaggtacatacattttcctacagtcatagttgtcaatattatgtgtgccttgttaaaaaaaagtgtttatgttctcatttggagagtatatttgcacttgttacttgaagatttgggcctttctttttcatctcttttgtacaataatttgctgagactttttatggtgttaatttattttggttgatttaattctaaatagtattacactttacaatgtttgtatgaagtgtctatcgacatggagtatgtgattgactgattgtatgaaatattgctctctgttttagagactttttttattcagtgtaagttttttcaagttatgtttgagttagaaattatgtccatgtatttatgacttggtgattttaattccgtgatgtataatcatgattctgtagtttaattctcaaaatccatatatatgtctccctttaagctagtctaatctatctaccttaatttttttatgctatatgttattaaccaagcaatgtgatttaagattaggaattctgtaggtttatttattattgcttactattttattggagaaacaatattatagttgttaatttttttaatgcttaataaaaaaattaatctatgtgttatactcgatctctttaaatgtatatattatatgcatatacaattatgattaatattttttattttttgttttacagtttaagttagacgctccctacattaacgagaagatcaatgtagtacgggatgagtgagctaaatttgtgaagcctttaattattaattgagtacaaggttaccactttttattatgacacatgggaaataagttttatgattattgctatttaactctttttcattatgtaattagtttatagttttttttttttttgaaatgtaattagtttatagttagtttttatgatacatggaatgtaagttttataaatgttattttattttattttttgtattatataaaatccttttaaaatttgaaaatggacaaagggaaaattgcatagaaatctacaatttttccttacctatatttatgcttcattttataacagacacaataggtgaaaaaaaagagcatttcagcaacttttgcgtcatttaaaaaactgacgatataagtttttagtgtcaattttgaaatgacacaaatgattttgcgtcatttctaaactgacacagaatattaaaaagaacattgtatattttgtgtcggtttcaaaatgaagagaattattttttgcgtcacttaagaaacgtcgcaaataaaaaactatttgcgactacggtatatacgtcggttttgtagaccgacgcaaaatctttatatgtcatttcaaaaccgacgaaaatactcctttt

SEQ ID NO: 16592 - DNA, 7244 bp, Cannabis sativa
ccaaataagcatagcagaaagccaaaatctaaaatactcttacacagaagcacaaataccacatgttcatcaacacgtcaaaaatacattacagtctattcagttatatatgcagaagctagaaacccagaaatcacctgcgactgcactttctttttcaattcatcagcatactcttcagagtaatactgctcagaagaagctggtgatttattgccggtaaatgaagccaaccgctgctctagcgtgtttattctttcttgtaactctttgacctcagaacactgaacacaatcagattaatgacataagaaataacacttgtattgaaatttatatttgtacagaaatatactagaaatgtattttaaaaaaaaatctgaaaataaaatagaatgctaaccttattctgcagctgctcctggagaatacggttgtctgctgttttaatctgcaattaatattgtgtaaatgtttatacttgtaaaataaatgcacttaaatacatcagaaacagcaataaaatgattaatgaaaacccacctccaattcaaatcccttctcattacactgggtcattaatctctttactgtctgcttgagcatgaaacaagagttacaacaataatcaacagtagatgattacatgtgaaagatgaagaattcaaattacctgttgcatgtcaaccattgatgcattagcaacagaagcctcaccactttcaacaatgcgttgttctaaaaccctcatttgccttcttttttcttggatttcacgttccaagttctgtatctgtattttgagaaagaaagaaaaaagacgatttgcgttaaactttgctcgcctcaccataagagacatgagaaatataagtttcagccagaaagagctggacaacgattatgtattccaaaattacttgttctattgaatcaacaagacaagttatagtacaaagaataagtggatgaccagacaaacatattacatagtggctcttggaaagcataaatcacatgatatgaaattcctagggaatttaaaggatccatctatgtctaaaccaactccactaagatgcacactgtacgtgggatacttaaataaatatatacctgggctttcgagctctcaggatcattcaaagactgctccactaagcgcttcaaggtgctggtgccaaatgcaatttccccagcaagcatcttaacttgttcaacaagaaggtctatctgatctgacattgtgatccctccctaaaatacagtatggataacagctcatatttaatcaaaatccagactagtaagtaatccaaagtattcaatcacgatgaatttaatttggttgcaattattctattcttctcatattttactttcataaattagttatattttcttaaaaacaaaaaagtaaacaaacacgactcaaagatgaaccatgtggccatgacttttctagggatatttgggatggacaaatatgcatactgtagggatatgtagccatgtccttgcttgcactatgtaggtaagcaaacgtaccgaagagaattttgaaccactgataagttctccggcttgagttgattcagtaatgatactactagcaggtgagagttcttcattccacctgctggaagatcttttatgcctgaactcataagacgaatctgtggccaaaatttgggagtctctctggctctcaccctctccaagcaaagaaccctcgcgtgttatatccaatttctaaaaggggtaaaacataatattatcacaccttttcagaattgagcactagaaattttatgtgtgggtgaaatacagccctcataagatagaagggcaactatttatattaactcgtataatttgcttaaagttaaaccacttaagaagtcaggaaaactatagtagggcatgcaaaagcagatccaatgattacagaattggaacaaaaactcacatcatcctcgccaacagaaagactacgttggtgactgggaatctcaggcagacagccgggaattgtatttttagaagaaactaggataagctttgttagcctttggattctactcatgagagcagccttggcttcttcttcttcctctagccttgattgcattttgacctgaccttcttccagctatttgccaaaaaaaatcaagacacttgatgttaagagaacgatatctttctatgagttgcataatgataaaaggtataccgtttagttaaaaaaactacatagatataacttatttggttatcaaaaagaaaccagagtaaataaaatacctgttgtcgtaagctcataatttcctcgtgactgacaccaacaatcacaccactcctaagctgatcaagctcttctttaagagttgaaatttctctttgatatttcttaattaatgatttctcatcaataatctggaggagtaattgagagaaaggtttaatacctatcactatataatgcctttaaaatgaaatcacaaactagagtcgcatcacaccttattacgagatgcatagatttctactctctttgctctgcttgcaaatttcaatgtattatgagtttcctccatgttacttgaagccggagtaacagtacatataagctggtaatgttcatacaagagcaaaaacaaaatatatataatagattagattgcaaagtcatccagcatacatgatcaaaatacatcatgaaaataaaatattactcgatcattaaaaagcaaagtacgaaatattcgtaattaaaaatctgaatcaatatgtatatgattgaaaataattacttccacaaaagcaaccctttatttacatccattgacaatggtttaattataattatcaaactcaccgaaacatgaccatggccacctaatgaagattgcagtagacgggtaagcttagaatctcggtatggaacatgagatgccttcccttcactcaatttccctatgaccttcacattgcaactatacaattagattatgagcttacaattcacaaggatcttcatatacaagaatactcatgctgaataaaaatatgtgtgtatatatataaagaacaattactgacagggattactcaatccttaactaagatagtttagaatattatataagggaatgaaagattgaacactggacagctaggtggttctttataagagatacggcacactctgcagattaaaatctagacagaagtaagaaggatattgatattcatagtagtttagtggagacatattgaattgcaaaacacctactgttccaagagttaaaagacttttgtttatataggctccttcctttcttcgtagtccagtggtttcagtttttgagctttcggatccagctaaatcaatcaaattctataaagacaatacataagaaaacaaaaattagattagaatattattaagtggacaatgattcatctgtgtagtaagaaattgatttgcaccgtacaagttgagaaaatatcactccgtcatactcgtcaccatgatcactactctcaatcatctgcaaatgcataagcaagttagagagtgggaaaaaactgtctgaaataagaactgttaaaactgtgaaaattaggaatggttttagttgatgaaaatttaacaaataataatccatatagctaaagattgtaaaagacaagaaattattttaaataatcttactcagatatgagaactatgaaaattaaattttggctaaaaacttgcaagttaattcatgcaaggacataaaatttgagacagcaatagacgaaaattgataaacaattaccagggtgaaaatggtgtgacttcgactactcaacaaattgaaattgtttgatccaacatgacggtgctctgcataaccagcagccacaaacgaacaacattataacttagatgatatagatctgacaatctaacctttatgaaaagagcatctcttgcctcgtggggagtaataaaaaatacataatgatgaagagagagttcaaataccttctccagcagcaataaaagaaagtgcatgcccaggtgacagaacaacctcttccttgataccttcaacataggtacccttcacatgaccacataaagaaatgtcagaaatccatccatgatcataaaagtaaaggtactcataaacttttctttttaagaaaagtgcatcatgaagaaagcggtaatgtaataaatgtttataaacaaaagataacagtagataatgtttctattaaatagcagaaaagtgaaaaacctgtgcatcttctctaacacgtaaattttgtccagtgggatcaagcaagtcattgatcacctgatacagaagcacaaatagcttaacaaatcaattaggtgacacaaattagagtaactatttttagtgtaaaatcagacatcaataacagaatatttgtacaaataagtagtattgatgggaagaaagaataacataaagaaaatgaaaactgtaatcttgaaatgtgatggtagaaaccaatttcaataatgcaactgtaaaaaacaaatccaaacatatgaaagtgcaatatgaaaaaggaaaaaaaataaaagaatacagcttcccaatcaaattcttgctttataaaattaacaatccataagagaagaactgacctcattataaatttcaagatatgatacccgaagtaaaaactctcttcctggagtctgtaataatagccagctatcaattagtcattaaagcaagcaacttaaaccagtatatcattgaaatcaaccaaaatccagactaatcaagaataacactgacaagtacctttcatacatataacattcatgtatcaaacaaaaaaaaaaataactacagctttttaacctcaaacacacccacacacatgcacaaacaacacttaaatttgatcaatcagtgaagcaattatcctaaagagttggcctacaacttcataattagattaaagagtttgcatgaatatcaggatgtcaaatcatgaaactatagagactaatagcataaccatatttctaagaagacagtcaggctccaccagacctttaatagcattgaaaagttaatataaacagaaatgaaaaagtgtttatttattcgttttgcaccacgcacaaaaaaaaaatagaaagaatacacatatatacgtatctactgcaacagcaatagtacttacatcttgaataatactgaacacatcctttatggccaatggtataacacctggagcattttgatctccctgttcaaaattgccagaagaaattagcagagtaatggagaatactataacacatagcaacttcataagtttatttttggatcagaagcaaataatattacaggtaataagaaacaacattttcgccagatgatggaataagatattgtcttttccgtttacataaaggaccctcaatcgaagcataagagctgaaataacaccctaaaattgaattgaagataatcatgtagatgagggttgtacagagtgttatgtattttttctaaaataacatttctcaagcaacaaatgtagttttcttaaaatgcaacttagagtagctgcccaaacccaaacaattcactagccgaacattgtaatctccaagaataatttattgtcatagattgggtgccagtctgccagagaactgaggaaagtctaaatttcatagcccagataggaataaattttagaaacaatcaccaatgctatgataatttattgagcctcacagttgtatccctaagaaaaatgcttaaatttctctagtgttaaaatggatatatttaaaagatagacaattacatgcatagtgtgcgtcttcccactacttgtcacaccataggcaaaaactgttcctgcatttaagatccgaaaaaatatatattaacaaaaattaaactacaataaagaaacttcaatgcagttactattaatcaatttagtgaattagctttcaaagtcaaataaattcaaagcgctagttaaaagcattttacttatatgaattactaaatttaatttttttttctaagattccaattaataaaattgacccattaagagtcttgaaaaggaaaattcaataccatttacaccctccatggcagccttgactacaggtttagccgctacctcatatacatcttgcgaattcgtatgtggtccaaagactttatctgccaaacaaaatcacccaccccaaaaaaaacaactcataatcaatttctctacttactacctaaaacttaataaaattcaacaccaaatcgattggtcatctgcattttcaattcatgaattttccgaagccaaaaatgatcaatcaatcaaaattgaattcaaaattaaacaagaaaaaatgattacaaaggaaaaagtatagtaccaaatgcataagctgtagcaggattatattcatttctcacaattttatctccgtctgcataccaagcaatttcatcccctttctgaaactctctctcactgcaagcaaacaaaaaagcccccaaaaaaccagaccaatgaatcacatttacctaaaaacaaggccctacgaccaaaaggttcaattcactccaatccaaaactccatagatctgatcaaacaagctcagatctaccattacctcaaaggcctaaaccgaatcgtcacagatatactatcccctccagccctcggcgcatcaagaggctcagcaatcagctcttcagaagggaatcccacaggagtacgactaccgtaagtccgtggaccaccgtacactgaatcggaacggccctgactagacgtcatggatcgagaacctactccaccactacctgagttgaagtaagaagaagccgaggtagagcaagaacgaggtataatacgaccgttgacaaacgaagaagacgaagaagtcgatgagtaaggacttgactgcttgcggtgcgaaaatggcgagctgcttcttgctcgagacgacgaggccatgaaggttcgaagcaacccagcgagttggtgagtcgacgagtcagcgactcagtacccccaaaaatgttgcacaaatagaagaagaataataataacaagtaaaatcaaagaatgtgtcagaagacctcacatggctcgaaccaaaaaagcaaaaatcatcgttttttttcctcctctttttctcaagaatatatatttatatttatatata

SEQ ID NO: 16593 - DNA, 6061 bp, Cannabis sativa
atgtatttatagagttagggaggagacttagctacaaaactctagttagactggacttgctcatcaaaggcttcagttaactagaaaagcccatatggactaacacaactaagaactattcaatcaactcaaattttaataaaactaataaaatttaatataaggccaaataaaaagtctaacaggattgacttagcatatttttgattctttatgtatctgatggtagaaaaaactccttcaacaaacaatcgcctaacattattatggttcatctattaacttcttttgattatccctaaaaaataaatattttaataagtgaatatattattaaaaaaaattaacgatctagtgtcgtaattaaattcaaaagatactaattattgtaatttaattttaaatatcacatatttttgtatcgttcgttcgtagtgaagcctctattataacaagattgtcatagatattcactaacaacttttattataattatagaaagcttgaaaaatagataacgaaccatttgttatgcacttcctgttatcatttattgtatacctccaaattaatactactaataaatttacaagtgtatataaacaaattcgatagtcgtgcatatccactcatttaattgctccatttaaatatactataattgatatttaatactatatgttagctggattagtaataagtccaccacagggttttcattaaataattaatttttttcacggcatatttgctatcatatttatgtgtccattaagtaaaacgtcaaatttttttttactaataaagaaaaaaaaaattaaaatttaaattacaatatctctaatatattcatattatttaattattatctatttcatttcgcgaatcacctatacctaatgctaatatatatagggttcatatatttttaaaagattaaataaataaaacttaacgcccaagtcaaattttcaaattcacccatatattcttccactatataataaaggggtaagttaaaaaatgtctcttttattaatcaattaatcaattaactaaatttaactctaattttatacataaaagagttacaagtatcttgaagtgacaggggcgtaatagaggattatataaaaagagtatcgagtgaatttcctcataataaagtgtactactagaactcttgaaggattttgttgggtccattgccaaatatggatatcttaactaagcttccagaaactgaaacaacggcggcagcaaccacagcagggcgttcgtatcagccacctccggcgatggatagtgagaaggtagatgaattggaagaaattattggttacaaattcaatgatcgaaatctcatcgaacaagctatgacccacccgtctttcgttcggggcaaccgcaacagttcttacgatcgattagaatacttaggggactccattatctctgttctattcacaaaactccattactttgaatactcaaacttctcctccggccatttgactcccttacgcgcctccaatattgactccgagaagcttgcgcgcgtggccatcaaacaccatttgcatacctacttgcgccacaataaacctctcttggaagatcaggtccgtatacatatcgctccaaaaaataatctaatttataaaaaaaaaaatatttttatttggttgaaaatatattttgatataagaaattaataaagtcgtacctaatttaccattaatatatattattatatacgttgattttaatggtacagataaaaaagtttagtagtgatattttggagtatcctcttcactcaaccggccttattgaagtgcctaaagtcttagcagatattgttgaatcaaccattggagctgtctttgtagatagtaactgttgtttcgagactgtttggacggtacttccattttcttttattttctttccatggatatatttattttattaatttgtttttagaaattcttatttacttatttattcattcaaaaatcaaataatttatgtaaaactattttttctatttttaattaattaattttgcgtaattaatttgtttataaaccttcaacttttatataattaaatttgactattataactttaattaatttttaataaatgagaaagaagcaaatttctatttcgtttatttattttgtaaaactttgtatgtaccattcaaaactaagaaatatttatgcttctatataaatgctaactacctttcccgatcaagttcatatcatttattttcagaaaacaaaaataaatatatcaattatatatatatagaattttataaaaatataatagcttatagaggtagtggtgacagatagctaggtaggtgatttgcatgatgataataagagatgaggtgtttttatttctgtgataacacgttttatgaattttgttggtaaaattattaaatactggtttttgttacaggtttttaaagatattctggaacctataattgatgcaaaaacgctaaagcgtcatccaatgactgagctatgcgaaatatgccaaaagaatagcttaaaagttaaactggtggattcatgggcccaaaactcttccatacatgtttatgttggagataaactcctcggaactggaacttaccctctcaaaaaagaagttgctcaaaacagagctgccaaatctgctctcaacaatttaggtatatattttttaatattctctaattgtaacttaattgttcacatttaattatcatttgtatacgtatctcatttgtcacataatacctaattaatgcctagtaaatttacctcactataattaacttttaacgagtcaaatatatgtgttttattagcattctcaaatatgtattcaaaatctaaaacttacggaggaactatattttgctaatctcccgtgattaataataaatctttttaaaaaatggtaaaaaaaaatatattgttattgtcaattaaaggagaaaatcagtaaaccatcccacttttggtgtgaatgattaattacaccgaactatctattaattcaagtattattttttatatatagaattatttaagtattattgatcaatgatgcatgccctaggaaaataattggcaattcattattcaaacaaaataaacttatattaaagtcttggaacgattacacattttaattacatattactttccaatatactatcagtattctaacttatatcctaatcatcactctattttggtttaatcgttaaattttagctgatatgggtatcacaatgacaacggtcccagaaagaaaaccagtaacaaccccagtggatgttaataatatcaatgatgagccaaggacgagtactccaattgaagtagaaaaattggaagaaactcttggctataaattcaacaaccagagtctaattgaacaagctttgacacactcctcttatgctgatgacattaacagccattatgatcgattagaatacataggagattctgttttgacggccctttttactaagctacactactttttatacccacaattatcatcaggccgattgactcccttacgtgcttctaatatcgatacggagaagcttgcgcgcgcggccgtccgccatggcttacatacatatttgcgtcacgataagcctctcttacaagatcaagtaagtctattaatattaattattactctctctatacaatttttctaagtattattactcatatatatattatttaagaaattcttattaactttgaaaattttcagtggaccaatattgaattcatattgtgcatgtctatcatttttggaatgttatcatcttcataatttaaattaataccgttaaaatttctagatttagataatcccttgtccagaactctaatttttttccaaccacgtaacaaaccttataactctatatgtaccatttctaaaaaaatattcttttaaaatgatgtttctaggagactatttcgaatcgacgctaatagactctcaatagctagcatcagtttaaaatgatcacttaattatttcattactgccagtcctcgaaaacttccaaatgtgtacaatgacaggaatgccctattttttagtactgttgtatcaaattgagcttgagtttatggagaaaatagaaatgaaactaagtacaatgagattgagaagaaaaggaattccaactatttattacaaactttagagttttggatgttatttgacttataactttaattgtttttttgttttttaaaacataaaaacagttttaaaaactaatatataagagccacaaaattttttaaaaattaaattttaaaaaactaaaaaataggaaacatgaaaatattgttttcaattttcaaaaataactttttttttttgtctaacatattaatatatattttacatttttgtttatatattcgatcctagacctggagccaaaccggacccgaatgattcatattatagtaaggtgttaaaatattgatttttttagtaagaaaaaatctaaaaatagttttaaaaaatttgtgtcaaacatcattaaatttttaaaataacaaaaaaaatataatctattctcacttttgaaaatacaattctaaaaactaaaaactgaaaacacaaccaaacaaactcttatctcgtctcttttttttttctccatccaaatctctctctccatttatttccctcccttaattacttcattcccttaccaagttttattcttttgagaaattaaaggaaaaatgttaagaaaattttacaagagctacgactaacatatggaatcataacttgttcacacgtgtgtaaactcaagcaatgcactactagacaccataataaaatgttactaatcttattttctctctctatatatagataaaaaaattcaattcagagatcttggactacccactacactccactggtctaattgaagttccaaaaatactagcggatatagttgaatctactattggagctatttttgtggatagtaactgttgtttcgagacggtttggatggtacttaattcactctcaacgatctgtccatatatttccactattcaaaaaactgtattttctaatccatatagtttcatttttttttcacaggttttgaagactttattacagcctttcattagcatagagacactaaaacgacatccggtgactgagctatatgagatgtgtcagaagaaccatttaaaactgaagtttgttgatttatgggtagagacgtatactataaatgtatacatagatgatcaattagtgggaacagcttcatatgctcccaaaaaagagattgcacaaaatagagcagccaaatgtgctctccaaaatattgacacactaattgacataaaatcatcgcaaatttagttcatttttacactgtcacattagtgtaaaaatatttatatgtatcttgctttcatagagataatatattaacctttcgacaaaaagaaaataaacaaaaaaatttcttactattttctgacttttttttcttcttaactttattttcactatagttggaatcatacatgtgtaatgtgtttgaatcccttttcattttcagtgttaaccctttccttatttcctcatgtgtccacatggaagttggattttagtggtgaaagaaaaagataaaaaaatatagaaaaaaataaaaaatataataaataataaattcttatatttggtatagaatgaaaaattataaggaaaatatatgttttaacctaaaaaaaaaaatttgatttcaacactgttttttcttactctttcctttttcaccaaaatctaactttcaaattgaagaagtcttttctctttttttttactaacattatttaacaacaaacatcaaaattacatatattatatagcttaagaacaaaacacaaattaaaattaaaaagaaactaacctttggtggtggtagtggtcttgcactaacagaaaaaaaaaaaaaaaa

SEQ ID NO: 16594 - DNA, 6689 bp, Cannabis sativa
ggcggaaatactgacacagatgaaggaagctgaacctgcaaagcctgatcttgttgaaaaatcctaaaatgtagaagttgatataactggtatggttccttttcatggttgatgttttttaaatatacctttttttatgttttttaacttatgttatttcatatagctctttactttatattaataaaaaaatctcacttgttgtaatgaataaaacttctcattcatctgcttatgatgtttgaatgtttttttgaattgtattctttgaacccaatgaagatccacacatttacattgtaatattgtatgaagtttttactataatctatcaccctttactcaccaagaacagctgaacttcttcaacaacttaaacataatattgaaatgaaacaacactccaaaaacagatgatctttcatttacataaaacacaccaaccatgttgtgctatgtaaatttgtatttgtgatagtacattgaatataacttgccttacaaggaaaggcttctacttgtaatatatttacaattgtctgcaaattgccatatggatttagttcaagctgtgtaataaatttggtgtttttaatttagtggagagaaagaagaaaaaaaagtacatgattttctttctttcatctccccaatagatctattttctctcaaattaaaagcaagtgatctgtagtggttgtacatggactagttgtgcatgttttttggaagatgaataacttgtttagtgacatttcttttttatctttataatattgatcattactttccaaaaaaaaaaagaagaagaaatttgaaacaaccatttagattaatcataaatgattaaacatacatgaatttggacatcttttctctattaatctgaaattgttctctacatgaacaaaattattcctcaggcaccaaattttattacactctcaacaatcaccaataagatatcaattgactctacatccattaaacttgtgataaatatgctgtgctaactctcaaggatgattatgattgattctctcttaattggtcttggttggctttgtagcaaggccaaatccaagtgagaagagtgggtcataatgaggatctccaatgttcatggggagttgatcaacagtcttgaaccatgtccgggaaagctttccggtgaaaccataatccccgaataagacatcagcaacaccttggccttcggttccaggtagccaagcagcaacaagagcatctattgatgaaatataaggctgaataacaacagggcggccagagataacaacaacaacacattttatagaaccacacacgtttgttatgatgctcggtccaggttgaggaattgtcaagttcaaactgtcaccgaatgtctcagcatatggagtttctcccaccacaacaatggcgtaatcaaattcgtttgatttgacaaagttggtatctgggttttccttgaacaccactttagttgttggatcgattgtcttctttatggcggtgaggatagtggtgcctgatgtgacattgttgccactaacaccttgccattcaatggtccaaccaccacattgataacccaaattgtctgcatgagtacctgcaatcaaaatcttcgacgatttctttggaagcggtaacaatggcttctcaccgtactttccattcttcaacaaaacaagagattttctcacagcttctctagctaactccctatgtgcctgtaccatagtaaagaagttagtttcgagtaacaaaatcatggccaaatttcatctgcattttcggtgttagtttttgttttaactaacctgactaccgagctcgtggacaaggctttgatcagctaatggatactcaaacaaacccatttgaaacttaactctcaagattctcttcactgcatcatcaattctactcattgggataaacttatttttcacctggtatgttaaaccatcgatgaactcggtgtagttgtatggaaccatgatctgtaaagacatgttcaaacaacaagagtaagaactaaagctaagtaagacttcaaatccaaaacacaaaggaatggaagttagttaccatgtcaatgccagcagtaattcctgcattaatggagtaagtgtagttagcatgttctggtgtggtaatcctatcaataccttgccaatctgagatgacaaaaccctgaaaacaagacacaccaaacatttagatttcttaatgttgacaacaaacatggttgaagaagctcaatgtggtctggtcttaccctgaaccgaagagttttcttgaggaaaccggtgatgagttcttgattagcgtgcatcttttgcccgttccagctcgagtaagaaatcataacagttgaaacacccttgatgattgagttgtagtaacctgccatgtgaatgctaagcaatccatgtctgtctatcacagtgttattctcattgatgcctttagttgttccaccatctcccacataatgctttgcacaagctgcaacattttttctgtgaaacagagattagtgtgagtatttgcttaacctatcacttagtgttctgtcaccattagtgctcagtattttctcgaaaaataagtttggcactctatattttcaataatacttatctggtagcttgtattttaaaattatacatatttagtaccctaaagtcaaatttgatcaatttgactaaactagtgtcaattatatgtaattaaataattaaatttaaatttaaaatcatataattaaagatagtttgattgatcaaatttaagttcagggtactaaatatgtatgatttcaaaatacaacctagatgaatatttattgaaaatatagagtatcaaaattatatttagataaaaaacacaagataccaaataagtacacactcattatttagttataaaattttaaaaatggctaccactattctgttttataagccttaatccatatattaatggtaatggaacaattatgtgtgttttcttgataaactaatgcctaccctattgtctcttgcaaaagcctttattgtacttttccaaaacaaataatgatataaaaagaatattaaattgtaaaaaggaaaaataaactacataagaacaattttaaggactagtcaaactttaaagcttgaggtatacttttcaatattctattatttttgttgggtatttgttcccttctagattaaaaggactccattttcatacattgtctctagatattttttccacaaggaccacttcaaagcaataaatgttcaaatcttataaaaaagatcttgacttgaaatgtaacaatcaaattgcagtcaaccattacagctttgcacaatcatttttctactaagtatttttaaaggtccaaaaagacactagaaaaggaagaaaaaagaaactatatactaaaatttatgacatattttagagtgtgacatgtgaacaaacttaaattacaagcaatgactatacacaaaaatttaagggaacaaagttagaatgttcttactgtccagcaacataaggaacacccttctgtgtgttaggaggtaaatcgccttgtaaacccggtataatttcggtcattgccctaacaatcttgggatcttcactgtaactttcgaaacaacgaccccatctcggatccctacagacctgtacaaacatagtaagttagaagaagactaaaacataaaaaaagttcttacttttttgtgtgattcgggtcggttactaaccgctatgcaaggtgcaaaaacatattggatgcctgtagctctaacttcaagagctgttgctgctccaatcctcttaacaagttgaggatctctggtttatgaaagtaagtttcatgataaataacagattatgaagttttatgacttgtgagatcatcaaaatgttttgtttagaaaagggtaaatactatttgaatcctgtattatataaaagttatcgattgtactctttattttgttaaacgacaattcagattctaaattcttcaaaatagtataaaatagtatcctaaaatcaataacttttgtaaaatacaggatccaaaatttgtaaaacacaggatccaaaatagtattagtatttacgcgaaaatgtatatgcttttaccttgtagcacctaaaccaacattgtgggggaaaattgtggctttgtagacattgttatggccatgaacagcatcaattccataaatcattggaatcccaagacgtgtagataaagatcccttttgaaaatcattaaccatgtcaatccaagtttctggtgaagctttcttagaaggaacacttcctcctccactcaaaacactacctgcaatcaattcacttagttatgtgtgttttcaatggaaaaaaaacagaacaaagatagtgttgttgtttttgtgttttattaccaataaagtacttcttcatgacctcattggaagcaacagttctgtcaatttgtgtcatttgcccaatcttttcctccacagtcatacgcttcactaagtcatttattcgaacatttatgggttgttttggatctttatacttgtagtaactatctgatgcatctgctatggctaaacacagaatcaacagaagaaatccccctacaaagttgggtaatcttgccatttttgactgaataacacaacaacaacaaaaaaaaaacagacttagacaagtgttactcatcagaaaaagacattatctttatgagtttataggacaaaaattgatacaaaagtgtaatttttttatggcaaaagaagaaaaatcaaaaccccatgtaaagaaacagagaattatacaaaagagaataataaagataaaaactttttgagtctttatatgatataatcattacttagtttcaaaacttgcattaactaaaacaatgagcataccttaaaaatggcttctttacttcaaaaaaaaaaatgtgaagttgtaaacttgtgagaaaagtttatggattgaagcagaatttatagaaggtcaattgtttgaagattgaaatgtgatcttctactctacactctttgtttattttattttatttatttattattaattgtggggtgaaagaagtttggtgtaatggatctaaaatggacttataatttggatatttttggatatagtggcctagctgtcacatcaactaattcgtgctatgcataacttatataaatatgataattacataacttgtataaatatgataattactgaaaaataatatagatgtttactacttttttcggtaaataagatcattagtgtaattaagtattatgttctgtataacttaagaaaataacgtttaagaaatatcgttaactaattgtgagacagtacttataaaaaatattgggtaccagtaatacctaataacaatactctatgtttgaagaaaaataaaatattatatatgtgacattattgctttgaattgggtcaaatgaagaggctaccaatttgatttgttttcactgaaaagatctccatttcaaattattattatcttataatttcttattttattaaaaaaaaaaaggaaatcattcagaagaagagctaagatgacacccaactattaggataactgataatatggagaattgatttttggtttggcttagttaaaggctttaatttagggaaaaaaaattgtttttaaatattcttaaacccaaaccatattatagaaatatatgtcatttaacagacaattttttgcctaacaaaaaaattataatacaaatgaatttatgttaacagtaatcaactttgaagactttaattaaatagatcaattgaaatagtattaaaagttctttcattagtatatctcaaaaaatattgagagataatttaattcaaagtggagagagattgtattttagatatatatgtagaaaataataagatatagattgtaatatgttgacctttatagcttattaatgatttcattcacttacatatttcattaaaaatctcatcttgtctgccaccatatatatatatatatctcttttaccattacgttgttctttcattataaacataggatatatcttagagcaatgtttaacttaaagatactgttgtgtggttatttcttacttacgttttaatattattattaatataattaagtaatcaggtcttatataatttaatataacaatttttaaaaaatattactaactaattataaaataatacatttgaaaaatattaaatactattataataataatactctatattttaacaaatacgacaagtatttatatataattcatctaataaaaaaatatgctttaatattgtgttaaaaatattaagtattttagtcacaatttactcttttatatctataagctattataatgtgatttgaatgtcataccactcaaactaaatcatgccgagattaagtatagttaagttagagttgtgcttagaattcacttaaaaaaataaattctttttgtcctacagcggtaatgctgaggcgttgtccatgaaagaggctttgagttggattaaatcctgttgggaagatagcaggactgttgagggcttttgtcctacagcggtaatgctggagtcggattgtcttgtgttgg

SEQ ID NO: 16595 - DNA, 4069 bp, Cannabis sativa
  modified_base (363)..(371): a, c, t, g, unknown or other
ttggaagaaaaaagttaaaaaaaacttagtataattaaagatatacattttatataaaataaaaattattaaaatgagtgtctttagaaatttttgggggtataactaataattcccttctaaaaaaggagttatatttgcatcccataaaattataaatacacttcattattaaaaaaaatataaacttaaataatttttaaaaatttctcttaatagtttttgttaaaaaaaaatttcttcacattattttatgttaatttcaatatttattttaattttatttttcataattttttctaactcatgattataattttttatttttttaaaaaaataatttcatataattttttattttannnnnnnnntcataatatttaaaatataattatttttacttgatagacatattttttaagaatacgaattcgaagaaaaaagttaaaaaaatcttagtatatttaaagatattaattttataaaaaataaaaaattattaaaattgggtgtttttaaaaatttttggagtaaataaaatttacttctaaaaatatcgtttttttaaaaaaaaaaaaatcgtttttaagtttaaacgaaagtgtagtcttcttgggcttccgagaatttatgaaacttgtcttatatatttctttcgtacccaatcggtttattaactgttacgttttccttttcttttcctttctttccctgctctgtttttatctttttttctttccaagacgccatgaaagcaccaccttcactaattcctatatatatataacttcgtaactcatctcacatcattacacaccaacctttgttttttcgttaggcctaaacccacattacttttttgggttcccctttttaatatatttttttttcgggtttcttcccaactaactcgaatcctcttttccactattggatcgctatcctaatttataattacttcttttgctcagaactttttctgggtatcttatattctttttattattattatttgtggacgggtgattctcttttcgtgttttcgactcagccatgaatgccctcgccgcaacgagccgtaacttccgccaagcggcgcgtcttctgggtcttgactccaagatagagaaaagtctcttgatcccattcagagagatcaaggtttcccactttttattcagtactccctatctttgagttctgtttgtttcctgagaaaattgtttgaccaatacgtgttctttgttttttttttttattccgacggatcaggtggaatgcacgatccccaaggatgatggaagcttggtctcgtacgttggattcagagtacaacatgacaatgcacgtggacccatgaagggaggaatcagatatcatcctgaggtgcttcccttttttattctgctcaatttttttttgtctgttttgttcaaaaattccaccttttttttccttctttttttatgggtttgggatttcagggaatttgattatttattgaaactttcacattcagttattattgaatatatcttaaatggcggatgggatggggtttttctctgtttgatattaatctttatttttgttttgtgcaattttagaatgtaaagttgagtttttttatttttattttttattgttcgaatatacccaaaagagaaaacaaaaagagaaaaaggtctatctatgattgctgaaattaatatcatattgacaaaaagcatatatgaagacaaaatataacttgttgtaatgaaatagttttttccttgttaaagggttagtcatgtacgggtctttgattttgacccaacaaccaagttaaatatctgttaaattttgattgtttgtacctttcaaattgatccaaccatgtcttgccaaacaatggttttgattaatttgctatataatataccaatgccaaacaaataatctccctttttatctgcttttttttttttgactttctcattatgcaagtattatattgcgtgaagttttttggttgataatactgaagtgatgtaatttgtttatttaaaatgttataggttgaccctgatgaagtgaacgctctagcccaacttatgacctggaagactgctgtagcagacattccatatggtggagcaaagggtggaatcgggtgcgacccaagagagttgagtaagagtgaattggagcgtctcactcgtgtctttacccaaaaaattcatgaccttattggaattcatactgatgtgccagcaccagatatgggaactaatgcccaggtataggagaataggaattatccattcacttctgttgactgttgttgtgtattgtttacctttgtttggaatgtttctcttgacacatatgacactatgttttgcagacaatggcatggattttggatgagtactccaaatttcatggtcactcacctgctgttgtgacaggaaagcccattgtaagtggacgctagaaaagaaatctaaatgttcattgatactttatcaagtcatctttttaattttttataatttggggtttcaggatcttggtggctcacttggtcgagaggctgcaactgggcgcggtgttgtctttgctacagaagctttgcttgctgaatatgggaagtcaatcaaggatatgagatttgttattcaggtacatttgatataatctccaacaattcaacccttttgttaaatgtgttttgtctgtcaaagattgctgagtgattatgtccataaaggttatctaattactgtttactttctaggggtttggaaatgtgggctcttgggcagctaagctaatccatgaaggtggtggaaagattgttgcattaagtgatatcagtggtgcaattaagaactctaatggaattgacatacctgaattgctgaagcacaaagaaagcactgggagcttactaaattttgctggtggggatgccatggatccatctgaactgcttgtacatgactgcgatgttctcatcccttgtgctttaggaggagttctcaacaagtacaaagccttttcccaatatacattcactgcctatataattcaatgtttgtttcatggtattccttggaatgaatttgttcaacttattatatcttcatatctttcttgaagggaaaatgctggaaatgtcaaggccaagttcgtaatagaggcagcaaatcatccaactgatcctgaagcagatgaggtacagacattgtagcatattttttcttaagaaaggttcaattaagttgagtagttatatgagttttcatatctgcagattctgtctaagaaaggagttatcattcttccagacatatatgcaaatgctggtggggtgactgttagctattttgagtgggttcaggtaaacaacaaaaaactttaagttcattttaatgaacccttttacttaagactcaccaccactttattattttcagaacattcaaggttttatgtgggatgaagataaggtgaacaatgaacttaagcggtatatgactggagctttccataacatcaagagcatgtgcaaaacacacaactgcaatctgagaatgggagcctttacattgggagtcaaccgagtagcacgtgccaccattcttaggggatgggaagcatagactgaatgagcttaattcagtcttttatttaattatttatgcacatttaggtgccaccttcctaagggaatacgaaccattctcttttcttttattatatgctttcttgttttttacacacattttaggggtcaatgcctctttacttaccttcaaattgtatcacttggtacaatattaaactcattcatttcggaaattatttataatactttttacttttcaaccaattctgtctttcagaaacaaagaaaacaaatcatttgttttgatctttatttctcgtctgccactcagagaacactaatggtatttttgttaattatattaattcacatcttagagaaaaaaaactagagattatgattgtggtgaatcttcaccctcaaaacaagttgttacagcagtaacaatgttca

SEQ ID NO: 16596 - DNA, 7464 bp, Cannabis sativa
  modified_base (6718)..(6722): a, c, t, g, unknown or other
aatttctttgattagcaaagattgcacaataattgaaaaagcactgtagcgtgccttagaattagggcgttacatcctctttggggtgatccaacacatcaataatagctttccaatctgtttctattgcgtggatagggaaatgctcttctatacaccagcggagagcgacaaggagagattttgtttcaagagtgtctacatttccgcctcctatgtaggggaaagcaactgtcgcaacaacgagaccttcactgtttcgaatgacaccgccgaagccaaatttcgctcttcccttggaaactgcaacatccacatttagcttgaggcgaccagattctgggggagaccatgttatgattgcggaagacttgttggagtgggcatgcggcgttggagccaatgctgataatttgtagtcttccagaaagctttttgccaagttcactatggcgtgggtctgatcttgtgtctgtcctctaagagctctgttcttgttaaaccaaataagcgaagcaatacaaagaaagtattttatatcttccttggttaaagagacatatatcctgtgtgcaatatcatggaaagtaattacagtagaagtagcaaaaatataaggataaaaatcgtacctttctagactcttcgaatgctctcacagtagaacaaggcatgtgacacagattcttcctggattccacatctatcacaagccgaagactgaataattttccaaaaagctagattcctacgtgtgggaagggtagaattggtagcacgaaaatcaaagtgtttcaccttgggagggattttaagatgccataagtttttccaccaaggcgacggcgaggaagaagagggaatatcaaagtggagcgtagaagaaagactgaggtggtaacctgttttggcagagtaaactctcgattttgaaggctcccaaatcagctcatcattggaggggtggagaggaagggggatggacagaatctccttaacaacttgagcgggatagtatctcataaggcttggaatgtccaaagttgtattttatttattgtttttaatgttatatatattttttgaagtataattaattaataaattttttgtaattaaataatatattaattttaagcgcttaaagaaacacatgaagcttatttttattttttgaagtgcaagttgtaacataaatacgcaccaaatgaaacttttttgaaagaaaaaaaaaagtcaaaagggaaagattttcttattctttcgaagctcagtcgcagccctctgtctacgagagtaaggcgcacaactaatattcatgtatcgttggcgtctcaagtcccatcggcggctcgaaacacagtccccacgtagttctctccttcccttctccatctccaccgcttcacattagagcttctaagcaagggttttcttttgaaccttgtatcacaaccatggtgttttggtggcctttgatcattcttgccttcgcttgctatttgtaagttcctcttgatgtttcgtcccttcaatgttccctccattgaggtcagtgcctgatggtacaattttctctcttagttgtaagaatatacttactatgtttgattcaatgcagtcgtggatgaccaaaatcaaattcaggagaacagtattatatgtgtgagttcttcgatgcatttcagttctattagacgtttttaatataaaaggttatccttcatttagtttctctatttctcaggtgtacgtttattacactttgtaatgagtagaaattaattgtgaaatacttgaaaattccccttactaagaaataattggagtgttgtctttcttttggctgtgtgcatacttaagaggcaaattggcttgatttatgttttagttgatctgagttagattgattggctaaagaataatgttttggtttctgttttagtccaatttttattaccgctaagtgtctcaatctagcaaagtactcaatttaatttggatgtgacaagtcgagtgctagtttataatgagaatctaaaccaccatatcagcatattaatcctaatttacattaaccttgtctaatttattcaattatatgttccttgatctttcaagttctttaggttttttgcttgttgtcttgttgcagacttccaagatgatcctataaaatagaaagaattcttagttaatgaacttaaatgaaaattgatgggactccaacaggtgagagattataattgccaagtaaaataagtgtatgaagcatctaatgaagggtaaaatatatgaaggatttaagtaatatccgttggaggtttgttattaacatgctcatgttttgttcatttatcgcctggtaatctttgtagctggacaaatttttattccccatcagacttgttcatctcagagggattaacattaataataattgactttgtgaattttaaaatctgaattaatgatgatcaacttttgatttactcctgcatgcctagctaagtgtcccaatcttgcattcaattcacaaaattgtagtactgtacatatataaatatactgcatatttaacatataataaactgttttatttaaagttccatttctaaatccatttttgtcttgtcatcagaagctgagatctgattgattatgaaaatcttatcagccaaatggttataagatgaactggtaagaggactttctactacacttaattattattactacttctgccaataagaaattaaaggtaacactaacacatatgtagagaaatatgccatggcgtatttaacatttactaacattcaaaacttattttttgctttctttcatatgaccaacttttatactttagaaaaaaggatagaagttgaagaatagaataaacttttgcatgaactacaagaccgtatggcagagatagagatcaaagttattgaatgggaggtcgagtttgtgttggtcacttggtctgtgtaccatcatgaggccagtgaaggattctttataagctctcattgtgctctcttttctcttgctaatcattatctatgacttgtcattctcacgagcatatactcagtaagttggatcctttgctatatagtttgttaggccttaggatattaaataatgagagtaaatgagtcattgtaataggtattgaagtagtatatataagagtgtgttgaaaaaggttgagagggagaaaatgaattagttaatgagcagtagctcttgggactctcaaatacccagcaacattgttatcctcttcatctatatcaatatacgattcactatttagttatatttgctactgatatactaaattgatagaaaatccctatcaaatagtatcaaagcaatcaatctatggggcaaggtatgacggaaattcgatcgaaacaagcttttaatcaattggagttgatgaaatcattgttttaggcaacgattgaaaaaaccatcgacaaacatgtaggcttgatgatgaatcaacttactcaattgatatagaatgccagagaggcatgaaaccaatgacgaacaagtggtgattgaggatgaacaattgatgccaacaaaaagttgttcgaggatgttcctgccataagtaacaaaggcagcgaaaaccatagaggaggacaaaccacgcgacgaaggtcataaaggtgaagcaacgacgattttagatttgagaagtgtctcgctaacacttccagccaaacaccacgacatggttcttcgagatacgtcgtcaaagtcgaacggtaactcaccagagctagagaagatgatcgacactcaacaggaggataataacactggtattttctctgtcctacctggttgaagtttgtcggaggtctttggttgggtgagacacaacgccccttaacggtggaggagcagcgttctcgaccgctggcgttaagctcatgcgagttgcagtgtcgattggcgtcagagaagacattcttcattccattagacaccaaatgtgatcgatatcctctcagtttacctgctttgagttaggtaaaaattcttagctggcagggacagatttcgacacgaaacctcaacatggttgacgtggggaacactcaccactcctcgtcagaaatgcagcgccgtcgactgtcgagaaggtgccaggggagccatcggatctgaacgagtgtgctagagatgtttgaagcttcagtatagttgggattggagttgtaggctctgggctaaagactccttgtcatagtcaaaggcccactcactgtggcctaacccatgagggcctagtaagtaagaatatgggcttaatgtttgttttaggttatcatggattaaaaaaatggcatcctcgtcaggctttatcattttctaatcgcacgtggtaatatgaagggttgcgacttacaaaccttacttcaaggccgccagcgatggggcaactagggaggctggctagaacaaaggaaacatggttcaactttttattcgatcaagtgttcgctggatttttgatagaaggagaagagttaactttgtggtaaagagactaatccaactttacaatcacgtatctttagtaattgtttctttccttcatctatattttagacttgcttggtttatttggaggggttttcaaacaaacatcttcacaagagttggaccttagatgatcgtgcttcgacattgaacaaggtgatacatttcatatgcatgtattcttggcctggtattcgtgagatctcactggcaagggttagtgtagaatccattcactatgggttttatttacctgcgcactattctctcgaaatgttcactctatttattattgaagcacacaaatttgggttagtgaaagagaatagactatcgcaccaatttctataaatattaatttgagaataaagaacaaaaatgtgagagaacaagctttggacaagaatagccagtggagttaagaggtaagtccttgttgccactaaatttgcactttgaaattggaatacagttgtcatctaaagaaggtgcactcctcacagttagttttgaattaatttatataagctggccacatcttcttatccagtcagttacttaagctcattttgcttgggcagattaccttagtttatttgaaaggtttaagaggaacttcttgtacaacaaattgcagaagcatcacttacaaagctggaaatttaataataggtggtagacatttctcttttatggttgtgcaaccagtgtgtttcctttgcactaggcttctacttttagagttgaggaacttgttctgagaagggccataaggcgtttcaatggagaagacaagctttacaatgctcaattacaaatttaaacagctcggctggtgcaattcctagagtcgtatcgagatatatgccacatgcgaaatttggagatacatactgcagttaactatcgtagtggagtgccatttcgtaattggtttgttgatagaggaggagcgcatcaagagcaattagagtgcgccagctctatttagaccctattgtgtgtttttcatgctcaccattatcattatctggccctattaatgcagctagcgacttttttttgattgggggaccatcgagttacaaatttgaaaacgcctaaccttgctgccacatttcaatgatcacttgttcatcctaccaaaggcgggactacgactttactttgctagttttttgagcgaggtttgcttgttaaatggtgtcttcactttcgcattgcgaacaatgttcatctactgacttggttatttgatagaggatgaacaaagactgtcgtggaagcttgttgctattcaccttgagcacaaagtgaatttcggactactgctattggtaggccttaagatattaaataatgaaggtaaatgggttattgtaatagggtattaaagtagtatagataagagtgtattggaaatggatgagggggagactgaattagttaatgagcagtagctcttgggagagcactggatctctcgaatacctagcaacactgttatcttcttcatatatatcaatatacgaatcactattttgttatatttgctactgctaagttgatagaaaatccctattagagtcgatccttgttcattcataatactgtgtcaaatcacattgtcaacataccatttcaagtcaatgaggcaaatttccctagctatcatttaggagagcttcaaagttgtatttttttaattatgtcctaattaagggggcgtttggtaatatttttttaattagtttttgtttttataattagaaaagtgaaaatatttttcaaaaacatgttctgtaaaactgttttcactttttaattttttaattaagaatcaaaattttaaaaacaaaaaaaaaaaagtcactttcaatattttttcaaacatattttaaactccgaccagaccggaccctaattccctccccacggccctggcgctgaatccggcctctgagccgaatgcgaatccaactctagacctagacacgacttaaataaaatcaaaaaatgaaaatgaactttattaaacacacttttgttttctatttttaaaattgaaaaacaaaagtggttgtataacgcatttttgtttttcaaaaacaaaattcttaaaaattaaaattttactttcattttgtgnnnnnaaaattaaaaaacaaaagtgttaacaaacggcagtgatacatttttgaagtttacacgcctatgttcctattcctggagaaaaaaaaacgttacaccttgccagactaaattaggcagagaggtaattaagaggattccattcgcttatgttatctaagtgatattaaattttaggaatgtgctatcgaattgttcaatcctttgcttaagaagaccacacaaattaagtgtagagaagtattgtgtcctcgtgagccattaaaataagtaccacgcagattcaatattttgaggatgatgatagactttttcacaattgacttttctatgcgatggtttaacttctggcaaaagtcaatgtaatgtttattattaatttttaactttatcacgttatttaatataatcaactcgtgcaataataattttggttttagtgccgtggaaagttctgttacttaatggatgagcccaataaaatacttgaatattgggcacaatacgattgagttgatgaaatatatatatttttttataattaattcgagagaatatttacacatttttgttgcataaagtatatggatatagttagaaggctaattagtaattttactttaacatgtactaaatcgtgtactttgaactttttaggtcgttaaaaattcctctgaactattgcgattgttaaatttaaagacttttgtctaattttactaaaaaaaaaattctaacatggat

SEQ ID NO: 16597 - DNA, 2208 bp, Cannabis sativa
ttttgactggcaaaaattccctattttgtaatagtattatcaccttgtgacaaatttctgcgatttcgtcctgccttaccgattggcatttgtacccgtgaatgcaagtaaacttgggttccacactaataatgatgatcctagaaagagaatatattttcacaagtgatgtgagggcttaataataagtacaaataacatagagagctcagaagtggccatgtcaggattcgccgcatgcttgactgtctcaatacgccaatataaatctccattgcctttgcctataactcttacaagctcttcttaaatgccaatcttgtctatttattgtgtaagctttaactttaggacactatcaccacatccacacggttaaaccattctttattatttgtttatttctttaggagaggagcaagtatgaagtattgtctttgaaattggatgatttagccctttgatacataaacttaaagaaactttcaaacaaaagaaagaataacttgcatcactaaagtttctttctccaagtccttttttgccacttttccctttgaaagctctttccttgtggtttcaaccccatataaatttgaggccaattgtaacaagagatctcattaatttcaaaattgtatacacataacaaagtatacacatattaatatatggtgaaggtaacaatagtaggaagagtgaaagaggggttacctcttgcacaaggaccaaggtatgtaaataaggaagagaataagagcttcttattttacaagcaacaaggagaattaatactcaaagaaatatctagaggatctttgccacattccaagatgaccatccgaattgatcatcaatattgcttcaagtacttttttttcttctttaattaatttgcattaaatcttctatgttttaagtttcattatagttcctcttctatttttataagacacgaaactacattttacatttatctaatttatatgacccttcaagtttatccatatacttttatgcataattgatcatagtcatgataatcctaaagaagatagctttataaataggaagagaagtaatggtcttatggtctttgtgtgtgtgtgtgtgttttttttttttatatttttacaaatattaagctacttggttgagaatgaaattgctatcattaccttgtccgattcctcatatccaagaaagttagcttttcactatcttcaagatttgcaaaaagagtttcagaagttcgattctaatctcattgagaaaattacaaggccttatagctttattggatttggtaaactctttaattatattccaagtgtttataagctctcaaaaaattaaaagcacatatattaactatatctatgtctttactagctatcccaaatgtttgtttgtttgaacaattaatgcaaggttttgcagatagtgtcattgtgaatattagaaagcaatacattgatacaagaacacaagccaacctatccaagcttaatgctaatagaaaacaagatttagacattgttacagaaaatttgacagaaatcttagaaagaaggagaaattcaggtgcatattaacatatgaatcttaaaactaaattaatcacaaagcttctatctccattaataatgataattaaacttacacataatacttattgatagagttacatgaaataaaatcatcaccactatcaactcctagagctgtctcctcaatatggggctcatcacaacttgaggtaaattttatggccttggatataatgatgtatatgttaaaattaatattgttctgcctaatttattttaaattaattttgcttaaataggtgattgcactgaaatggactcctattacgatcatacttgttgttttggttgtcgtttcctgggctggattgatcataaccgacagcattttaatttccagttcttactagcatatgttttttttttctaggaaaatatatcaaaatacaaattctgtattttatattgttaataatacttatttgctgccttaatttataaaatttctgtatttaaattatctttttataaactaggccatagccgcacgaatttggttgtttttttactataataataaaaaaattaattatttattaacagggttttttttttatttattttaacactttaaaacaattttttttttttttgcatt

SEQ ID NO: 16598 - DNA, 4290 bp, Cannabis sativa
acagagggtccaaaatggtatttaaccgaaaaaaattaatttttatttattttgtgtggtatgcttttgggtaaatatcgtcacattgtttatttattaatttttaatgaaaaagaacggtgagtataaatagggaaatgctatgagggtttgcttctttggcgttctttccctaaaaccctaattttgttctggtattacgcgtgagagagtaaaatgggggccaaggcgaagaaagctctgaagaaaaatatgagcaaggtttccgctgctcctcagaagaaggaagctgctgatttcctggtaagtttatgagtgtgttgtgtttttcttccatccaagcgtttttggtctctgtgttcttagtttgtctccaattcttgttcacaaaaaagccattagagggaggtcctgggctcaagcttcctgttcagaagcctactgaagatgtttctaaagttgtatacgttggtcggatacctcatggattctacgagaatgagatggaaggtccgtatttacttcactgccttcacactcctttttataaaaaaaaaaaatatttcctgggttttaatgtgtatatatatgtatataatgcaggtttctttcgacaatttggggtaatcaagagactaagaatcgcaaggaataaaaaggtgttgcttacatactgatctctagaaatcgtttgtgtagttcctttttatattaaatgtatcaccagtttaggcttttttagtttatagctttcaaatttgatacattcacagttgaaaaatatattaggtgttggattatagaaagtctctttgaaaattaactttgatgctagggttagggcgttgattttgtgtaatatggttctttctaatgaatgatattaggttagaatgggttgtaattttaattactttgcactttatttttcgaaatcactagtttaggtttgtatctatttgaaatttttcataggtggacagagtcactcccctagtatcgattatcatgacagtaaagtatacattcgtatttccccttctataagcaaaactaaactgggaggataagcaggttatgcttgtaatttccttcatatagcaatactgtggggaccttcaatttgggaagggcttgtacttgttacactgatatggatggtatgcaactattccaggttgactagggatttttcaagaacaagtttacttgctagtttatgattgaatttgatccacatggccccttttgcggcagctagttgagtttgatcaatggaaattacagcaatataaaaattctagattatgtagttagtttgtggcagaccaaataagaagcaatggagacacatattaggtggggcatgtcactagaaacggtttagtgacttaaaacagcaaataatgttctatattatgaacttatcttgaatgaattgctgctctgatttaacccctcgaattttgtttaatgttatgtggcaattgttttactatgttttctggagaaatatgcatttatatttatagatattggtcaaattatttatttacattggtggttctattgctaactttctatttttttccattgatatttatgttacagacaggaaagtccaaacattatggcttcattgaatttgaggattcaggggtgggtagttttttctatgctgttatacgtattcttgtttgttccactgatgcaaggactttgtgctcagaatattcgttaatgtgatattttgttgggtgcaggtagccagcattgtagcagacacaatgaataactatttgttatttgaacacttgttgcaagttcaacttgttccttcagatcgtatccatcctaaactgtaagtaactaaccgtgtctccatattacagtttattaatataatgaagtcctattaaaaaatgcataaattggaaatggacacccataggcttgaatttttcaatgttaattaatttgtttgctaaaatatattttatacactggtaattgatgttatatttatgaattacttgtatagatggagaggtgttagttttcgatacaagccactggactgggttaaaattgagcgaaagcgtcacgataaggtatccattgcagattagaacctgtaaaaacttaacatcatgctgttcatttgtttgatgctgtttccaaacaagagtgaaagttagtcctttgattgttttttgaaaatctatgaaggaaagaacattggatgagcataagaagttggtggagaaaatcgtcaagcgagatgggaaacgtcgaaagatgatagaggctgctggtattgactatgagtgccctgaaattgtaagtcatacaatcatattttttccgttactttttctttactttatcataggtagcagctactgtgtctctctttatgattaactttttggcacaatttgttaatgtgttttgtttggttttcaaggtgggtaacttggaacctgctccaaagaagattagatttgagtaaagagcagataccaagattttgattccatccaaaatatgtgtcctagaattctgcttttgtttttagaacttctagatttatgtaatcatgtttctgctgttaaaaatgctatatattgagaaacagacttggatgtaagaatgataatatggtgaaagtggaagaagttttgccctctttattttataattatataattcccttttttcgaataaagtaaggtcgcgtttggttgggaggaatgaaagtataagaatattgatgagaataaagataggaagggaatgaataaaaaattgataaaaaaaattattaattatttttttatgttgcattgaaagtatatatatatttttttattttaaaatagaaaagtcattctatcaaaattgtggattgattattttattgaaatgatattctaaaactctaattaaatggaatgaaaattaatttctttttattctattttattatctctaaacaacacaagtgaaaaataaagattttgtcaaataacatcctgaaagaagtatttcctatatttaacttggggtgggagggagaaatttcttgtttggcaagagaaaagaagagatggaagaaggttatatttttttagcttcaatctattaaaataggggtgttcattattcaattaaattcgtattatttcactttctagtgcatttgatttgtactaagtacgaattttttattttggattcaatccgcacaagagttcaaattcaatccgcaatagttacttttgaatattttaaaatataattttttttttgacaaatgaacaaaatataaattattttcaaataagcaaaaataaaagaaaaattaaattattattttatgtcttcaattataaattaataaacaaataaaaaactaacaacaaatttcaaaaaaagaagaaaaaaaattgtatgtagaaagaaaatttagtttattttaaattatattttcatgaaaatataaatatatatttcatattaaaatttgaaacatatatgtccgtacgtattaattttttgaattattattttctttttttttaaaaaaaaatatgaattatatttgtaattttttaaatgtatatgaataagtgtggattagattatttttgtatgataatcactcattctataccagtagtgattttaaatttcttaatccaatctatctcagtttatgaattgaattaaattgaatcttgtaagttaaattgaatgaaatctatttataaaactagaacgatacaagaaaatgataaaaaagaaaattgtataggattgagaatataagaaatagaaagcatttataaagtggtaaaatgattaataaatgcaataaaattatccttctaattatttattaataatatttttatgactgtgtagattctctgaagagatagaagagaattgagaggctgtggaatcattctagccaaacaaggattaacttgttccctcttctcctctcctctccatttaggcatttactcactttttcctcttatcaaacatatttaagttaaagattatgaataaatgatgaactaatgacctctttgtgttgtaaaagaaactaaattctcattgtctgttgttgagctttcttgactttttggactattgctaccatctaggagtgttcatttgatctaatttctacttttttggtcaaacaacatccaatccgcactaagtgcggattttattttttggatccaatctaatccgcacaatagtttaaatcca

SEQ ID NO: 16599 - DNA, 1960 bp, Cannabis sativa
taatacaactaagaggggagtaggtcattacctactaacttagggggccgaacctctataaaatcttgtctcttttattttttgttctaattgtataacatgtggcaagcatcagtaataaatacgactctgttgtcggttggccaaatcgaaggtcgacagtttggtgctttcattaagagcaagttgttaatttatctgaccaaacaccatggttaacattatgagaacttcggctacaacgtttgcctcatcgggtcttcctcaagaccctatggcagttgatcttgatgtccgtgttcaagctacaacttgaatctccacgaactcgacggatgtggccaaccttgccatctgttcaggcaccactaacccggccaccacgactggtcaggtggacacaaccaacccgatcggtcttaatgatcaacctctttcgcccagggaggactcccactggcacctcgtactgaaggaatggcccacgtggagccacccccaggcaccatgactgggtctagtccccgatactatgctggaaagacggggccaggaataggcgagccccatgtagatttgagagaagatctcgagttagccaaacttagagaggccgtttgccaagtcggccaaattgaagaaccacaccctgttggctgtaatgtattcacacattagagacgcaaatttttgagatggatggatgaccaagagtacatcttccgatcttactaggcagagctagactgctgtaatagagaagctagcaacttaataaggcagttaaatgaaagaattgctagaagaggtcaggatctcattagagatcctctccaagggagactagtcgaaagatcaggaaaggtctaccgacaatctatctaaccaggttcctctggaaccaggatagaccttcccctgctagaaggaggacaattcttgctacaaatatctagtggcgagaacagctagatcctagcaacgagcagcctgggggggtcggctaaggacctcaggctcaacaacacccctgattggtcaacctttggccggctagccccttactggtgtacctctagccaacctatagggtgaactcccgtcttggggcatccgggagcgagtaacctaaaggcaaatctttaatcggctaggtttgggaacgggtggaaacaaccccaaaagataacacaacttgagaagtgagtctaatcacttcagatatttagatccacctaactccagcaattagtgtgatctaccccttgtcagtacataggctgcaccaaccaatcagggaagaacgggtggctagatcctacccagcatagggctggccggccatgagtagttgcccagcataggactggctagccaaggtcagtctccctacctaggagtggccgaccatagccaacaaccaggatttgggttggtcggcctggagcataccctttctcagggtatggcctgccaagctttggtccatttagggctgtagcccatccaagaagggccaatcagccaggtccctgcagcatcagatccttctgtgcaagcgctgttggatcaaataagaggcatgatcaagggcctaggtggcctgaaaccttcagatcttgacttggataggataaggggttcaccatctcgacatacataaatgccttgcccttgcccaagttcaagatgccagtatggaaaatgtatatcggaagagaggacccaccaaggtcaaaggcctaatagaagaaggccgatatacaaccatacttgggggcatcctttcattgagtgacttctggaaagatatccagaggatctcaaccaataataatatgaaggagttccttgatagagctgacgactttatcaagatagaggaatctatcctacaagcccaaatagggcaagtcggtaataggtagtctcagggcgcccttgttgggttttatgccct

SEQ ID NO: 16600 - DNA, 3151 bp, Cannabis sativa
aaaaaaaaaaaaaaaactataattgttttacgacatgtcgtttcactgaagtttatacgatcgagaagtctttcctttttacattttttattttattttattttattttattttatttgtgtataagcaagatttcgaatttccacacagagcttcagttcaaaccctcttcatcttcttcctccagccatgaaatccttctctccttttctcgttacggcctcacttcttcttctcctgaccttatcacatcacaccaaagctgaagttataaccctaacacccgacaccttctctgacaaggtaaccaataacctaatttaattcttagatccatagcttttcaattatttccaatcaaattattttattcttcttctattactgcttgaataaatctttatattgtatttgtttctgattgttttgtgtgattgtgtattgtctgtagaggtctataggatttaatctgattctgattgtactgggttattactctttgttctgcatttattcttgtattaaagattagttcttgtttcattgtataatttaggtgaaggagaaagatacagcttggtttgttaaattctgtgttccatggtgtaaacattggtaagtttcactcctctttgacccacccagatgggtttttaagttcctatcaatacattataacactttttttattaatttgtactgatagatggttattggtattggtattgaattaaaatgataacagtaagaatctagggtccttgtgggaagaccttggaaagttaatggaaagtgaggatgaaattgaagttggggaagttgattgtgctacaagtaaatcagtgtgcacggaagctgatattcattcttatcccacgtttaaactattttatgatggagaagaagctgcaaaatatcaaggtaagactataaagatttgggataaggatcttattgatgttttatgtttaattctctttttgtgtacagggcttaggagcattcttttataacttaagtaggtagctagatagatgtcgtgttctcgctttagtgtgtttgcatattgcttgttctttgtgcttctggctttatgtgaaacttcaatgcttaataaaaggcaatatttgaaaacccttattcgattttgaacatttagcgaatatatatgttgtttaagcagttgagttgagggaagacttattcagttaggactctaatagaactttttattattgtacataggaagttttatcactatcattaagtatctgtttttggtttgatttattggatagttttgtattaaagccctatcttagaggatcacattatcaaccactcctgtcatgattagactgttaagatagaagtctagtttgttgtactcttaagtaagggacatttataagaaatggccttttaagctatatcgaaaaggaaccatgtaaaacaaccatagacatgaagtcatttttatgtttctgttattgaaatctgtctattaatgaaatgcagtgcttatatctccatattgaaacatacggcaaagcaacttctcctttccatttctgatttggtgaaacaatagatttattctggtatagacatctcagcttagtatcgcacatagttagtcatttagactagagaattttctcttattctctgggagagtggagtcgttccgataacataggcatgataaattacctttttatggagttcatgcacagaattagtagtggtgacaatgacaagattgtaacattgataataggagattgttattgataaatgatgataatgcgaaaatattgaatctgataatgtagttgtgccagcatgcttactttataatctgtaagtatttggttctatattttaaaaaaaaaatctaagcattgtatttcgctaaatgttttagaaagtgagatagaaatatatgatttaatttttttcctccatgcttaatgatcaggtcccaggaacgttgaatcgcttaaaacctttgttttagaagaagctgaaaaagcagctaccaaggcacatcttggacacgatgagttatgaaacttcttcaggtaggtacatctgtttatagcagaaacttttaaaataatttcgttctgaatctttgtcaaaatataatctcgagaatattgagttgtatttgaattttagttcaaacttaattttgagttatcttcacttactggccttgcagatcttatggatgatgatgctcgatttagacatctcggaacaatttttattttattgaatagtgatacgagcatgcaagcaaaaaaggctttgatcaaatttaacccatttaggtgtaatttgcactgatgtgtttcatcaacttgcacaaactatatagtgtattacttaatagcaattttgtttcaaatttaatcaatcgtgttttggagctgaagctgataacgtacaaaatgcttaatgctttcttgccttttcaatttcattcactattctgagtttgtgcaattgggttgtttgagctgtttttcgccttagatttttaagttagcaaccctaacaaagttttataatttcatgtacacaagttcacataacaaaattgatttctgaattatgttatgtttcaaaaacaagcaataaggtagttcattttcagtctgatctctcctcagttgacttaataattttccttataaaaaaaacacaattaataggtaaattttaaagagtaattaacatttactccgtgaattataacattattagattatatatatagcactttgatcaaatttttaaaaagtagagtgtattaactattaaggagcaaaattcaattttagaataacattttgcttaccaagttctataaatacttttgttccttagtaataagctaaatctttttttttagaataatgagaggattatttaaaaaagttctcttgccatagcaatttttcttattttaatgttttgaaagtaaatcttccatataattgaagaaatcaaaaacattttaataaaacattttacggataaaaaacccaaatataagattttacaaaaagacggccacatttatacagaactcacatttaaagtttcgaaacattacaaacataaatataagcgtacgaat

SEQ ID NO: 16601 - DNA, 7387 bp, Cannabis sativa
tatatatttatatttatatatacatcttgatcagtacaaatactatccataatcgtagttaagtttatttttgttttcttttcaggtacggaaaagtgttcacatcccatttgttcctttcaccaacggttgtgtcatgtgatgaagagctgaactattttattcttcagaatgaaggcaaactgtttgagtgtagttatccaaaatccatccatggaattttaggccagttctccatgttggtaactgctggtgacactcacaagaggctcagaaatgtggctctctcccttgtctccataaccaaatccaagcctgagtttctcaacgacattcagacaacggctattggtattcttcattcctggaaacacaaacgacatgtcgctttctctgaggaagccagaaaggtatctttatatctatcctatcatataatggattaattcatctcttagttttggtttgccttttcatttctgggttttgagttgctttaaaaattgtactctatatttgtttatttattttctttgcagttcacactcaatgtgattataaaacaagtgcttggtttgaccccagaagattcaaagacaacaaaaattcttgaagattttcgcactttcatgaaagggctcatatcacctcctctctatattcctggaactccttatgcaaaagctgttaaggtaaaatcattttcattttaagctgaaatacatattaaatggtgcataattcatgttagcctttgattgctaataaatatgtttaaataaagaaaagttaatctagctatatgaatggctttcttcttttctctttttgtgctgaaaataaaaaagaataaaaaatttaaagggcatgtgaacattgtctttacaggctagacataggatatcttcaactgtcaaagcaattataaaggaaagaagagcaagttcttatgatgatagttctatgaaaaggaagagtgatttccttgagatacttctaactgttgataccttatctgaagatgaaaaagtgagctttgttttggattctcttttgggtggctatgagaccacctctctcttattagctatggttgtttattttcttgctcaatcaccttctgcattagaacaactaaaggtaatgacttgaaaacaatttggcctaaaatctatctatactttatatagaacaagtaattaaatgatttaacttgcttctgaattatgttataggtagagcatgacagtattaggagcatgaagcagaaagatgagcatttgaactgggaagactacagaagaatggatttcacccagaaagtaggacaaagttttatatcacagtttccttaagtactcttacttgttttacttgtattataatggatggtttgactgtttatttataaggtcataaatgaagctcttcgattgggaaatattgtaaaatttgtgcaccgaaaggccataaaagatgtcagatataaaggtactacgcatacaaaaaagttgattagtataaataaatacaatacccctttgacaaaatctggactgcatgtttgtcaaaaaataaaaattaggactgcatgacttttctttttattatttgttaattctgtactgtttagcactttaggacctttattttataaaatactaaactaaagttttgcttttcttttcctatattattttttagattacctaattccctcagggtggaaggtcctacctatatttagtgcagttcacttagactcttctctccattcaaatgctcttaagtttgatcccaacagatgggaggtaatagtttcttctcttaatacaagtaattcccattaaattctggaattgatggtagtttcttctcttaatacaagaatatttataaaactacttttatgattaattgctaattataatccaccattaaattgaacatgcagagccaaaatcaagtatccaaaagatatactccctttgggggagggcctagatgttgtcctggttctgaacttggtaggcttgaagtggcatttttccttcatcaccttgtgcaaaatttcaggtaattcatcatactgaatgtttgatcttatgaaatctttatttccatgcgaagtaagttagaggtttaaatgagcataaacttacttcacatactcttcccactgaatattataaatatgtaattagaaaaattatgtgaaaaattgcactattttttggttttgtaggtggaaagttgaagatgatgaacaacctacagcctatccatatgtagaatttaagaaagagctggtcttatatttggaaagttgctcataatttggtcaattagtggattttaagatcttatttggtagtttgaggtggaaaaaattaccagttcgagagtttgactaaaaaaggggcatattggactaaataaaactcacacagttcagaaatcagaagccacagagcagcagatcatttctcttttccttcttcgaccacagctcaccctggtcaagaattaggcacccacctcaatattcttgggcagaaggaaggaacaagattttaatttccattacacaatacacagtgataggctgtttaatgtttggtttctgtatacgtttcttcttgtaaatgttttttttccctacttatattctttttttttatcaaaagctgaagttgtgtggtatcaagggattgggaataaagagtctgcttctgagtttcctttctaagtttaacattcagactccaaagccatagcataggttggcttttaggaattattaagagccgtttgtttctttttcttttgggtttcagctcatgatttttttatattattattatttcaaaggctctattgccccttaaagtgtaatgagcactatgaaacaatgtacaagtctctttaaattagaggcacttgacaatattggaagaatacatagaagaagagaaaaagtattgctaaattataagcaactaatatttctttccactttcaccaatcattattcttaagttgaatcagcctaaaagtaagcatttttgaagaataagaacatgcaattagctgcccaaaatggcatatttgttttaggcttccttcaccacaataggactcctaacatggtgcttaccatcagaccatatcaattctccaaacgcataatccttggctgccttaagttttttgagcatgagagtgactttaaacttcttctcttcaccaaccctcttgaacttcaagctttctggcttaacagaaactactactccggtggggtttttgattttcgctctgtaagttcctggtgtgccaacgtttttcaaggttcgagttacaatgattgatttagagaggttagggacagtgattgaagggtagttgaggttggtgagtgtaattttcttggagcatctgtaaggcttctctgaaaaagtttcaatttgtgttgcattgtaccccagtgaacatagaaagttgagatagtcattgacagttaagtcataaactagccctggatccatggcttggttcggctgaacatgtcctgctccgaaactgaatggagtagccatgatgttggaagcatttaacagtggctgcattctgttgtcttgagttcttgctgcgaaagacaatagcagataagagattcacaggagaactttcaggagcagattttcatttcttttgaaacaaaaaaactcaggcctttcatgtccactaatgtatgttagattaagactgtaaagcaatatattatagagaagtttctcacccgtggtcatgattgctgacttaattgctgcaggactccaatctggatggagggttttcagaaggccaacaatgccagaaatatgaggacaagacattgatgtgcctgatacagaattgaacgcaactcgcctcttgtcaaagattagattcgtcggcccttgtgcttcgctataggctgctatgatactcactcctggtgcagtgatatcaggctgcaagcaagtgcaaaccaaatttgatgattacccttaaaacaaaattaccagtttttctcttctaaatgtttttacttaggctggtagttttgatttttcagattccaatcaaataccagggaaagaataaaacaaaaccttaaggatttctggcgtaacagtattaggtccctttgatgaaaatgcagccatgaatggagctggttttgagcccaacttcgttctcgcaggtgtaatgtatcccttaggagacctgtaagaaacgttgacattgtactcttcatataaagcttataaaaaaccagacaataagaatgttgccactgtaaaatgaagctagaaccttgacaaaagagagtactgctagtgctagatcttaacatgttcctctctacatgttatgcatgatctttaagaataagtgaacttaagattttatttttctatcatgtctgtatctattggttcttgttattagtttgtcatcgtacttagttgatctaatgtaagcaaagaccatgaggccatcagaatatttgatgtgcgaagccggaaggacatgaggatcagcaatgacttcatttccggtcaactcattgttggcaagaaccatcccaactgcaccagcttgtaaggcttgttgacctttgtccactcttgcattttctcctctaaggcataccagaatctttccctttacttttctgggatcaagtgttccaggcttgcataaaatactgcattatttggttcaaaaagaaaattactaaaatcattcttagtcaaacataatcaaataacttcaacttattattgttctgttcttacgcgtcttcgtccaatgcattagctgctttagcatctacagcggtaacaagtctgtagaatttgccactttgcaaagctcttgttgataaactttgtccctttagaataaaacaaatgaaaccattagtcaatgttgtaatttagtctttggagatccatgtttgacaatgatcaatttctcaaatatcaaatcctcctattcttttttcctttacccctattgagctacataaagaaaatgtgttggtaaggtagtgtggcaacaaattttgttggtaaagcatcactctcttctttcttttcaaggaaccaaataagttctctttggacacaaatagaaaagcatggaaacaaaaatgttgaattgactttcttataagctttatgagtgctaaaagggacagataccaaccttgaagctcttcttattgccaagggtgacgtaggttggaaactccctatccatagtgctggcaccaacagtgatctcccatggtgcaatgttagacacagtgccatcggttgggccagagttcccagcagaacaaactaccacaataccacgcctgatagcgtggaacgatccaatggagacactgtcattgaaatatgccgttggagctcctccaagagagacagacaaaacgtccacaccatcatggatggctatgtcaaatgcagccaagatgtctgcatcaaagcactcgtttccatccactggaggccagcacaccttgtaagctgcaaccctggctttcggcgatccacctttggctgttccattgccaaaaccgaaaacacttgctttagggacaaagttaccgcctgcagttgataaggtatgagaaccatggccttcactgtctcttggtgagttaaaagaggagttaagtggaccagcaactgcagcataaccgttattgaagtaccttgctccaattagcttcctttgatagaagacaatataccacagttattaccaataagtttgctgtaatgctttgtacataagataagattttcaatatctatgtgaaatttaggcaagagggtagctgttacaccatagcagactgacgcttacataattgattcatttgattggacaacattcaccacttgtaaccaataatttctcatatatttgcagataaaggtaaaagtttactttgattagacaacattcaccacttctgagcaataatttgccgagtgatatttcgctaaaagacacaatcttaagttctatgtaaagtttaggcaaaaggttagccgttaaataatggcgaataagaaaatatggtgagataatttgcgaagtaagaattcaaatgagatcataaataatatattcgtactagaaaaaatgtggacaaaactatctacatttcaggctttatggtgtgcaattatacatgattttgagaaataagatttcttaacttgtgaaaaacctctatgaaaagcagttggagagaaaaaactaaggtgagagtataatgtcaaagcgaaatttgattgagattcagaaattgccaaatttgttttctcttgccctattaaaaagtgtacattaatatattcaagattttgctactgctaaatctttatgatgatgtaatggtcttccccaaagactacagtacaatgttaatagcaatggaaagatgaaaaaataaagatgttttgatctgaagaagaattgtgcttggctttttgatgtcttctttatgggctacaaaacaatcaaagagttggagtaacagtactgcattatgtagtcgaattttttaaaccagggtaggattaacttaatgggattcttttgttttatgttacatgacaactagctttgccattaatgcaatatatttaccatggtatggttgaaacaaatcaagggaacttcgtagtgaagctcaagaaataaactctagaaaacaaattaaaacactaatctagtctgacataagtattacctcatctctatggtcagacaaatccaaatggtggtgctttagatggacaacccatcccactccactatctaagtaaaacattaaatattcaccactttttatatcacaagtttcacaaatcaccatcaccaaagtttggacaaaggtttttgccagaatggaaagtaactttgtataataatttatcacatgggtattgcaccctatgtttcttaatcaccaaatgaaaagggttgtaagaccttgattctagtaaaatatccaagaaaaactaaagactaaaaaagggtaattggaaaagaaagataatgtggtaaaatagtggatacctgttgcagtgaaaagaagaatcaatgcctttttggcatattcctttccactttgagggaattggtcccaacttctcatcactaaagctcttagattcaggccatacacctagcaatagcaatagcaataacccaattgtgacaaacagtaagcaccagaaagttataccccaataaagcaatacatacatagcaacatataatcaatatcacaccacttcatcttccaaac

SEQ ID NO: 16602 - DNA, 8941 bp, Cannabis sativa
  modified_base (8869)..(8883): a, c, t, g, unknown or other
aaacaatataagagactatgaacccaagaatctaatcaatccggccttagaaaattagctggccagataataataatagtctaacatcaatatagtgtgctctctctctctgaaattacctcctaaatcacccacttttctgtactatacgatagatcctttgcatataaataccagaaacctttaatgggatttctaagtaacattacacattatttttcttttaaaatatatctcatggctaaaccaatatgggttcctctagtaattttttgcgtcatgtttatatttccattggcccaagcaaatgtcccagctattttcatactgggtgactcaactgctgatgttgggaccaacaatttcttgccacatagtggtaacagggcaaactttccctacaatgggatcgattttcctcaatcaatccccactggaaggtttagtaatggccttaacagtgctgattttcttggttagtgctagtaatagaaacttaccatatatttttttcatttaagatgtgaaaacgctttgtgtcgtttaatactagctcattaactctgtttttacatttctctatctgtttgttttttttaagccaagctactcggttatgagaaaagtccaccaccctttttgtctctcaactttaagtctcttctcaagaacttcacaggtgccaactttgcctctggtgggtctggcattcttgacataactggacaatcaaacgtaagaacaacattcttggagccctttttttggaaaggtcttcgagctcttttagattaatttatatatacatacatgattgatgggtgttttcttctaattttgtttttaggtaagcataacaaagcctggaaaaggtcaaagtccatcagattacttaaacaagaatcataagaatgtcatcccacttggagaacagataaggcaattttcctctgttaggcgcaaacttatcgctataaaaggtcgaaaagcagctatgaagtacatctccgagtctctgtacttcctcagcattggtagcaacgatatttttggttattttcattcacaaagttccatacccaagtctgagttcttgtccagtttaatattcgcttatcaaaagcacttaaaggttaattttattcacaaaacgtcatgtacttgtcatataaaagaagtttggcacttgaacttgacccaagtttgaactatgtaacatggcagagtttattgaacctcggagcgaaaaagtttggcattattagtgtccccccaattgggtgttgtccctctcagagagcttttaacgaaactggtgggggctgtttggaagaattgaaccaacattctgaagattttcatgtcatgttgggggctcttttaaacaaccttagctcagagtgtaaggacatgaaatactcacttggaaatgcatttgagatgacaatcaacataataaaaaacccaactccattcagtaagaacttcacctctaaacctctatattttcctgtttctttattcaatgacagtacttgaagctatatataatttgatatttcagatttcacggaagtaaaagctccatgttgtggagatggagaatccttttgtattccacatgctaagctttgtccgaatcggcacgaatacctgttctgggatttgtttcaccccacagaaactgcttctgaattagctgctgtaaccctttttagtggtcccccaagctttgtatatcctattaattttgctcaattggctgaggtttagaagacaaagcaaagaccttttgccttattaaaaggatcaattacttcccatttagtaaactactttataaagtagtaaaatatttgtgattgtgtcaataaatatgagtaaataaaaactgattctccgtcaaacttctggttggaattctcaagataactattatttggatcagttattcaaatttaagataacaaaaacacttgggattttttacttaagctaagtctagattccatgtacatacaatgtcctttcttcttaggagcttactaactctaataccattccagtgcaaaaacaattagtttcagaccatttttctaatattggttaatggtctaatgtttctgttagtactttatttcttttttcttcaaatcatttctatagatgactaaaaagtatttcaaacatgtctaatcatcttcggtatcactagtaacagagtcatcccttttccaaaggtctatttcacacttggaactaataccattcaagaactcgtccctttccctctgcatacttatccagtactctggctcctcaaataatcgtagtatctgcccaaatagaatgctagtgagttccatgtaagaagactgagcaaagtgagtaaaaatgatgattattactctgtcacatacaccaaaatatatgatcatagtcttaatcttactttaacttttagcgttcttattaagttgatagttgaaaagtggagagaaatgtgggacaataatgaaatgaatctgaaaactcaataatattatcataacagtcatgcttactgttttcatagtaggccttctagaggatgaatgcataaggcataggcgtgctgcgaccaccattagtttcatttcttccttgttgtagtcatcatgtagataaggatcaattaaacgatcacaaaggccatagctgagtaaggaccttgcctgcaagttcatgggggcattcatatacacacgtaaggattgaaactatgtaatgaatgatgtgagagcagagatatttcaaaaaaaacaaaaaggttgtacccaaaggactaaactttcatgagttgccctgtctgttttaatagcctctttgccagtgatgagttccaggagcacaactccatatgagtacacatctatcttttcgtcaaccttgccatacatcatgtactctggggccaagtatccaaaggttccaaccacggacactggctttgcatttgatgaagtttgatgagaatgacgaagtatcattgcggatccgaaatctgagagctaagaaaaccaaataccaaatatgtttttaagtcggggaagctttacccaagattatttttttagaatacttaaaaaccagtgtgaaacatcatcatagtattaacactctataatgaaccaaaataaaagagcgttaactgttaatgaaactacttgccatacttcagctgaggttatagctcaaatcaaaagaatgtgctactttgggccttctattttcgaatacttgacaccaatcttatgcccagtttccacatttcttctgtaagtatccatagaattagagacattgacctagtctatgtttggtgggagaaaggtaagataggaaggtaggcaggtaattacttaagaaacgaaagagaaaaaactaaaaccctctgcctcctttgatgggagggaatgaagtagacatttttctttcaaaatcattccagatttataaagactgaaatttgttaaaaatgagaatcccttctaagacaactatcctacctcagatagtatacatctaatcattcccaacttgttcctccaatccacttctctcactcttaaaaacaccacatattttgaaagatataaatgcaaaaaacatgtaacatatcaccactggccatgaatatgatcactactgagatctcattatctgtctgaccttataaaataacaactaataagtataaacaaacaacattttataaaccagaaaaaaacttacttgaggctcaaaatcatcagtgaggaggatattagaagacttaacatctctatgaatgatgggagggtcacaagaatgatgaagatagttaagagccttagctacaccaactgccacacgcatcctctgactccaatccaacattctcaaattctgtttcaagcttcctctcaagagttggtacacaagggcctgcaactccccacaatcacagtacccaattatctcaactatgttctcatgcttcaatctcgacaacaaatcaatctctcggagaagatcctcagctgcccatgtcgtcgttttgaggactttgaccgcagcagtttgtccatcttcaaaaatggctttgtaaactctgctttgaccaccttctccaatcaacattatggggttgaaattgttggtagcccaacgaagatcgcttaatgagaaatgcttgctgcaaccctctccctcgagtatggatagtctctgaaaaagcttctgagccattaagttgggaacaggatccggtgtcttgacatcactattgcatagtgctccagctagtcttttgctttgttgtaacaaaaacggtgtcgttgtggaaggagatggggcagtcaaggacttctgtaagcgacggtcagagaccattgaggactgagttctacctgtgtggctaggtgatgacaaggattgcctgagctgcacccttcgagagccttgttgggatgttccaggtctctggagtaggattcttcctacattgtttattaccaagagagtacatgttggtggcaatgctttcaggcaatagtttagagctgaaacattaggcctgtagaacaagtatgaaataaacgtttcataccaccatcacaatgtcaaaaacagattacatattcttgagaaagagactaagagagaataggagttagaactagtttcattaccctgaaatgctggatccaagggcaagaattgtggcgtaagtgagccttacttggtgggttaatacagaaatgtatgaatcgcctatgcaaaccttgacttggaagtcaacctgcaatgatacaccaatgatttagacctcagaaacaatattattttttcactgatcagaggattgaaagcaatctacctgcttggtcttgcatagatcttcatggatgtgaaaagtgtttggatcaaaagaatcatctgagtcttgaacatgaatggccaaaacactatcctctggcttaacaaccacagttagtaaccgaagtaatatctctctactgtaattatcagacttcaagccaacgatgatactcctcttctcgtgatctggcttggatctgaaagacaacctttggaggttaatccttgaacgtcccaccattctcaacaaaatggttagtattagtgttcagaaaccttctcattgcaccactgaataatgtcttgctgataactttcgagtgttggattctatctgcttccctgacttttgagacttttaacttttatgttattatgtgtttttaacatatttgtgcaccattgttgagctaacccaagtagaaattgggttagagaatttattggcagttggtaggaaataatggcatagttaagggcagttaatacaaaaacctgttaacataaatttgctgtataacaagagtggtttggtaacagtttttccatatttcgtgtacttcatgtgtgaccttttcacttttttttttaagtactgctctacaaattttctggtaagtaagaacgccttctcacgttaacttatttacttcagcggcaacgagcagtaatctaacgacttcactagtcattattcaatagtataataaagtttaaaaaaaaaactaataacaaaaggctgatgattatggtctagagattcccttgtattaacaactttcattctatttgtattataagcttaattagcattaacaaaccgtaggaaagacgagaggtatctatgaaaaagaaataacaaaataaaaaattcacctaaatgttcttaagcaaagtttatggggaaaagaaataacaaaattaagtaaatttctcattggtagatactaaaataacaaccattggtagacaataaaaacaaatacccacttgtcttggattcaaggtggaaagatcgatattgttaataagcagcattaaattctatagagaagaaatttcagcttcccccactggccactaccaaattaatggctcgaagagcaagggagatcattttggatatatagccatagttaccactaacatagacatttattatacccgtattgagtctgagtgctcctaaagtaactgcaaacgctcaaaaatttctaaaaccccacacaaagctataccgtgtagattgcactaagtaaaacagttgcaagccaatgaagttagaaagcataaatttcttcataaatgaaactacaacagcatcgagttaagtaaatgaagcacatttatgccgaataataggatagccactaatgtcttcaattccaaaaactcggcctatcttgagattgacacaatacaaacgttattttatttttaagttgaaaaatatcataaatccaaggtttaacaatctctttgtaatctagggtgattctactgcaatttgcaacaccatgaaagcgatctgtccctaatattagaaagaaaaaagagggaaacattatcttgttggttttggtaacaacactattcaccgcatatacaattttatacctcagtaaagtgtctctacagagtcaaagaccaaaagaaaaagaaaaaacaattcagcagtttctgaaaccttaatacaagaaagctaaagatatatagcaaacgaaagtggagaggatactattacttattgtatttcagatattattgagtggataaaccacatacattatgagagaaacgatacatatgttcaaacaacaaatgggtgagcctcattgaagtgcaatcatgattgaccataatccaggagaaagaccccttaatcgtcataaagtacaaacgtaattgtcatcactcagcaacctgcaaatgtaaaagacttttagtaagaaaagacagatcaacatgccaatgggaaggtggtatagaaaatctttgcttcaagaggggtaaaggctacatataatttgagatcagccaaaacaaaaaagaaaaagaaatgttcgactataaaccacgacagtttacaagcctacaaggataagtcttaatgtacctggttaaggggattgtcaggagatttcttccatagcttccatatcatatctttgtattgattgtgagtaaggcctggcttttcctccttcagcctggggagctcaacgtcctcaaaagcctattaatattacaggaaatcatcattagtggcatgtcaagatctactgtatatagtgtaaattgatattgggctcagacattaaaagaagcatactacatacaaataaatttcaaaacaacttgctaacacaaatttatcagcaatcatccaaaggaaaggaactgcaatcaatcggagagtcaacttgtaaccaactcacgtgtgagaatagtaaaacatccatcacaagaagtatcaagaacaattacaacaacaatttttgggtatgttgttactgtacaatactgaagtgatatcagcatcacccactagagctagagctacagacttcagtatacattccgttcaaaaaggatgtctacttatattacaaattacaaacttagacacacaattacaagtaagagacgggcttgctagcaccaataaaatggccgaaatcaagcagagagtacaacttaacattcacgtccataacaataaaatctctaatgctataccacaatcactggaggaaacatttaattcagcaagtggcaatagttaacataatggatttttaatttttcacacctaatttcacttctcttattcaaaatgttaattcagatatagatgaatatgacaatctgtactttcacaatgcgatttcaatacaaaagttaacgtcgaacaaagagtagtgatctctgagaaaatatcacaaccatgcaaaaagaacacaattcagtcaagagaactccacaaaattctaatgagtcgctaatgtcaaaaaaatgtagacaaaaaaaccacaaatcaaaatcaatagaagtgcaatgatagcaggaaggcgcacgcaccttaaacgaagccttgagccgcctctccggatggcgatcaggaggtaagctatcagcgacggtcatgtgagcaatggcatcctccaccgttctggcctcaattatagaatcgtcacgattcgtattcgtcacaaggaccatcctctcgtattcttcttcagcagcagtccggctatggcgcttcttcacttcctcgtcttttttgtgcagagccgcttgttcctcctcacggcggcgcctgagctccgcctcggtgaccttagggacagggatggagactctgttggccttcttatcaggcttcttcatcaacttctcgagctccttctcctcctgctcggccaagcggcgaacctctgcgcgacgcgcggcagcctcggctttcttctcggcttcttcctcccgcttcttggaggcgcgggacttggcgccctcggcttcgcgccagagctggtcctccttggaacgagcctctcgctccttgcggtccgtttcggcagcggtcttgcgagccctagcctcctcggctttactgttcacacccatcttcttcggcatcgtcgctcgccttcgatttaaaagcgacgaggacgatgatgttcacggtttatttgccttctctacacgatcggaaattcaggttcgaagttccgactgattagatgagaatatcggaatcgagatagttcaccactaacgagaaatttactggtgaaaactggctgtttgtttctcattaacgaaatggaccgactataactgggcccattctattgcaggcttacttttgggccaaaacaattataggcagggctatttacaaaaatatgggaaaataaagatagttttgatatatatgatacttaattatactaaatatggcatnnnnnnnnnnnnnnntacaaatatgggaaaaagtcatgaggaatgccataaaaaactttaaatttatgtttct

SEQ ID NO: 16603 - DNA, 9124 bp, Cannabis sativa
tataacttaaaagctctaactgtacaacttaaaactctcttgggataaataacagtttagtcaaactgaatggagtgagtgaaacaaccgaaactctctttttaaacctttagaagagttggaacccagtcacgggatcttaggaactttccttaatcatactttattgttttttatttttattttctcttattattattattattgcctatttattgagattttctttctttttttattttttttcatcaccttgctcctcttttgaactttggggaattgcaagttttgcttttgtttccttttttttttttccttttatgtttataaacccaatatttggtgttacctctgcatggattctaagctgtctatatataaagcttacacggggattcgattgatagcttattttttttctctaacttcgttaattctctgccattcagaatctggaggttttcttctttcttatctagtttataatacatatttagtggtgagaaccctcatcgcatcttatgtttgaactctggcacttgtatcaagaaattggtaaattacattttgagtgttagttgaattgggtttttgaaacttttcttcttatatatatttgtttctcaagtttctgaagatacatgacaataagtactttctcaatatcaaagaattgcagttccaatatattttggcacccatgcaatgtgtttgttgtttcgattgtgtgatgtgatatatgtacctatggtggggacttgttagatgtacctttcaattcattcaattttttttttttcttctgagtagtagtgggtccttttcttcacaatttaataacatgctttttctaatatctttttttatgaaattggattgatttcccttcagatttatggactcaaaattgaatgacgtaactgtgtttttcacttacccttttgcctatcttattgcttttactatggtaattctatatcagtatttatgtttccttctttcttgattgttatgattgttaataatgtaggagacgcagttgtactgttaagaagcatttgtgcttctaaattttggtatacaaggttcagtttcatagagagcttatgccagggaacaagtacgagattaattcaacctactcatctggtcgacatgaacgcctattgagagaaaggcaattgaaaaacagcaggagttctcaatcaaacgatgtaactactgagaataacattaagggggctcagtatattgaaaatgatgtctgtataacagaagatgatcattcgaaagttcccactcttggacagtaccctgaaggggatactactgcaacggctaataattatgaacggtgtggaaagccagacagaaagccagctagacagcggttattggtggttgctaacaggttaccggtctctgctgtcaggaaaggtgaagatgtatggcatttagagattagtgctgggggtttagtcagtgctcttctgggtatgcaatttttaatcttcatattatggattgtttggtctatttatatatttcaaattttcacaatttactttgtgtgtttctctctgttacttgttttctttcccctgtcattttatttcttagttttgtacatttattttggctgtgttataggtgtgaaggagtttgaggcaaggtggatcggttgggctggtgtaaatgtgccagatacagttggacagaatgctcttactaagtctctagcggaaaaggttagctttctactcttgacatagaatcttttggacttgttaggaatgcagcttcgatttcttgcttcatgcaacctaagttcttggacagaactctaacaccagtaaccaaccaagaaaacagagtaacaacaattaacttgtaaaagtgtattgaatcttattaatgaactgagattgtatttacatatatacacaagtgtctattaaagaataggctagctaaactaggattatctaatgcgttatatataacggcattagttagttacaatggtaaggaaagctaactaactcttatgacacatagacagttaggaaaataattgtcaaccgccaacagtaaatgataactatcccacaggactgtttaatgctactgtcctcaaattctgggttgattgcttatgtttatctatttcttctttacagagatgtattccagtatttcttgatgaagagattgttcatcaatattataatggctactgtaataacattttatggccactttttcattaccttggacttccacaagaagatcggcttgctaccaccaggagtttccagtctcagtttgctgcatataagaaggcaaatcaaatgtttgctgatgtggttaaccagcattatgaagagggtgatgttgtttggtgccatgattaccatctcatgtttctacctaaatgcttgaaagaatacaacccttcaatgaaagtgggttggtttctacataccccttttccttcatctgaaattcacaggaccttgccatctcgatcagagctgttgcgctcagttcttgctgcagatttagttgggtacgttgtgaaacgagcagcacttactgaataatattatgtgatttttgtttaattgttttcaagaaccagtcttttatagtcagctggagtggaataaataggtagcttgcatagcatgtgcaaacatgcttcacgtattatatgatgtttttctatttgtctgtttgttgctttcttcattttaagtgtttggattctataaaattctgagcatgttatttatgtattaatcttcaattttccagttttcatacatatgactatgcacgtcatttcgtaagtgcttgtactcgtattcttggattggagggtactcctgagggagttgaggatcaagggaggcttactcgagtagctgcagtaagttgaaattacatgccccttatttttatttaaagttgaaagcatattacataatgccaacttgtttatctgattcctctgtttaaatttcagtgtcccattggtatagattcagatcgctttatacgtgcacttgagcttcctcaagtccaagaacacattagggaacttaaagaaagattttctgggcggaaggtaaataatttatctgattgtaacagtttcctatgagctgaattttttggatagctggtcccttatatgctatgaggcctagtttataaaagtatcacgtacaagttgtccctgtctaattacctcatcccacacactaaacaaacttatgacttgtttggttcttttattgattagctataaaaatattctgtcctcatcttccttgtgacaaattcctatttatgttattgctcttttagagttctattattagtagattagtatatttcattttatatctgatgatatatcttgtgttttataaaagtttcttatgtgaagcatttgacatgacaggtaatgttaggtgttgatcgccttgatatgattaaaggaattcctcagaagatattggccttcgaaaagttcctagaggaaaaccctacttggcgtgacaaagtagttttgttgcaaattgctgtgccaacaagaacagatgttccagagtgtatacttctgtctaaacttgcattgcttcttgttgtgtttgtctgatttgcaaatagttttcctttttgtgtttcacaattactttttgtttccttaatttattgtatttgaattccttatgttagacccttagtagtttaatgtatttgatgtctaaatttgagctaagttctaggtgacttctgattgtagcttggggtagatgcagaatagtgttatattttgtctctccattgtattactgccattgcttttaaataattgactcagtctataatgtttaagataaatttatacatagctgtttttttttttttgcagagttagataagttaatgtgtttgagcaagttacttgaattctaagagcattttgtttgttttcttgttaaatttgacttatcaatgtttcatattgcattttcacagatcaaaaactcacaagccaggtccatgaaattgttggacgaattaacggcagatttggaacattgacagctgttccaatacaccacttggtttgtttaaggcccttttaatcagttatttcttaatgaatggacaattcacatctcactatattattttgtgtaattgttattttgacaagtgtatatactgacctgtagcttatcattgttagatctagccttacttctagacaagtggttctatatttctaatggtagaggtttagcttgtctgagtgtggagctttgtgtagatcacatcagggatacatttatgtggttcttgatgagtctgatgcttttatttctctacaggatcgatctcttgatttccatgctttatgtgcgctatacgctgtcacaggtacaatgttttattttccttttagtctgctcttgcttatttttcactctgcaattattttgtattggactttgaaatttccctcccttattagaaagaaatgatgcattgcagtattgttacttaattagctatcagtttctatggatttaaaaaatctctatgtatattgttgcaaagaaactctgagaatgaaagaccaagtgctactataaatgaatttagtgaattttaagttccccattttagtataaaggaaactgttcaagtccacattttatgtgttcaagcagtctcacctgcatccacccattttatctttttcagatgtagcactagtcacatctttaagggatggtatgaatcttgtcagttatgagtttgtagcttgccaagatgcaaagaaaggagttctgattcttagtgaggtaataataatatcctacagtaaaaattgtttggagagttaagattgtgaggttagctggagttgttgattgtagagatccaacttttgatacttgagatttattttgcagtttgctggtgctgcacagtctctaggtgcaggagccattctagtaaacccatggaacatcactgaggttgctaatgcaattggccaagctttggatatggagcctgaggccagagagaagcgacataatcataactttttgcatgtgactacacacactgcacaagaatgggctgagacttttgtgaggtatgcatgcataagttgtataacattgcctggtgtcataaatatgaaaataagatactgtaaaacatttaactcctgctttaaatgcattctgttagtgttataattgatgagcaatcatatttgaaggcatgaacagaagctctccatagcatgcaaaactatttgtgaattttatacaaagaaatgaagggagtagtgttattccatgaattttgttattatctggcaaaatgcacggcggcacatttggttcaagtcaactatttttagttaaccacctggaattattgtgctttaatgacactgaagtacaagtcttgcctatgagtaataaatagacaactagactaaatgatatttgtttcctgattttatttgttctagaaatcgattccatagttttgtgaagaaatgaatggactgtataatgaaatttggcatttgttcagtgaactaaatgatactgtggttgaagcggaaatacggactcgagaagctaaaccctcttttcctaacaatgatgcaattgatggctatttgcactctaataatcgattgatcatactggtatgctttttatatgaaacttcacactagtggaaattgttactcttttctatatctatagtatgtagtttactagttataaattgttttggagataatttatttacttttgtatacggttgaagccaaagaccttgatcagttgtgctgtccattcttgttcaattctgtctacaaggatagcagtttctttggaaaaagctgccctgtctactaaaagagacatgctgcaaattagttattttttcattataaattatttccattttaaattcttttgtgtcttttgttccagggattcaatgcaacattaaccgaacctgtggacacaccgggacgaaggggtgatcaaattaaagaaatggacgttaaattgcatccagagttgaaggcaccattaagggcactttgcaatgatcctaaaacaacagttgttgtccttagcgggagtgacagaactgtcttagatgaggtattactctcatgttttctcttcaatagtatctctcctcagcttttcaatcttctcttctaatacatttatttgctcagaacttcaaggagttcgacatgtggttggcagctgagaacggaatgtttttacggcatactaagggtgattggatgacaacaatgcctgagcacttgactatggagtgggtcgagagtgtgaaggtcttcctttaaaaatctgaaatttggtgctatactacttagcttttgtcatcctcaccctaagctcatattgttgtttctctttcaccagcatgtctttgagtatttcacagagagaacacccaggtcccacttttaccaacgtgaaacttcccttgtatggaactacaaatatgcaggtatcataatttctggacgttttctcttaataaactcatcttttttttccctattagtattgactttgtcgccatgtgaatgttctagatggtgaattcggacgattgcaagcaagagatatgctgcagcatctatggacgggtcctatttctaatgcatctgttgatgttgttcaaggcagccgttctgttgaggtgcgagcggttggtgtcacaaaggtcagtggctgtttctcagtacttaaaacttataatatgttcttatcaaaacaagcttagtgcttactatattttatttataaataattagggtgcagcaattgaccgtatattgggagagatagtccatagtaaatgcatgacaacacccatagattatgtcctatgtaccggccactttcttggaaaggtaaaactttctttctcaactcatgatatgaataatcagttatgttcaaattatattcacataaattcaatggtgtctacttgattaggatgaagatgtgtacaccttttttgagccagtgcttccattagattctcttggtcttacaagaagcaaaggaagtgagggtcataagcaatcttgtgagaggagatcttctaccaaggctaccggaactaagaatgggacaaaatcaccacaaatcaagacccaaaaactttcatcaaatggtccaaatcaagagaagaaaaatgccaacaataatcacaaaccaccacaagacaagggttcgtggaatgtacttgatctcaaggtggagaattacttctcttgtgctgttgggaggaaaggaacaaatgctaggtatcaacttgcctcctcagacgatgtggtctcgtttcttaagcaaatggctgattcaatgatgtgaatgcgatgatatgcatgcccacaagttttaaattattattttttatctcttgatatttaccattctttagtactattttttattagagaaatgctaaagggcatcaatgggcctagttagtattgttattggtccaactaagtatcagatctctcatagtttaatataatagtttttagggagtatcgctagccactggtgtctaatagcaatgcttttttttattaatatttttaagcttacgagttacgacttgttttagttggtaatagacttgttttagttggatactattacttcggttattgattttaacaatagctgctcaataattataggctgtcaaacggttttgactcctcaatgttgaatttagagagtcaatcctattaattttgttgctgagttatcttttactgaagtttactttttaatgttattaagaacttacccactgcattaatcttctacctttaacatgaaaaactgtaaataataaaaatgatatcgcttagactaataccatataaactaaaagttcagcaattctggatgttgatgatgcataggtattaggtagtgtcgtacagactaagttgattaatcttcttttgctttattagttggccttgtattctcgatgtgtgccaaattcatttaactaacaaattcttgccttcaaatttagaaaaatgcaaattgaaatagaattcttatataacaattcatgtggaattttataataaaaattactaataaataatcaaatcaaagctccctttaggtaccttgatgcctagaatatggatgaaaattgccgaaaagtaattcaggaggcctggcaacatgagtttcacggctatcacaactttgtgctttgctctaaacttcggtgtacggcttcggctttgagcaaatggaacaaagagtgctttgggatatgtagaaagaaattggaccttctggagaatctgctttccgaggttcaatctcggaccccttccctggagaatgatcaacttgagtgtgctttgctcttggaaattgatgaaatcgagattagacaagaggctatttggaaacagaagtcccgtgaattgtggttcaaagagggggtcgtaactcccgttttttccacacatccattattgttcgaaggaagaagaatttcatctgggccgtttcggaggatggtgaccactggattgaggaaagggatcttgtggtggagtactttagatcaaagttcattgattcctattctacgacgaacccggtggttagtgatgatttatttaatttaatatccccctgtatttttgatcttgagaaccatgctttggtcgatataccttcggatgaggagatcaaaagaacggtttgggctatgccccctttgaagtcgccagggccggacggtttcccagctaaattctacagaactcattgggatatagtggggaaacaaaccgtggattttgttcaggaattctttcgatcgggcaaatttactaaggaagtcaatcgtactttcactgttctgattcccaagcgaagtaatgcgaggaagtttgatgactaccggcctattagcttatgtaatgtaagctataagatagtggctaatatcttttcaaacc

SEQ ID NO: 16604 - DNA, 4341 bp, Cannabis sativa
taatagaatcttgggttttcaaaaattacaattgcagaatcttataccaaagtctgtcaacgtgaacaagaacaaaaaaaagtaccatagaagatatctttaattgccaaaaaaaaaggaaatagtaataaaggcaaacacgataaaaggtattggttgcaataaaaagttggttaagctaagagggctttggcataattaccttagcactagttaatgataagtatgtcatattcaagccaagtaattacaatccatcaaataatcatggccaaaaattatgacagaccatacaaaaggtcaacgttaaagttgattgaataaaaatagctgtttaaactaaaatataaagaagcagtaacattaagaatggttgtttgcaaatgcaaacactaaccaagctgagcataaatttgatggatctgatatacatatgaaagtttcaaaaccttcggtaacagcttacaatgatatacatatgaatttgattgccaaaaaatacaacaaaagttaaaaaatcctagtctcaacgatttatcatagtacggaattcctagcagtgtataagcaacatatgcaccttaacaaaaaaattgtatgtcatggttttttgttaaatgaatggaagatacataccaatgacaactgctttgataactgatattctgactcaagaaccttgaactttggttcctgcagagctttaagaagttcactgaagcaaaaattttttgatggaagattctcagaatcaaattctgatattatgttatcttgacaaagctcattatagattttctacaacaaaagaaatagaaaaaaaatgttagagatccaactgttcaaagagagaagagagattcaaagtgttatttaattatctaaacttattcatgataaatcattattagaaaaagaaaaaaaaaagagttgcaaaagtaggtattatcttaagacacccaataagagggaataatcatagattactacattaatgaaactcattgaacttcaacctctttcctgcattttacattctaaaaatatttgatattaaacactctaatttctaaataaaaaacaaaaaaaacaaaaacaaaagaaataaaacaaataccaacctcgatctcctcatcacaagcttccaggtttgcttcttcaccaggaggagtagcactgctttgagctttctaaaacaaataacatatatttaacaagttagaattggtaccaaagttgcaaagaagaacaagattataggaggttcaccaacctttaaattttcaaagtggcttaatgcagcaacacgtgagtaatccttcaatttgttatagaaatcaacaaaatccttaagttgtaacttggtataagatttgcttggtaaatcttcaacatgagttgcaaaagtttggttttgatcttgggtatccaaaacagcatccttaaattcccaagcatcatcatcaaaatcgtcgtcattgttgaggatatcagattccaacggtctaagggaaacaggcattccattttcacttacttctggtgtatcactgacagaagtgttttcagcagcttgaatatataaacttgatatcaaatcattgatagataaattagaaccaagagctttattactattataactaggataagatgttggtttttgcatcaaaacatcttttggaaattgggaagaatcattctccagttcttcatcaccaaaaatggacagcggcaaggcttcgtgactctttagcttgacttcattcttctgaataataacaagagcagttaaaatactgacaaagagaaagtgcatccataataaataaaaggcacaaaacactatcacagtacaatttgcggacctaaaatcataataatcacagttcaaagctagagaaagaaaattagatatacatatactttatacatgtattttaaaagtttaaagagaaagagacaactttcagatgtacataattgggtgttgtattttttgattaagtacagttggcatataccaaaaaatttcatgagaaagctcgccgactactcttcaattctatagttaataataattaaaaatgacacaacacgttacctgatttgcaccattaaaaacaggtggaatcatattagcagtatgatcaggaccaaacactgaatctccctacaatttaatttaaatttgagtaagtaggtcatttaaaagcattggcattgacaataaaataaagataaataatgaagtccaactgttgagtcacctcaagctttgacacagtttctgaagaggcatcttgaaagtcccaatcattgtcatcacactcatcattcttatcatctgcagaagagcaagctccatttcccatatcatttttcatgctactagaatgtaaatttggtataatactatcttcaattgcagaacttgaggtgaaagtagactcaaagtcccatcccccagttttgggtaaagcctcagatacagaaaaaaaatcaatagtgccatcagcaccatgtccatttaatgcttgtcctcccaaatctgctggattagcaaccttcgcagcttcctacaacaaaaatgtaatcacaaaacaaatgttcttaaactatataacaaatcaaacaaaaaatgaaggaaacctcgtaaataactcaccaacttaggctctggtccaacttcagaaaatgcatccctaaattgccaaaagttttcattagaatttccccgttcaccaactgtaggaaactttgatccaatctccatatgattcttctcacttgtagatggtgaatcccataaaaaatcatttggagaggcaaaacttggattgaaatcaaacaatgaattatcagctttatgaggcttatcactgagctgagtaagcatatcaacatgaccaaatgcaccattgttaaactctactgcagtaatggattcctcaacatttaaccgtcctccatcgtcaacctttcaaatttgaagtagtcagactcgcgagactaaacagaaatatttgttcctaggcacttaaacagaaatatttgttcctaggcacttaatctaaaggtacaaattaacttacaggaaaattgaaattatatgatacaaacatgaagcatgaacccgtttcaaaaaaaaaaaaacacatgaagcatgaacataaagtatgtagacttatcaaatcatagaaatcattctatgggttgaaacaaggcccaaaatatggacaattttgtattgtctaatagttttatatcgaaagtataacaattaaacaatacccgccttaaattcccggtcattctccatagctgcttccaccttcggctgtgccatttcaacaacccgttgttcctgatacaaaaacaccaaaggaaatcaattaaacccaatttttcaccgatttaatgcttctgataaaatcatcaagatcttaactttactagcacctaatccaagtcaatacgaatcatatcaaagccaaaacaattagaaacaagaatcactaatttctttccattcctgagattcttatcatccaaaagtaggaaatcatctagtaaaaatttataaggatctccaatttggcacaaaattctcattcctcacctgtttgttagcatcagcgcctttgaattcccaaccatcatcgtcatcttcatcaacatcatcaatattatcaccctcttctaccaaatccgaactcagcccattggaattgaacttcccgctaccaatattagaatctaatttatttgatgagttcggatccgtatcgtgaaaaacggaatccaatccattaggttgccaattaaacgaattagttttcgataccaggccttcaacattcatactagatttcgttgtcgccccatccgaaattgaattcggatgcgatccattttcaaccttgatccgcggactctgactatacaaattcgcaattaaatcattaatacccactcccccattcagaaccaaaccttttctgtcacaatcatctttcttatgaaagaacgaggctgcaccatcaccaaccgtaggctgagctgcagcagaattattgtcttcctcctcagtctccccaaacaacgataacggaatagctccctgaggtttaacccactgaaccttcgccaactcggctccactaggcaccgattcaacccgagacatcgtagattcattaccatccactgaattcccaaaaaggtccaaggggttttggttctgggaaggactaaaagacgaatgaacggctgttccattggagaactcaaatccaccattgatctgattagaaggggtggttacgaagtcgccccaat

SEQ ID NO: 16605 - DNA, 5290 bp, Cannabis sativa
tttattggcaaaacaagcttggcggttgttggcaaacccgaattctcttcttggtagactgcttaaaagtcgatactttccacacaatgatttccttcatgctcatcatggtcacaacccatctttaacttggcaaggaattatatggggtagagagttactaattagagggctacggtggaaagttggagaagggagacttgttcatatctccactgatccgtggattccagggttggatacttttaccccccttctttacactggcccgagtgatggtatggtctcccaattaataactgatgaacgccaatggaatgtacctcttctcaatgaatggttttcaccactggatgtggatcgtatattactatactacccatcagtttttttcagagtaatgatacttttggcactacaatactacgtacatacactgtcaatcgggttatcaccttgcctcatcgattgcggatgctgaaactgctcttggctcaagttccaactctcaagcagcctggtggaagcttttttggggcttaaaacttccacaaaaagtaaagatttttgcttggcgtgtgattcataatgcactaccagttgctaccttgttagtcagacgaaagattatcacggattcaacatgctcggtttgtaaatctgcctgggaatctataggccacgccttgttcagctgtcgatatgccaaagctgtctggcgaaatatgaatttgttcttcgactggaatcgggcttcatcaatgtacaaaggtgactacttggtgcatctatcaaccgtatacacgcagcatgaaatggaacttatcttttgtactctttggtctatctggaccgaaagaaatcgcattgtccatggttccaaggccaaaccagcagctgttcttgctgcatttgctgacaactacttgacaaacttcaaagctgcaaggaacaaatatcatgttgctgatcctctctttcatcaccacccgagaccacctgaagcatctcctccatggcaaccgcctgctgctggtgaattgaaattaaatgtggatgccgcggttgatgctaatcgtaaaattactggtattggggctgttgttcgtgattctgcaggggttgttcgggctgccttagccaaaccaataattggtaactttgcttctcatgaaatggaagctaaggctcttttctatagtctcaattgggttttacagcttcaaatgccaattactattgtggagacagatgctcttcttgttgccaatgctatccgaagtggctcctcagctattactgcctatagtgatttaataattgatgtaactagtcttttatcctttttccctcaagtgaatgttgtacatgctaaacgttcagccaatatggttgcgcatactttagctaagttcgctttaggggtggatgggacttgctcatggttggaggatttacctccttctttttactctgttattgtaaatgacattccaatttaatttataataacaggtatcttttcctcaaaaaaaaaaaaaatagactcttaatatttttgtaaatttatctttcacgttacttttgtgttttaataaattatttttaaaaagctttcatctttttttttttccttaatattttaagatatattttatattgattagaagataagaagaaatagatatttattctttttgtttgaaaaaaattattataaagttaatttctatataaagaaaagttcaaaagctattaaataaaaataataataattaataagtgagtgaagaaggagctaaagctgaaccaaccaacgacaacgagcgcttactctgtttccgccattagtagagacttcagagcttaatggaagacccaacttcccacttcctcaacgaccgtatcaagctcaacgtcggcggtaagctcttcgagactaccgtttccactctccgctccggtgaacaagactctctcttatctgtcctttccaaccgcccaactcccgaccccaatcccattttcattgaccgcgacccggcgatcttctccgttctactctctcttctccgatcgaaccgtctaccttctacggctcgtcgcttctccaaacaggaactcgccgatgaagctctctattacggaatcgaatcgcagctcaagtctgccatgtctccccctcccttagatggaatcgatgcttcagtcgtttccactgtgcgtcccgcttccgagggtatcgcatcagcctttaccactgtagtcgatgatggatcgctttggattgcccatggcggccagatttcgagctacgattggaatctgatccatacggcaacaattcgaacgcatttggaacacgtgacctcgatttcccgagtttactcggaactcgcagtgttagggtctgagaccgccgcgggactccatttctacgatttctccggaggccgaaacgtcggttccgtccactggagggacccgaccgatccgcgtatattcaaagcgcgcgtgagtgcaatcgccaactcgccgagctcaattttcgcttctttccattgtcctcataaagagaattcaatcctcgtgatcgataagtcaacgcttcaaatacagtccgagcttggacgtcagtccggtagctcggcaaagaatttggttcccggaaagctgacgtggctgccggaaactggtattgtctttgcaagttctgtaacctgtggagcatttgggttttctgggtacattagattgtgggatccgaggtctgggaacgtggtttgggagacgaacgagccaggttcggggcgaagcgggaggtttggtgacccatttgccgatgtaggagtcgatgtagaggattcgacattgttcaaggtctgttccaagtcgggagatttggcaatggcggatttgcgtagtttaaaagaggatccatggatatacttgcaagacaacaacccaagcttgaggactactactgcacttggtaacattgtgctacactgttataacaagcaagtttttgttggaagagatggtggtttagaggtttggtccaaagttcccaacagtaaaaatgcagccatggaaaaagaaagtggggtttgtgaaggattgtatagaaggaactatatggataaagtggaggattctgagagaggggtcattgagaaaattgaaggtggaggtcaaaggttgtttctttgcagacaagatgttgaaggcattgaagtgtgggaaagctcaaattcttccactgttgtgtcacttctttgagcttttttcatttggtatgattcctgaatagacttttttttttgcttcaagttggtgttgttgctgttaactttgacaccttattgtctatagtgtaataatggaaactctcgaaacttaatatgactaaaatgaaaacacctttttctacacgtttccttaatttatggatttaatgttacagctcgagaatgcttaagaataatgtatgtaactttgtgcatatttataaattgtaactttttaggaaatttaatgtttcggtctcctttttccagttagcatgatgaatttcaattttgagaaatttggttggacttggatgctaattttagaaccgatcttagaaccagtcatatgtcattttcttccttttaattgaatgtggcattcattttgttcagggcctaattttcattaggaagtggaagagaggcttgagtttggatctgcgaagtttgaggtattgcttctcttcaatttatgcagtgtgtttagtatttatgataaattgcattgcactacaagccaatatagtaaatataatcagacttttacgacttttacctttgtataccatttactgcatataatgctagtcagaaactaatgtacttgtaaaagattaaaaaaattcgagtcctttcccgaccaagaaaaaaatgctgtacattctgagaagtaaaagcaatgtctgctatattgatcaatatcattgttcaacaactaggctgcatttgtgcatttgtgcctctctgtatctttgtttggcgagggtacgacttacatttgacaagtggctcatggctttcactccttggaaaaatattttgtggatgctaaatggaagtagtatttgagcacaagtttactttatgtactgattaagttgtatgctgattgtaggtagtaaaggtaactaaatttttaggaaagaattgaaagaatggtgattaaattcatgaatggaacatgtgtagacgcttatttttttgtttatacatgtggtaactcttactgcagcattttcagaatctctcgagttaaaatcaagcttaaattttggtcagccagtggcccagcttccatatttgctcttgccccatctgagccagattttcttacagcctccttctccagactgactctcaagaataaatcaccttcatgggaactcgtgaacacattgatagctgtggaagccaatggaaaccaaggaatcataaaaaaaaacaatcaagaatgcaaaggcccaccccagatcttaggcttcctccttaacagtcaatttgtagccatatctagattgtcaacatatctgatccaaccatcatttttgattgtcagcagaaccagttgatcatcctatgattagtaccacaaaaatgttgtaaatttgctcaaatgagattctgatgtatcgccaaagacgggatcacctcagtactaaagtggatgcgtcgtgagttcacaggcaatgtgatgaagtaggagcttgttcaatgagactagctaacagatcagtactatcaatgtaattagtcaaatcaaattcatctccattactaccgaaaattgagtattggtatggatgtgattgtttgtggttgtgctgctacttcaggaaagaacattgtggctgctagtaggcagtacacttatactgaacttcattggagccaatcccactcggtgttgttcacctcctcccccatcatagcagcctctcaaatctggaaaatgtagaagaagaagagcaaagatactgatattgataccttgatactgatattcaggcttcttgttggtgtagggtaaaagagtaaaattcctacaaaaaaaaaaatctatattatcactcaatcaattaaatcttaaatatgacttttttccattgactactactggtgactaataatttatccttctcaattttaagagataattacataacactatctttttaaaaaaaatattatttttttaaaaaaattatatttttacattt

SEQ ID NO: 16606 - DNA, 9529 bp, Cannabis sativa
  modified_base (2170)..(2182): a, c, t, g, unknown or other
  modified_base (9488)..(9488): a, c, t, g, unknown or other
atttaattaataaaatattttttttatataaaagtagtaaacgtgattaattttaactgctaatgacccacgatcgaagtaacgttcttctgaccgtttttatttgatcgacttaacatttatttatgtagtatcctatcaacgacaaaatacatctcttcaacaacaaaaattctctttttttcaaaatctttacgatttctcaaagcaaacatattttggtatcgttcgatgcaaaatgatttgtatatgactattttatttaggggatgccgtgattgatagactgctttgcacatttcgagcaaagctgtaaaaagtcttaaagagaacgacatagtctgcgactcaactagaaacatcattcataatttgttctaatttatttaattttcaaataacaccgttcctctacgaaaaaatgtaaaatgaaagtaaaaccaccactatattttcgaatcaaaattccctcaaaaatgtgttctcatataatacaaaagaaacattttttttaaagtataaattcagaaagaaaatttgaccttattatctttttaattagtgagagaaatattgtggaagagtctaagaccacaccttttattgtcttcttgattcatcgtgttttcatgtccactgcatttctcattattaaaccatcacattatttaactcttttattttatttataaaagtggataattattcgtggattagagagtttagaagaaaagaaaaagccttataaatagaaaaacgaatggacccaaaccgcctcacttgagcgacccaggaagccacccaacccataacgtggactattgtcatcctcataaacacttcgcctgggtcccacactctctctctctcggaccagtccctccctcaacaccagacactcgcagagagaagagaacagagtttgattttgagcgagaactaaagctccacctccaaccctactttagacagagaaacagcgtaattagactaatgatggaggagagttcaactggggcgctggtcccggcggtgaagtcggagcttccttccatgtcgatctccggcgccgcttcgctggatccccgagccgagacgggcgggaacgccgctggagttccggcggaactcgataaggattttctttgtccgatttgtatgcagatgattaaggacgcatttcttacggcttgtggacatagcttttgttacatgtgtatcatcactcaccttcgtaacaagaacgattgcccttgttgcgctctatacctcaccacgaagcagctcttccccaatttcttgctcgacaaggttcacttctgccatagtttttgccctttttaatttttttttccacgcttttctattttcgtctagactgttataattgatctttgttttattttgattaaaaaaaatggaattgagatgactgccctaaattctttgaattgaaatcaatctttctgtttcttggaacataaaatgaacttctttgcttgataatgaaacgacagcttatttgttactgttttttcatttttgtagctacttaagaaaacttgtgctagtcaaatatcgaagacagcatccccagtggagcattttcgtcagtcgttacaacaggtgctcggtcgcattgacgactcgtgattttgctgttaattatggcctaacatgtcaatgtcgattctcattttcatagtgttttgatggttagacagggttgtgaagtgtctatcaaggagcttgaagttctcttggcactcctagctgataaaaagaggaaaatggaacaagaggaagctgagagaaacatgcaaattttgctcgactttttgagtgtcttaaggaagcaaaaagtggatgagctcaacgaggtttgtagttgctgatgttatatgttgtgttaaccgtgtctgcctatttattgctaatcatcttcttaaccacttttgcctttttctaagctataatgtaatggttacgttggcactttattctgcacagttcatctagttagtaggctgcaagagatggaaaaccaacagttctgtctaacaagtatttgtgctttcgttttactggaatttgctaaaatgtttatgcttctgttgaataaattggaataattaataaatgagttaattattaagagttagtcccacannnnnnnnnnnnngaaataaattgtgatatatatgatgaatgagctactccttccatagccaattagttttgagatggaacctcattcatcttatccccaaattctaacattaatcaaattctgtttatattttgcaggtgcaaactgatctccagtttattaaagacgacataagctctgtcgaaagacataggatggatttgtatcgtgctagagataggtattccctaaagctccgggcagttggagatgattcaagtgcaagaaaatcatggccttctttgattgaacagaataccagtggtcctgtgtccagttcttttaatttacgtggtgtaatgtcttctggaaatcatcaaactaagaaagctgatggatggggtcaaataaattcctctggactccagagaaaagattcagtgagtggatcagattcacagtatgctaattcatcagggctagctgtagttaggaaaaagcgagtccatgcacaggttagtcaatttacagcgccttattctgggatttcatgcttgctttgtccttggtaattgtgcgtgatacttattaatatatttttccttaaacttgaaaatagccggtggtgagaatggtacagtgggatttatatatatatttttaactattggtttcttttcaaagtagagctgtacaaatatcatttaaacgtgtcttcactttctatacaataaatatgtatctgggctgattgggtttaattacaagtgtctgcttagtgttcacatcaatgaatattacaatgaatcatgtggctcaaaactaactataccattgatttaatttttcctttatgccttgattttctttctttctctctctctttctctctctaattaagaaacagttagtagctttcatttgttaaattagctcagccagggtagaacctagactgttttcacacaacacacacccaaccactcaagctaggctcaagtggctagatttttttctcatctctacacttgctgcagtttaaagacttgcaagagtgttacctgcaaaagcgacgtcaattggcgaaccgattgaataattcacaagaaagggataaaaatgccatactcagagatggttacaatgcaggtcttgcaaattttcaatcagtattgagtacatttacacgctataggtatggatgctaatattgattttctttctaaatagaatgagcatcactattgcttcttactccattgttgatttctattctttttggtgtttctaaatagccgattgagagttattgctgaactccggcacggggatctctttcattcagccaatatagtatcaaggtgatgcatagtttggctattgtttttcatctttcaccatagctatctcattacagatatggattctggagttggtaaagctgtgtgtgctcagtattgtaggtcctacttttgtcttcagttattttcttaagcaaataaaatgtattatattgttgcagcatagaatttgatcgtgatgatgagttatttgccactgctggtgtgtcacggcgcataaaagtttttgatttctccacggtatgtatgatcttttttttgaggtgcttttggtctataaactttttataggtccccatgagaaattaaagtcctaacctcaatgggagcaaacaatgggtttgccactcaacctagtcctcttgaggcgtttggtctattttatttgtaattaaaatactctgcaaaaaaaaaaaaaaaaaatactctgcatatagtgggaaatattattttgcttaattaaatattatttttggtaaggagttaacacttatatttgattatatagtaagctaatttgctatagctcaaacactgaacaaatttatatcatttattttaaattatttttctcagagccatctcgttccaaaaaaaaaaaaatacaaaaatgtactcagtgccatcattttggaatatttggcacattgactaaaatcaatcttaaatagctagcaagccagttgcagtaccaaaattgctggggctcaagctgagatcggattctatttcctaccatctgatttgagccccttctgcttggtgttagttctggctttactcattttattttaatgtgtataattatgaaacaatatacattaagaaaatgtgatcgtaaatcatgtcttataagacttttcaatgagtaaaaactactccgttctaaaacatcatatggtatgtaaggcttctccaaaacaagtttgcacctatgctgtctaatttagctgtttggcatctgtcattactgatgaaactgttttggaggagatgcatttggtatttactcattcactgcatgtattcttaataatgttgctgataattgcttatcctgctattttgctaggttgtgaatgaacctgctgagctacactgtcctgttgttgagatgtctacacgctcaaaacttagttgcttgagttggaacaaatttgttaagaaccatatagccagtagtgattatgagggcatagtaactgtttgggatgtaaacactcggcaggtattaattttgtaatcttacaataatcttgttatcagtatcttataaattatatacttgccattggtttttaaatctctaagacttgtatatataaatatatatattttaactatggcagagtgtgatggaatatgaagagcatgagaaacgtgcatggagtgttgacttttcgcgtacagaaccatcgaggcttgtatctggtagtgatgattgtaaggtaatcatataaaattatttgtctctgtgatcttttagcgttttgtgtgcattatctgcatctctgttagacaacatctgcatgtgagtaaaacatcatttgaggcttattttttatcttgaacttctaataattacagaatcattttagattgaccaactgactgacgttcttccatatataactaactgactgactgacgttgttccatatataactaactgactgactgacgttcttccatgtataaccaacaggttaaggtttggtgcactcagcaggaagatagtgttattaacattgacatgaaggcaaacatatgctgtgtcaagtacaatcctggatctagcaattatgttgcggtatatttttttcattgttaaactggagaaggggtaaaataaaatcatcatgcaattgtttccttttaatttccccactctcatcatgattaattcatgcaccatatcctactcttattgcatttagagaagcagaaccagtaattttctagccatggctgtcactataatttctgattgtccttagaaatggctttatcttttgtccttagacttggttcagaactcagttctcacctttgagctcctcaaggttgtgattgggtagatgaatgtaccacatagaaaatcatcaatctgcactatactttggcatgtcatagtacttctcagttggaccttccatatcagccttattggatgctaggcctgccttttatacattgacatgtcatagtagttttccttctccagagtagtcactcattttcttattatatttgtccttcacacaattagagacttgtgttgttactctggtcattttcaggttggttcagcagaccatcagatccactattacgatttaagaaatattagccagccacttcatgtgttcagtgggcataagaaaactgtttcgtatgtgaaattcttgtcaaacactgaacttgcctctgcatcaacagacagtacattacagttatgggatgtgaaggaaaataagccggtaagagctatttcctaactgataaacaagtaatgactagtaacacttctctcaattagggaatgaggcaaagaacttcaagattatgttatatgactgggcatttataactattctgatattgtagaattttctaaaattgtattgggaaaaaagaaaattcccatttttaatgtgaattattgcaaaagttgaaagaggaaatttaggaaattggaggattgaagtttcaagtggaagtaattcagcctctcattttttctttttcttatcaattgttctgaatattattttatatgaatgatcacagattcgtacttttaaaggtcacacaaatgagaagaactttgttggtctctcagtaaatagcgagtacattgcttgtggcagtgaaacaaacgaagtgttcgtctaccataaggtaaaagcgcaactattttatacaactgatctacacttggtatccagaaactgagtaaacttcttggaattacttgtaggaaatttcgaaccctgtgacttggcatagatttggttcgcccgatttggatgatgttgaagatgatggcgcatcttatttcattagtgctgtatgctggaagagagatagccccaccatgctcaccgctaacagtcagggaaccattaaagtacttgttcttgcagcctaaaggacgagactgaataagcttatagtctatagagattgaaattggagcgggataaagatgttccatcctttttcttttctttttcaaaagttgggatatatcataaagctgtttgctgcattattgaatgtaattatttttgtgcatattattgaaatgtataagtagtacgtaggcttaattaaaaggcatgttttgtagttgtactaataaattttgctagtgaggcagtttagttaccgtctcttgtgttagttttatcaccatatacccaacaaacactacagagaagttgagaaacgattgattagtttttagagttgaattcttacaatctgatctctgatttaagttgacagagaaaactaatatacacctttctagcattgatagtttagtcttttttcaacaaacgacgtatccttcattgactccattgggctcgcttctcacacgagcaaagctcaatcttgttaactacgataaactcttcatgagcttaaactaggtgttgcggtgtggggtgtttgtaatttttttaaattttagtcgcaacacgagatctaaaaactgtaaaaattacgttatgaaaatgcagtatgatgtagtgcagtttaaacactttatactatcatcattatcattttacactatcgtcattatcaaatattataagataaatttaaaatttaattttataaattttttaaaattgcaaaataaaaaaagtcaacgtcatgttataatgaattgtctcaattatgtattatattacatacatttgatcatatattttaaaaaacaaaactgataataaaaattagtaacttagataatatatagtgggtgtagttaactacaattattaaattctaaaccgtactgtatcacgttgtttggtaaaaatacaaaccacaaccatattgcaaaagtttgatgaactttttttttgcacggtgcggtgtaatgcggaatgtttgtgcggtgtgggcggtttgatgcacccttcaaccttcaaccacttctctgtttattcataattcattgacacaaattccaatatctaattgcatatttttacatgattctttgcttatgcatgcgttactgtttgtgtagacaggctattagcgtgttgcttcatgaactttttttttttttttctgattaatgctttgtgaacttctttaaaccttttcatatgaaagaagtggaaaaccttcaacttgtattatgtcgggaagaagtggaaaatatggagtttaattcagaaactcgtataatcaaaagtaaaactatattaattccaagaaaagaaaatggaaaaaaaagaagaaagaaagtccagaaatatgttagaatatttgtgatactgatagtgtttccactcttgtatgaaaagtacgtacaggacaatataaatatatatatatgtatttatgaaaatagttgtaatgaaattaaccaacatacatttgaaacgaatctgattacataagacacaaatattacaaagctcaggaggattgcatataatgaaattacctctacggattaatagtatgtattttgtacattaaatttttctagacgataataaataatcttaaccacatcctatgtatcaaaggacttgcaaggtcaagaaaactcaaacgtccaccgtagagttcaaaataaaaattaaaaaaacataagaataacaagctcaggagagatagcaccacaacaaccctaccagtactttctgctgtgttcttcttctatgttgaggctttgacacctcaaaccatcatcaacagtgaccaagaacatgttaagcaagtttctttcactattaaccagctgagccatgagaaaagaaaagggtttagggttctcacatatatatagctaaaacagtactacgaaagatgatgagagacgagggagtgaataaaaatatggctactgtacacacacatatatatatataaaaaaattgtaggttctctcagcatgcatgaaggtgaaatgatgataataattaatgagtgaaataatagtataaatgggatgttaaatgggaaatatttaggttgatgtgtcattttccacagaggaaaggacaagagggataaatgatgagagtttgttctcttgggattcaaaaatcaaacctctttccacagatgggacttaaattcgtttccttctctttttcttttgataggtacagatttgtttttactattcacttttattatataatttataatctcaaccccttttacttttagacaaagtaaaagtttgtttgtgtttgtaaaactctaaagtcaaactatagtttttattatgtgaaatatcatatattggaaaaatttgtgaatcattttagcatatttcaagtagatagatagttatattttcagttttttaaatgtatatgcaccccaaaaaacaattatttttagtgaccactatcttttagttacaacataaattttttgtgactaaatgtgacttttagttataacaaaaaactacttgtaaccaaaacataatatttaagagaaatgctaaaaggcaccagtggtgcctagcaccctcttatgtgtcaatatcactattggtccaactaagtatcgtgtcccatataatttaatataatagtttttagagagtatcgctaaccaatcgcaacgcgacatgtcgagaaggtgctaggcaccaccggtaccttatagcaatgcttaatatttaaagacaaggtctcaataatttactgttaattacaacaagtattgtgactaattaaaagtatatttagtcacaacaaattgtnatttttgtgactaatacctttagctacgaatcttttagtca

SEQ ID NO: 16607 - DNA, 5898 bp, Cannabis sativa
cttctcccttttctaattttaatagtgcaagtaaacaaatgtaagaatgtaagagaatgattagcttactattgattcctattacttattagtaataatcttacaaaaaatgctctaaataaagccattattaattttttgtgtcaaattttacacattgtttttttagcctttactaagtggggttaaattggtgctactttttacccaacatttttggcaatatagcaatgtaatcggttagtaggtcatacttagcgactttctcgtgagtcgataaagtcagtgactgtaagagtcatctactctgctataccaaaattattactaaatatccgtacgttcttttaacccattaacctaacctacgtggtgtggtaccattgcaaacgctgtaaaaaatcgaagcggcgtaggcgtagcccccgaggaggccaacccctattttccactcttattacgttgtgaatttaattctatttaaatcatccattaataattacgaaacctctattattaattaattatttgttacattcttttacaaaattacacccctccttagtaatgtttgtctggatattttatttaactgaaaagttgaccaaatattaataatttaagaagaaatattttcccttttgagaaagttctcagcttatttatttttctatgaaaatagaaactatataaaagctaaacaacttttccttcccttccttccttccaattcggtgaaataatttttattttctgtcttttctactcgtgctataagcctctttgaaataatgttatattgctcaccgacttgctattctcgaatctactttgtatttttgctgtgaatatcctcagtttaccagccaaaactggacctttaatggagccttcaattgacatttgaacaattcagccacacaagcttccctttttcttaacaatttcttataactgttactgggtctccgagattggtttcggtttcataattttctgactcttcagctcgaaagaagaactgggtatttttcaattcttcaaaataaagcttgttctttcagactcgggaggtccataagctttggttaaaggtaatatatactagatctttgtttttatcccctctgtttttgttgtagaactttttttttttctttttgaaaaacaagtatgttcttctactgaaagctatttactaccgataatatttcaaatcgtaaagcaagcatctgaaattgtatgattgttaacttaggatgggatctggcttaatccatatggtcaattaaagcttgactcagatatttgtagttattttaggtgaaatatatgtgtttatataatatttttctgttcatctgtgaatgcccttgtgttgctttattctgtgcttaaagcaacattaagttaaacacgtgccgcttatggtggcgaagagcttggttttgtttcaatggataagtttagcaaagtgagaattttccgaaatagatttggattttcttctgtttgttgcaccagaaagttgaagatattttgagaaggggttttcttgaagtgggcaacattgactccattggaatgttgacccagtagctttgtagtgtgttgacaggacttattttcatattactgtattacagcgaaagaggcttcgtttttgtgtgtttagtattagtgtttctaaatgctaaaaagaaatgggtagattgagattttaaataatgtttttaagattttattaaagggtgttgaaaaactagatgaaattttcttgctacttacaaaactgtgcgatgcataagtgaagttttgtctttagaaaaactatgtttgaagttttcattttagcataaatgtttgagttattaatttgtattgtttcttcaggttggtattccttcaatttatgagttacgcaaaaaagttgaatttagagtccgctttcattgctggagacggataccaaatctgtagaaagagatgtggccagcctacattcagctgaaatgaagtcattacaggtattggctttataattatccttaatgcttgtcaattgactgtgttatacattcacatttcttagtaatcatttggttcagtaattattctaatgccatcatcaagtattttacttgaattgtcttcaacctctgtgatgccatgattttttcttgtcttccctccagacaaaagttgtgctagcatttactgtttctatacttttgaagatgtttttgttcactccattatctatgactagtactctttggtgctatgaatacaaattgtatcattttcctataccgccaacatttggcttctgcagatcactgcattgtggtggacatgcattatgtgctgttggttttagtttatattaattaagttggtaaatgaattctacaataatctgagatggacttatttccaagtattaatctatgcagttaagagttgtatattgtggtgtagtttgtaattggtggattcaaaaaataatgcagcagcattttaactgaatacttgggcgaaaataatttttaagcagaggttttgtaaagttcagctccttgctttcaaatgaatttttgttatctctgcctagtttaaagtaagaggattttgtttatggttgcattacttggttattacactgacaagcccttattatcacagaacacacaagaagtaccatcagcttcccaagtttcacacgattcccatagtgatcaaccacagattctcaaaaccgagccaccagcgacagattccgcttccatatccactccaagtaatgaaagtaagaaggtttcacgccaagatattgaacttgtaagcctctcaatcacatcaatttctattttcttcattttcacgttgttcatactatggaggtagctagactagttttttgttgtaatctttgtattgatggttctctctgttgtggcaattacaggttcagaatttaatagaacgatgtttacagttgtacatgaatagagatgaggtagtgaaaaccctcttgactcgggcaaggattgaacctggatttacatcattgggtaggcatttggaacatatccataaatttcaattgccatctatcgtactttatttaatgcatattctaatcatataatttgaatttggaagttcccataaaggaggccttggctgtaaccattgattttttaatgatagttgttcattatattttttcttttattttgtgttttttattgcaaatttgtcggtcaaggatgacatacttgttcaccatactgaatgtggttactaattctataattcagttaccatgacattttcttttttcttttgaagatcaaatgatgtataaaaaaatgtattctcgtttgccccttaataagcaagcactgatggtttatttatatacattttttttcctttcagtatggcaaaagttggaagaagaaaatgctgattttttcagagcatattatattagattaaaattgaaaagacaaattctcttgttcaatcatttattagaacaccagtatcatctgatgaagtacccaatgccgccaaaggttccattggcccctatgcaaaatggtatccacccaatgcctggtgagttctcatcctaccaatggaagttccttactcgatggaagttccttatttattttgtattctgtgtcagtgtttctatcataatgcattctgatactacattgttcattgttatttactgccacttgttcacagtgcagttaacaacttgcccatgggataccccgttctaccccagcctccaatgccagccacaggccagcctcatctcgattccatgaactgtggaatatcaaactgtcatgtggttaatggtgtccctgcaccaagcaactatcatcctattaggatgaactctggaaatgagtaagattttcctacttctcctctttgttcgtagttactattaccccagtggtcagtttctagtctcttatgctcataaaaacattgtctcctttgtcatattcttcttacgataactaattgaaaggactcgtctctgttgttttcttttcaccttttccctatctttcctaaaatagtgctttaaaactttacatttatagttagataatgctgcctcaaaaaaatctacatttgtatttactttttactggtagaagtcctaattgaagctatctttgttattgatttgttgttaaagtatgttgatggacaccagtggtggtgatatggcacctgttattcccccaagtagtgcaatgtcttccatgtcagagatggccatgagtcctacatcagtggcatccagtggtcacttcccattcacagcatcagaaatatcaggcatcggagtagatacatcagctctcgacacagcattcacatctgatgtagcaagttcagtagggttgcaacttgcaccagatggaggacctggaaattctcgagattccctaagaccgcttgatcagattcagtggaattttagtttgtcagatctcacagcagatttatcgaatttgggaggtaaatcatatcagtcttttctgttatttagctgcaaatttggaacaacctctataaggaaaaagctgaacatttttagttcagttatacacaactattcaattgtgaatgctgtccataatgttgtgactagcaaaattttgactcccatataattgaataccgtccataatattgtgaagtaggaaaattttgagtcccatataatgaattttccaaccatgtccagttatattgttattttggtgagggttgagtagattcagtaactgtaaatgcataaatatcatataggggcaatttgagataaacagaaaacatctataatttggtctagcataattgcttatgtaacacgttaactacatatatataggcttttattaatttgtacgtaatactcttgattcttttgcagacttgggagcccttggaaactatcccggctcaccttttcttccatcggattctgacatcttattagactctccagagccagaggatataggtaagttctattgcttttaagctgtttcatgcttccaatatctcacattactgcccttttgactttagtaaagggagaacatgattttagtaatggcatttgccatgcagaactgaattacagttcctttgccattttactgggcttgttttaacatgaataacatccaaatatttttcacaaaaaatggaaacaaactcaagtgctataaactaagtttaagaattgttttccccaacagggtctacacttgagagtttggattgttttgaattcagatatgctgaagaatattattctactcacttccattattaaattgaatatttctacaccatttcagctgtattggtcattgtctaattaactcttcctttatgacagttgaagactttttcgctgactctgtcccgggacctccatcctcccaatcagatgaggagagaagttaaaacaaggcaaggatgttcctttttcggcctttcgccgcactgtcagtataggaacaagttagatctcatcaataaattagttgattattggattttttataccatcaaatttgaacatttgcaccttagctgctagtatagccagtttggtctgtaatagcattcaagtaggacagtgtagctttatttttctctcataagaccttgaggatcataattattaattttgtatttcaacaatattaattaacatcgcatacagggtatgccaagaatatatccttctgggactagatcaatttcacttgtcagagaacctttaatctctaatctaaacagggtttaagcctaaaaaattaacttgaccagtttaat

SEQ ID NO: 16608 - DNA, 2812 bp, Cannabis sativa
ccctttgcaacacacttagtactacatccccttttataagtaccttaaagaggaaattaatttgttttaaaaattgaaatttgggttttttctccaaaagtgaacattatgtactcattataaaattacagacatcacgcatgcagtatcactcaaccgtctgtgcatgattcgaggtacaactcttaagaggcatttaatgtccaaacaccgaagagactctccattaagtcacgtcagatcaactttgacaaccagacacacatcatcaattcggatagtttcctaaccgaatgaagtccatgtgtgactaggaaggtcccgcacacacttgggggcaaatattatcctaatttgtacaccgtgacgtggcacctgactggatgagacatgtttcacattttataacctgggcagatggttttactcttagaaacccatgaagattgatatgaagctcaaagtcacacctatatagtgggatgtccgagcaaggtcactgatagacatccgaccatcttgattgcatgaagaacttgcatgcaccaaccaggggatgtgagttgacaattttagaggtgttcaatgtcatcgccaaacttacatgtcacaaaacaatccctacatttatgagattaatttgtatcttaagagaataaaggcaatcaacctagattttccattttttttattattattatagaaacatgatagtttcctattttatttcttattgattaagggaaaccattcctatgtaattagctcttataaatagtggtatcatctcactattcagggagacgacataattcaaagagaaaatacaaaagagacatttcgatctaagagtatattactgtaaaagcttttgagagagatcaaggtcttcttgttctctactcacaggtgaatacaacaaaaaaggaagtaggctattactaatcataaaaggtataagagatcgaatctctataaattttagtattttttttacttgttactctttcctttctattatttatttatttctatcacttcaattaaaattcatcagctaaaaataaaatcaacatcacataactatttataacaattagacttattttcatcctaatgcacacataattatctagatctagtaatttaattactactaaactactaattatcttttaatttttatatttaattatgccgttattatattataaaaaaaaacaaaaaaaaaaaaaaaaacaattgtaacaaatacgaattgtgcatagtgaccacataggcgggtagagtagcgtaaggtttccaccacagcatgaaaataacaagcgtgccaaacccagggaccactctctttcttcacttttggttttcttttcttatcatgtggacaccacatgccacctcatgggtatattttctggagtggtgtggcggtgtcgcaaactctctctcagctcttctgccttatctccttatctgctttgtatttgtttgccccagttacacatatatttatataattattgtcaatttattttacatatatttcgaaactatccagcctagctagctagtttcaaagatataccccacagttacaaatatatatatttctatacatcttgttgctgaaacgaaattattagtagttatcgttgatatacacagtttgaaaaatgaccagataaatacattaatggcacatatatatatatatatggagaataacaaaattaattggattgatcgacaactcttagctacttataaggaacacatacggttagttgaattggaccagacgtttctgtcgctagccgctatttgcttgttgcaagcacgtacaatcaagaagcttcaactaacctaacagaattcatttgactccgttattggtcgaccacactccaaaaccagtaatactaaagcaaaatataatatatcaacagaaaacaaaacttccaaaccaaaaagatgaagaaaaaaaaggaaatagttaattatatctatatggaaacatcatgatctatcgggctgtacctatctacttgactgggagaatctgagtagttaactaactagtatgtttgtttcaatgatcttgttcatcggaatcatcggggtccgggtactggtttaggtcggccttaaacgacttattattattattagatggtgatgacgtgatcaaggatggattatcagcttgggcggttttttgttgggaagcgtcgaccttggcgccgatttcggtggcgcgtttgcgtatggaagcggcggacatatcggctaggtgaaggtcttcttgcagtatgaggtccgggaagtttagccgagccgaggctcctctgaggtagaacacggcggtgtcgtaagcgcgtgccgctgctattggggttgtgtaggagccgagccaaatccgagacctcttgtttggctccctaatctctgccacccacttcccccactttctcatccttattcctctgtacggtcggctcttctgatcatcatccgacgccgtttcgttgtgctggtcaagaaggtgatgttgatgatgatgatgacgatgatgttgatgattattattatggctatcttcttcttcttcttgtcttttaattacatacttccgctttgtagtagtagtagtagaaataatactattactcgaacaacactcatctccttccatagttatgcttcaattaaaacgataaaaataaattaattcgcatcagggggaggggataatattttataagttagagaagagaaaactaatgggttaactaaaggagttatatatata

SEQ ID NO: 16609 - DNA, 6959 bp, Cannabis sativa
atattttgtccacatatgttacacaagattagttatttattttgttttttgaacaaaaattattttttagtttcgtttttctcattataatcaattgttaataaagtattatttttttactatatatcatactactattttaaaattgagagattatatatatagcttaaagaaaaggtagattttttgtactcgtgcttttatatcacatatatataatttaaatatacattattaataatatatgtataaaaaatatgcactaaattaaagtatatgacatgcatgttttataaaataatcgcaagtctcattttgtgaagaaaagcaaatattatgtaattgtgtaaatttttgttgcatatttaggtacacacatcttgttattcatatacatataatatgttttataaaaaaataaagaattattgtaacatatttggcaatagtcatgtttattgttacccttaaattaaaaatatttacttttattttcatttatttttattttaatatatggtcatgtttattctaattaattcgtaaaacgtacgaaggggcatttttatcaaattgatgctttttgtatatcaaaattagcatcaggggcatataattttaacgttatttttaataaaatatatatgcttctaaagcttaacttattaaatgtaagattcaaaagaacaaaaaaaaaaaaaaagcacaataaaactccagcatacaaacgacatatatttatagctagaaaatgtttggtggacaaaaaagctttctattcaaattgtagaaattataagatataagacacatgcaagtctcaacaaaagttgactaaattagctaatatgacatgggatatttgactaatcatcatcacttgcgcagaccaatgctaatatcttcctgtacttgcttttaccgcgtctaatataattaataccaaagcatcatgtaactacgaactaccgtattactttttcatctcacagattactatactgttatacatatataaaaacatacatataagtaatatatatctgactctttttttcaacaatactatcttcacttattaagcgttttaccatcatggtactatgtatgcatgtatccactcacacgctcctcctccatatatattagatatatatatacacacaaaaaacacatgatgataatttcaaccattgatctatattatatacatacgagctgatacgatataaatatgtaatttgtttatttgaactaaatatatatacatgcaattaatatacgaccaacaaactcattcaaacttttcatttcttaaattaaacagagatataaataatattttatggttttgaaaatggtacgtagctcttagcaaaaaattaaaacagaaaaaaaaaaagaattaaagtaatattttcatttttcaattatattaaattaaaagatagagaaagaaagaggaggggggataattaattaggtgtactataaattagagtaattaaagatttagctaagctaattaatttgtgatgaacatgaaatctaatcaattacatgacaaaaatagaaaattgcagacctaccagtggtagcatgagtattcgacttaattagtagtactcaatggcgatagcgatggatatcgtagaaagagagagcgtgacactcacactttcacataagcgagtagtgtaatgagataatattatatgtacagtgaatctttttatacccttaactctgaaggcaagtctgctattttcttactctgcaaacagaaaaaccacgaaaaaaattaaaaagagctacctagctagcttttttttcttcttttaattgggtaatgaatttataattaattatatatttactaaaataaaactggaaaatagagaaaggaggaacaaagaagagtttgttgggtttttccattttgttgtaataagaggatatcatatattccattgttcacactttctctctctctttttttctctttctctctctttatatacttgccccatcaaatatatataaaagaaagatatatatcatcattttctatataaactccacctctctaactcacagttctctatcactcataaaactatatagagttattatatagctagccatttgttcaaagtacaactccatttttgtgccaacccagaaccaccaatttcccaattaaacagaaaaataaaaaagagaaaggaaaggtaagaaaagaaagataaatttttcttctttgatataaaaaaggaatgatattttatctattactgaaattatcttaaattggttataataataataataattatattaataatatgatgcatgtgtgttttgatgtgatgatcagaaaataattaatataaagataagaaatgggaagagggagagtagagttgaagagaatagaaaacaagatcaacaggcaagttactttctcaaagagaagaaatggtttgctcaagaaagcttatgagctctctgtcctttgtgatgctgaagttgcccttatcgtcttctctagtcgaggcaagctttatgagtttggaagcgctgggtaaatacatatatactactcacaaacatttcatttcattattctattttttacttttatttttctgtaatatatatataccccaagccctagccagatctgctgagatttttttgacctatacttcaaactctctttcttcctcttttgagtctacttgttataaattaatataccattttcattattagtgataaatttacaacagtttatcataaatatatctgttgatcatcatatataagaaatattttctagttcgttttttttttttggtgataaatctgatgtgttcatcaaaaacaactttacaaactaacagcactttttattttataaaaagttataatcttttgaaacgaagctcttgcttcctgcagatctgtttcacaataagaacatgatttatcatattattttacataattaccccaaatttgcattttggccttttttttttcgttcttgaatatttttgtcccttttgaattttttctcttcttcatgatcttctgatgtgtgagcaaatttttttcttctcgccatgtttaaacactgcattttttcagctatatataatcccagttttttatatggtggtgatcttgtatctgactatagctaggtttatgtttaataatggttttgttttaattaatcaattatttgactttgcttcttagcgcgcggcttaaaaatcttctttcatttactcaaaaaaaaaaaatcttctttcatgattatctttatcgtgctaatttgaagtactaacgagttaaattgtgttttagggatactaatagaatagtatctctaacgattatatgtctgtttgatcgtgctcgatattttcttatcgaaaataattaaataaatctccaacatatatgcctcattttctggtagttttattactagagtatatataattatatattattttaattggtatatctctcttctcgatccccttatattattatatatattatttaaatttacatgcaattaattaattataatccttttcttgatctgcaacaaaaagaagaagaagaaaaatgttagcgtatatatggaatgacctagcaaagctagagagagctgtactgtctgactctgtaaatgttgctcccttttgttttttttattcagtctgtggacgcggatagtactcaatcattttacgtgctttaatttcccggcctccattgatctcattttttttattattggatcgatcatggtttttgtggtgttaaataatacatatatatgggatgtattatcagaagtgaaagaaagagagagagagaaattgatccaaccacagatggacacgtaggacgttccatcataatatgtttattatttgaaaccttatatttcatcagtcaccactgctagtatagctttctctctctcctctctctactgggttttgcatattcgtttttgatcatatgatttggggtgggtgatggaacagtagtacttgagctcttttgttttttcatgatcaaaacccttttctcattaatatattggcatttcttcagctttgtcctctttctttcattttggatcccaagaatatctcttggttttatcagtgttcctcgtacagtactcctcacctcaacctcatcaatcattcgattcatgtcatgatctctagctagctcgtgttcttctttaatttcagaaacacaaaaaaacccactagtttcttggactctctctctctctctctctctctctctctcacatcaaagctgcaaacactcactcatgatatgatttggatcttaccaattcatatttttgctctaattaatttcatttatctatttattctgccattttattacataatctctccaaaaagatgcgtgtatatataatattatgtatgtacatggcaaatcctatacatatactcaaatgggacgtggtagtctagagctcagtagttttgggaatatattgttaccttaatttcttcaaaatatgtgtttgaaatataaaatatgggattggataaaagtagaatgaaacaaattaagagacgtgggaatttggagatgttgatcaaacaaaggtttaattaattagtactcaattatattttcagttatcaggaatttaaatcactgctggctcagtttgatattcattaaccgatacttaattagtgtaagtagtaaaaaataatgatttatctctgagctgccatagtagtcaaagtctgaaaaatatgacggtttcagtctctgtgtccattcaggattcagctttcatatttttccttctccatactctgaaattgaatgttcttttcaactaataattaataatcttctctctccatgtctatacaagtatgtatctatgcataatgcatgtatgtatgtatgtatgtatgtatattgccttttccacattgtgatattcatctatgtatattttcaacttgaaattatttggatattatctcttgttgtcttttctgttaatccacatagtatgataatttaatctcattagaaaacttataactaattaattttgtccttttcaaatctattaaatatttcatctttatatcattgttttttttttttatctattatttgtcgttggcaaattactacatactcttttctgttatattatttagtgcagtccaatttcgctacgtactttccaaatatgaccaagagaaaaagttgttctccttttaaatgtatatatgtgtatgtatatttttgagaaaaatatgaatatatattataattttgtatataatggttggttcttgtctaccaatatatataaagtgttatatactaagaaggtattgatctatttgattaactagaggcattttactgatcatcttatttagaatttcatatatatatatgatgtatataaatagctcttgataattataagttggtttttatttatctttgatttgcagtataactaaaacacttgagcgataccagcgttgttccttcactcctcatgataatagtagtgttgaacgcgagacacaggtatattaattctccaactatcatcaaatacatatatatatatatatatacacatacacataaatatatattgtgtttaaagacgcatttgtaaaagcaccgtggtgtaattatatttgtgtgtaattggagataattataaaatttgataagttagtaattacagtaattttataatttgaggtaatattgagagattctctaattaaactctctaattattatctacgaaagttgagtacgtaattttactggaattactgaaattttccattttaaacattaattattaaaaaaatattttttccttataattactaattatttttttaaaataaaatattaagaatttgtatataattaacatctcatttttaaacttaccttatattttaaaatacagtataattgctaaattgtataattactatatactatttaataattatacagttactttcaaaacagaaaatacaaaatacgaaccatgatatatatatgcgtgcattatgtatcattattctttctatagcctattatattgatcaaacaaaacattctcagtgatatattatttttatacaaatatataaatgcatatacattttcaatatatagttaagttctgaacttattagagccagaaatttattatatgtatatacatagaaaattcctagctggttacgccagcccccagttatttatatatatatagtgagtaaggaatggatttgagtcatattttatttctgtgagttgtttgaaatttagatataatatgataatggagtgtatagtacacactacacacttttaattaatttattggggaaatagagctagcttgtaggagcgtaatttctttaaatagatatcgatctcttgttcaataaataaatagctagcattttgaagttcgataataatctttaagaggtagtggctagtgtttatgttatagtaacaaacatcgtttattattctaataaacatttttgaattgtgatcaatctaccaatgcagagctggtaccacgaaattacaaaattaaagaccaaatatgagtctctcgagcgtactcaaaggtgttatatacatacacacatatataaatattagttagtctctaaacatcagcattatgttgttctatatatacagatctatgcatatgttcttgaacatctattacatgtagctatttgtttaaaattaatgtattagtaagtggattttgtatcttttttttaaaaaaaaaaaataaaaagaaataaatgtacacgagattctctagctaatataaattt

SEQ ID NO: 16610 - DNA, 5148 bp, Cannabis sativa
ggccacctatcagaataggccaagataaagagtcctctcccccctcatgctcgaactatggtgatcaagcccccccaccctttacatgtgtggctttgatcaaatgaggccacccctcgtgtgcattggcccgagatgagcgaggccacctccatgcaagcatggcgcaaatcaagtgaggtcaaccccttgcgtggtggcccggatcaagcaaggccaccccacgcgtgcgtggcccagatcaagtgaggacacctcctcacgtgcatggcccggattgagcaaggccaccccctcatgtgggttggatcaagatgagcgaggccacctcctcacgtgcgtggcccaaatcaagggaggccatcccctcacatgtgcaactcgagacgtgcaaggccaccccaccttgcacggatatggtccccaaaggcctcaaccacctctctttctatgtttcctcctccatgcaacatgtgaagatactacgatctaactctgacgttccatgtatgggccacatagatattctttccctttgtccactaagtcatgcatgaaagaccttccatttatctacccatggcatttgaataagaataagagagaatcacttgataagaacttaccattaccaatccactatacccaatgatgtttaataagcataggtttcatacacatcgaacaaggaatctcttagaaagacctacacaaacaagcccataacaagcttcaaggtacaaggtacgagagtacacagtacgaaggtacaaagcatgatgtactatgtacagtgtatcacaaagagcgtgcacctccactttgaatcgtcaattgtaataagtttatgtcataacccaagatactaagactagaatggaatagtgttacttgatgaaaacttcctatgaaaaaatcctaaactcatatgcctcaaccattataggctcacacacatgacattatggaaatacccaaaacttggaatgtcaagcgcctaaggaaatttaccattccaatggtaatgaagaaagatatcatctcaatgaccttaaaaccttatgtttgaagggtcgttatgataaagagcttaagtgcccaatgctataaatatcgctacacacttagggggcaagaacgagtaagagagtaaaataaaaacactcttgaacgaacaaggattagctacccttggtcgccacatgagtaaaagaatgagcatgccttgaataactccttgcccttaaacataaacaaaagcttagcaataaaaaagtcttaatagacgcttaagctaagaccaagctagcgaaggtacctagccacaagagggtcttaaaagaaacccaagaaaaatagtatcatgaaataagaaggatgcttctccaaaaaaatatatgtatacatgttaaaaagcacgcgcaaaagcataaacaaatacaaaaggtagagacaagttcatagaactaacactcccttaaaatagataaacttaagagagagatcttggatcaaaaaatctcatactccctcattacacaagattacaatccataagagatacacctttgctcaaaaagcccatactccgtcatcaaaaatgttacatgaccttgacaaacctcgcaatggggaagagtcatataacaacaaaaacaacaacaacataaaagaaaaaataatggatgttcagtacagtcatcccaaagttaaagacacataactgaatgtaatgtcataacaaagcccacataggggagaatcactacaagaagagaaccattcagcaacacagcctttgtgcatctttaacaagctaaactgagacatcttcatccgacacctcccaaaaaggcagggtcaaccaaagaagataaacatgtgtgtcatgttggaggaagtaatgacatgcctaatatctttcattgaggcatccatctcgtcaatctcgaggataggttaatgctcttcttcatatagcatcacaagtggaaagtcatctgagcaaaaagaaaaagaatgagacaaagtgggagaagaggaaaaatcataaattaagtaatgagaaaatgtaccaacaagggaaaactcgccagagacatctcccacacctttcacatagaagaatttattcttccacctccaataattacaaagactttccacgatagaaataaatgatgtgtcactctatcaagatagtaggagcctctgcccattggaacaagtgccacatcgtacatgaaatgaacctccattggagtagagatcgaacatatctttgtatgaacaagatgtaaagatacgtcaagacatgaagggagaaaagttgaagtagttcaagacctaaatatagtaagaattcaagggaggaatgccacaatacgtcatgacgtgaatactatacgtcacaaagccagggaaggatgattggctctatcatcattagtagatgaccttcaactcttccctctaaacagtacatactcacaatactagcaagcttagccttaaccatttcatagatgattgagttaactgcaataactacttcccctccactcttttgtgatccatcctgatacaatgtgataaaaataaaagtatatgaatgcatagatatatgtaaatatataattatatatatagaaaaagaaaaaagggaacgccaatagaaaaaaaatatatacttagaaataagtctgccaagacttgaatctcttaatgaaggccttaaagtttaagtactttactgttgggctaagtggtggaatggttttagataatcttatcaccatgaaggcctatttataggagaagagacctcaaggcatgtgcccgcatttcataaaactattggcaagtccttgtacttgttgagaaacagtgatgattataccttgaggatgaagtcacccgccatcaacaataacacgcaagaatagttcaagaccactcctaaaggatccatcttgaactagggagaaagtgttgatatggaaaattagcactcttaatcaagagatgtgtcttatcaatggtggccagaacctcaaactagttagctcaagcacgtggattcgtacaaggaggcaccctatacacatacagatgcgcaaagcttatcccctcgctcaagtaacatgaggtgtgaggccaccccctcactcgcaccacatagggtgtgaggccttctgcttgctcgagccacacgagttgcaaggctaccccatcgctcagggcacatgggttacgatgccccctctcctcacgtacaaagtacgcgatataagggctccccacatttcaattcaaggacatgagaggtgtgcctcacctcatatcctaagcccatttgaagcctcctcaactttacaaaggtctttacaaggtccatacgatacaaggttcccttcacctcatacatggcaaaccccatgcatatcatttaatctacctctctaatctctttatgccaagtgacatatgagaggggccttctaatgcttacacatgacatatcacaacaaggaagtatctcaccttcatatcaccaatatatagtgataaatccatgttagctacccttatttacctaaaatgtttaaggagtggaagaaggtcattcgacaagggcacactatagctaagcttctggcacttgtctacatcccataagtttcagcttcattcaccttgatccaatggtctccctgatgagcctcgtgcgcatcaagatatggtaagctacaaggtataaggtataaggtataaggtataatgcacaaagtaaatgatacaaaggtagatacctaaaagaccagttggttgaacctccacgcctctgaaaagtctacaaaaagtagtggttgtacaaagggtaatagagacacaatccataggtgtcaggacgacttgagacctgaccaccactacccccactacccttctaaagtgttgaccttagatgtacagttatggtgtgatttatacattagggaccacttgtaacctagggccaatagagcctctataaataaaacatttttacattgggaaaacggttgaaaaatcgtttgtatgaagattactcaatgcaatataatttttataaatactctgcattaaagactagttcattttagtaagttttcaaaagtttatcatatttagttctttactttgattttctaatcttaacttagttgatgagttcttaccattaacaatatgtgatataagaagaatccaacgagtcaataactagaataatttatttacttatttacttttagagtattttagtttatacatgtattttgtataagtggtattttccatgaaagtacacaagctattaagtttgtagcatttaactactcgtagtacttttttatagcgaatatacatgtattttgtataatttgagtaatttctttttctaaaaatatctctttaattaggcacatttttcacaaaatattcttttatttgggtatttttacgacacatattcttttagaaatttttgtagtagagctcttaaaggatttttttagtagagctctatctgtttcggtatgtaagagagctttctagtcatttttttcatgatcgtgtgcgttgtaactatttaagaccacttataaatttttagaaaattttgaatagtttacaatgccaaaaataatatttaaacagttattcaccacaggtataagaaaaatagtcgtgcgtgcaacaaaatatgtaaatattatttttagtattgtaaattactcgaaattttctgaaaatttataagtgaacctaataactataacgtacacgattatgaaaaaataaataaaaaactctctagaaaaaaaaaataggaggtttatcaaaatatctctttaggggtgcaatgtaacataactgtgaaatacaagtagctacaccaaaacatgaacatcagatactttttataaaatactaattgttatgatgatttttttttaaattcttttcattcaaaataaagtttgaaagttttaataataataataataaagtttaaaaagttttagatttaatgatatgttatattttattttctctaggaaaagaattttttatttaaagcccctaggaaaagaagttaatttt

SEQ ID NO: 16611 - DNA, 5418 bp, Cannabis sativa
cctgaataccagtagtccgattaagaagcatacaaatgaccaaaaccctccaagggtcatccacatgatcctcttggagaagaccaatatcagaacgaggaggcttccatgtgttatcacaacatttcctctcgtacgctacgcttctcttctctgcagcagaaagcagaatgcttttcttctttttctctttacccaaacccacaacaaccggatcaacatcttcttcttcttcttcttgtgatttctcaaagtaaggggacacctttattgctgtcttcttcttcttcttatgcttttcctctttcttcaaatgagcaaccacctgaaaagccaactttgaagccaactcataataggtcttctgagaaaccaactgagaataaaccagttgagaacaagttaccacctttaatgcttcattcttcttgttcaaattctctgtttctgggtcttccttcaatcttttcttctcttgatctttctcaaaatagggtgaaatcactcgttcttgcaccaccttcttcttcttccttttccttttccttttcttgttcaacacgatcatttttgtgttttcatcgtcgtttgtgaaatagggagaaaccacgcgccatttgtgatcggagttgggttgttgaaacggtgtcgttctatccgagcggtgctttgtcttttcattcactgccactgctgctactaattccattttgttcccaatacttcggatatataaatacatatatataaccaaataaataatatgcataacaatttatgcaaagaagaaagtggaattgtaaaattcatatgagatctgtttaagaaaaaggttttgcattccaaccagagaaatcggagaagaaagagagcttaccactgacgacgttgctttactggttgttgaatattttgggggcaagtgagaaaattgagtacaactcaaactcgattgacattcgggctccaagtttcatctccaggaggatggagggtgctctttttccctttttttttttttttcaaagtccttcgcgtctgtcgccattacgcaccaaatcgtgtcgagaggagtggtcactggtcaatggtcagagaagcaatcaaagcaacaccgtttaatgactgtgatcaccgttttaccctttttacttgctcagcattttctttttttatataatatttatcaaaataatcagtaaaaaaaattattaaaaaataagagtacaaataggataaattgttgtatttatagtagcttttttcgtttttttttcttttgaaattgtagtagctcttttctgaaaataaattttttgataatatttttcgataaactgttatcctatcttccaagttccagtacattaaatcttcatcaatatgtaaacatagtactatattcaattcataacaatacccaagtaatagtatatcgatgctgttatcatagaataacccgtacaaaaaggtttttgcatattcgtttagaaattcttaaaagttaaaaaagactattacacattaagccgcaatttttctaaactttatgaaaagacaattgttattaaatgtcctcctataatttgattagtaattttttataccctttagcattaaaaaattctttttatacattcaaacaatactaaaaatggttcatcccttcgcacgaaatgataagctataaatattaagcagtaagtataaaaattcagaataagcagagaacaaaacttcttttctatctgtctgaagaaatattctggaatccttaaataaaatacaattcttcagggaaataaatataactaaaaagataaaaacaagagaagacaaaattttatggcccaattcaagtttagttggacttttgaccctcttcaacttttttcttccgttccttgagaagattaatctggtccttctttcgctgtttgcctttctggttaaccgaagagaatgtaacattagtcacaacacaatgttaaatttgtacatagaaattaagaaagaaaagaaagcatttgagaatcaagcgaagatcttacagtaatggcctcaagaagacctctctttttacgcgacatcataaccttggacatgctggtggtatcctcaacaacttgttgaagatcaggaagaggttcctccccaacttccatcttctcaacgggagtagtttgaatggaggttgacgatcgaagttccttctcaatctcctcattatacagcatttgatgggcaatcatctgcatagagttagaatttgtcatatcaagacccaaatgatgaacaagaaaaaacccaataacaaccaaatgttcccagaccaattaaaataacagcctgactgtttaattaattatgcgaaatccaaaaaaaaaaaaattgcatacctttcgctttctctcagcagcttcattagcctctgctctatcaattacaccttcagccaataaactctgaggatcttccatatcttcttcgcccacgcctggcaatggaaggacttgatttttggctgcagcctgcaatcttttaatggtctcggcatagtctggcacataaccttctgcatcattgtcaacgaaaggtgacaagtgtggaggtggaatcctgcttgcagaacaaacttgtcaatgatctaagaactcaaaacagatattgaagaggaatacagagttatttactcatgtttgttaggatcgcctaataataataaaaaaaggaaattgcgttcgaactcccacccaaagtgttcccaatcactgtaatattgtcgctcataagttgttactggtttcaaagcttttgcatattataatgtgattaacatgatgtagccaaaatcacaagtattaccttccaaccaaataatcctcagttggcaaaataatccgtgcatttacagaatcaaaaacccattgtggttgaacataatctctggaaagaattctgcgggtctgtgatggcctgtcaacaatctgcacacaaaaccactttcgatgttgataaagacaaacagcatatcaaccttttctaattttcagccatctggtatcaaaaaagcaaacctgatgggtaatgtcttcatcgttctcatcatatggagccccatcgccctcccacgataccataccaccaaaagcaggaataacaaacagcagtgactctcgtggaacctaagaaaaaataggttttaactcagtttttctcacttccttcttagcataaaaaagtagacaatcttaactataaaaggacaagcacaacagaaatcatctaaacatcaattaggtgaattaaataaaacaccaaccagcaacaatgagctttactttcaatgccattaaacattattagctttcttatttctcatccttcagttcatttacaacactagaatgctcatttcaactgactgataagttatagaaagaaacatgaagggtaaagtaatattgatctcacctcacggctcaagaagaatttcatgtttttaaatagtttcttgcattcctttgtgtcttcatcctcttcatcctcagcaacatcttcaacaagatgcatcaaagcaccaggttcattggaagggagctgctgctgaagttgtgctaatcttaattcagactcttcaactgaagtctctttatgctggctttgaccctgttcagtaccagacacactagaagcctgaccatctaccaaggctctagagctagcagaaaaccatcttgatagcgcataaagatctacaaaacacaaagcataaaataaaataaataataaataacaaaaaatatgtgtagcttactgctaaaagactaaatgagaaccacagataacacataccagctgctaatgcttccagacgagaatcaaggattggcggatactttacatttatggaatgatatagatgacaattcacaaaggcaagaagagtctacacccaaaaataaatggattcaataagataattcaagggtggtttagtgattattcttcattttttttttttttttgatagaaacaaacttgtattgatgacagaaagataaaaatataaataaaaggaaatatatatataataacctcattgaattcaagatatgttagcatgacattgtaatcaatgtcttcagataaaacttgctgcaaggcatgaggagtcaaccaagtgaccttttgtccctggacttctgcctggataaacaaacaccatgtacatgtaaatccataataacaatgatcaaacactttcagaataatgaaatttaaattttactgaacaataagtatgcaactatacctgataatatattcctttcacagatacaaagaccttacgcaacttatgagtacgggagatgtatgcttgccactcatgactcaacctagacaaaagatcataacaaaccaagagacaataataagatcataataaacaaggagataacgtgtcgacaacactacaacagcatacattgatctaaaggacaataagtagcaataataatatctatgttttcacatattcaaaaggtctaccttcgacagttatggacacgtcttacttcaattttttccctctctagtgcaggtaaggccgcaaaaagatgtaccattgtaagacagtcatccaaatctctaattgcatcaagaaatttcggatacctattttccaaaaatacaaaaacaactatcttcaggcactttttgtatcaagtatgagaaggatgactaatttaaaaattgggcaaagacaaacctctctcggataagcctatcaagtttgtaattgggtttagatttttctagtcgctttgcacgttcctcattcttcttcgccttggcttttttgatcttcttttcataaacccttgtttctctaaaagtctcaagtaaaggttcatgatgaagaaatgcaatatccttcaagtgataatatgtatggtgatttcctttcaccttcttctttggctcccgggggaaaacacccttaagtatgcataatttcctacaacacatacaaaaacatttaaggggcaagcagaaaagaagttaaaaaaaaaaaaaagtaaagttcagtctctacaacataaaaagaactcaaacccaaaaccggaatctaaatagtataggacctcaaaaatccttgacccatttgcccaagataacaaatatgcgtgtattaatatccacataacgaataacaacccaatatatattttatactaggaaatccgaaacagcaaatataacatagtgaaacccaataaaaacaaactccacccaacacaaatgatacccaaaaacctaaaataaaaccccttaacattttgaaaacgtaaatgactcatacaatgaacacctaagttataccaaatcccaacataaatgctcaaaagacat

SEQ ID NO: 16612 - DNA, 6941 bp, Cannabis sativa
gaattaaatggacaaaaaggtgtccaaatgtaaattttccttctttttaccctcatctactttctttctttctttctttcttcactctgtggatatagctcacccaaaacccataaacccatgacccctttccgcccacaaaccccatttctttcgtcttcttcttctcctgcctccgatgacccatttccggccatccttcttccccgtgcaaaccccgaaacccaccttccatcctctccgtcctctctccctccatctgtctcttccactctcggtcttccttgttctttcaattttgcatgtggcgtggaatcatgagctctgcctgaggaaattctggtaagccctaaatatctccatagctatgtatatatataatattttattatgattggtgaattatctctgatttatattcttgggtactgattggtgaatatttttatcttatcaatgctatagggttgggttacatattccatgtttttatatggctttgcattttattttagttattccttgagtaattatgtgtattgtgtgtgcttgggaaagataattttctggattttcgaatttctgggattgtttggctgctggggaaatgcaggaaaaagaagaagaaatataaatatatatatatatatatgtgagtgtgtatatatatttgtgtgagtatatacatagagagagtagaagatgaggaaaaaattaaaatgaatttataatgattttttaaaatataaaataaaaaaaaaatctacaccaccgagtcacttggctatctccatacctttctaaatagaaatcgcaccacaaaaatttatatatatataaaatattcttcattcattatttaacacacacaaaaaaaaaaccaaaaagaaagaatagtgacagtacacaccaagtacattgtagttgcacacgtatttggtggaatgatggtctcaatgttagagaggaaaggtagaaaatatcatcaaatatgatgcatgattggagttggtattaacggagctatacttattatggcagcacaataaggccaactccaacgctgcactatatttggtgttggtgtccactttttctctctaatgttgacactatgtttggcccaaatatagcgtgtagctatagtatatcccatatttggtgtgctgtagccgcactatcactattcattttttttttatatatattcttatattatatttagtagtatttaaatatatattattatatgattattaagtaatgtaataatagaagtatcttttttttttgtaagttgtagtattgtggttagaatggaaagataacatcttggtgttcgtgcaacatcatatttggtgacatggttggacatagcctcatagaatcaaagttgttcgatagtacaattggttattgacagtgtagccctggccatacattattttgccagaatttcaccgtttcaaatctgcagtaccaataaaaaatggttgtaaaagattcattttttttttgttataaaagataatagaatatttacggcacaagtacttatttatgataataagcggcatgaatctaatatttaccgcacaagtaattaatgttagtaaaacagtaagtttgttcaattctgttaatatatattttgttaatgtattgttgggtacatgtgtaaggttcaaattaaaaccaatttaactagggatttcaataaaagaaattaaaaatgtgatttaatatggaccttatatgtgtaccattcaacatactaacagaatctatactaatagacgaacttattttagccgctaaaaaacttattggttctatgccgattttttttttttgaacaaaaatatcccaatgagaattgaatgaacaaaaaccagtcaatgtgcaattgaaagaccccccagattgatatataagttggatcttttcagttttccctgtgagaacaaaaacggttacaaaaaataatttttttaaaaggatacagtttgaatggctctgaacttgttatgccctgctgaagtgaaggttctatccgttttggactccatcaagtccacctgcttccctaagctgtgtccaggttttgcttccattcttgatattctctatttggctactcagaaagtaggagggagattacataaaatcaaggctcttattttttttagtggggaagcattaagttatgagctcagctgaagagggatgagtggttttgtcaatgctttctgaaatatgacaaagaaaataaagagcaaaaatgtcaagctttgtgactttttttccttttcttttagtttgaagctattaacttcttgcttataccaaagaattcttgtcccaacaaactaaactgtgttttgtgtccaagttttcattgtttagtatagattttagaagtgattcttatgttgcttaaaacacgtaattgattcttatgttgcctatatttaatatgattattaccagcattatttgggtttgaaccccaatgagggtattatttatggtgttttgatgtagttgataccttagattgtctgtttttgtttatgctgctcccagactatgacagcttgagtttatgccattctcttattcgttttctttaggtggaagtagtttccatagaaaggattgcagagtaccacttagaagaagagttcattgttcggtgcagcaacctcctccagcttggccaggaagagctattccagaggaaggtctctgtaattggaatgtcccaaagcctgtttcaattctaggctccactggctctatagggactcaggtacaaaatcaaaccaaaagactaaggaaagaaaaagagtgaattttgtctgtgtgattaacctgggaatcatggtttaaaggtcctatctgaatgcccttagtcaaaaatagttcctgtttcagaatatgacattaaaggcctagtcataaactttatatgggaaaaggattcacaaaaacaatttgtaaagatttaagttgtgaaaaaaaaaagatgggtcctttcattaccccaatcatgttttagagttacttgtataaatatttttttagcaacaaatgaaacataacttttattagccaggtttctgtaacttgactccagtcagagctacctatttcaagagagtttgagttctctttcttcagttcaggtcttttttgtttgaaaacagaagacattttctgtatttgattttaacagtatttggtttcttgccttattattattatctcttcatacattccttgtaactagagtatgttgattttcagacactgaacattgtggcagagaatccagataaattcagagtagtgggacttgcagctggttccaatgtaacccttcttgccgaacaggtattctgttaacctgacctaaattcacagatcataactatgatcgttagtgtatgaagatttaaaggttcaaattcaaaaacttcccatatatatgttagtttcatcattttgacaggtgaagagattcaagcctcaaatagttgctcttagaaatgaatcattaattggtgaactaaaagaggccttagctgatgtggaagaaatgcccgaaattattcctggggaacaaggagtcattgaggtgatcttgtttctaacagtctgatgataaaatacatcttttcttctagattattattatttttttattattattaatgccattctatcagcataaatatttctaacagcataaatatttctatttttaggttgcccggcacccagatacagtcacagtggttacaggaatagtaggttgtgctggattaaaggtaagtccataaaggtttagatgcacactatttttatagtatgatatcgtatatatgtagaatcaactgaagtgttcttcctattagctttatatttttttaccttttttgaggaggtttatttaaaatgtggcaagcatatttctggtactattaccagttgaagtatatcttgctttttcttttttcttagcctacagttgctgcaattgaggcaggtaaatacatagctttagccaataaagagaccctgattgctggaggtccattcatccttcctctagctcacaagcataacataaaaattcttcctgccgattcagaacattcagcagtatttcaggtacatatacaaacgaatttcaatggatcttgtctaccctattcattatttctctcacatccattagactatattgtcaatatgtgaagcattttggtaaatgtcaggaccaatattatcatggcattgtcatcattgtgccacatgttttcactatagttcattagaagtgaaggttaacgaaatctgttttcttcagtgtatccagggtttgcctgatggtgcactacggcgtgtcattttgacagcatctgggggagctttcaggtgtgaaataagtattttaattgaatttggtagcggaatattaaaattgttttaggccgttgataggacacggactttactacgggctactgcatcagcatttaagttatatattgatttggtgctatgatttacattttgaagttaaaaaacttgcataaattatttttttaaaaaaacatgcttgtagattgtcttattttctttgaataagaaagttaaaacttaaaattccataatctcttgtctcgtgtacaagatctatgtgtattatccttttcaaaattctttggacatgattagtcattaaacaagtatctggttagactgccaattttggtgatttcaatttttgaacccaagctcatttgttaagattctgatttggtgttatattaaaactcctttatgacagagattggccagttgaaaagctaaaagaagttaaggttgctgatgctctgaaacatccaaactggccgggtatgggaaagaaagtcactattgattctgctacccttttcaacaaggtttgatacttgttttcattgttttctaatgtattttctctttcattttcaactgcgagcagtaaaaaaaaggtgtctttgttttttctttttatcaattctgaaacagggtctggaagtcattgaagcccattatctattcggagcagactatgacgatattgacattgtgattcacccagaagctattatacactctatgattgaaacacaggtataaagctaaaactagtagtcttggttcttcttttgctagtttgcaataggactgtaaattacaaaatggagagtctattatacaaaattacggtctcttcaatttgtcttgcaggattcttctgttctggctcagttagggtggcctgacatgcatataccgattctctatactatgtcatggccagacagaatatactgttctgaagcaactttacctcgacttgatctttgcaagtaatcgtctttttccataatatttttccacaatctttttccgcatgttttatcgaaagatatgcctacagtaagccaaaattcagcttttacatgtaaatccaacaaagtctactgctgacctttatatctaatttgtgactttcagaaccaatgtgaactgaggattttcccccctttatggacatccgtaattattcaataaattagcatatttctgggtttttttaaataaatttctcaagtgaaagtcatgtttattctttcctagatgcctttttcatttttattatttttagttcttttcctacaaaaaatttgggctgagtgtataaatggaatcgacattgatgcaggcttggttcgctgacctttaggagtcctgacaaccagaagtacccatccatagatcttgcctattctgctggacgtgctgggggcaccatgactggagttctcagtgcagccaatgagaaagctgtagagatgtttgttgatgagaagtaggttttctatttcatcatctttcattgataagattgtcacttcaattcccaactttgcactatctatcaacacactgctatctgttatatcttcctcattccaaattatattccacccatgttttcaggataagttatcttgaaatcttcaaagttgttgagctaacatgcgacaagcatcggtcagagatggtgacttcaccttctctcgatgaaattatccactacgacttgtgggcacgcgagtatgcaactactactttgcagagttcttccaatccaaaacctgttccaacggcataagaggagacaacttttccattgttgaccagggcagcaaaactttattgggtttgaatttatgcttagatattatcatgatttccctataaaagtggcaaataaaaaaagtagtgtgtgttggggtttggatgagttaaacaaattgtatcatgtaaataatattcatccaaaatgttgttccccaatagagaaaaaacaaggtagttaaaatgcttaaaagcatattccctggtcttaaaagagaacgaaacaataagacaaaattaatgcaaatcaatgattgcgtaatgcgattccatttcattctcttctaagtttcatattgttgattgtccaactaaagttacctcatgttttatactttgattctaattgggcgatttgcctaatgttttgactgaattttatttgtagaagagaaaattaaaggttttatttttatgttatatttttgtaaaagaagatagaaattatatatttataaaataataataagttttgtcgagaaagtcatcggcgttagaaaaattagtgatgcgaaaaaagtcgccagaaaagttattgtcgccagaaaagtcgccgtcgttagaaaaagtaacctgaagtaaatgtctcaaatataaacaaaaaaaaaaaatcggttctattacataatgaataaaaacaaataacacaaaataacttaaaccggttataattgaaatat

SEQ ID NO: 16613 - DNA, 5754 bp, Cannabis sativa
caatagtaccaataagaagctgctttgaagttattcccttagctgttgatgtcactgatatagctttaacagaatgagtgaaaaagtaagattgtgattttgtcacaacctcagttcgggagtacgaagaaataggatatgtgagattatgctttccaagaacaagcttccacaaatccttattggcctgtcaattttaaatgtattttgatcagtattaaatttaaaagacaggattacacaaggatttttgagcttcacagcataccgctcgggactggtcatatatctcaatgactgacatctcatatctgtgtgctctcaagttgaagtagtgatagacaacccagttctcactgaaaacctatacaatggataatacaataagtgaaaatcttttatacgttacaagaccgtaagtgataggggatttgaaagcttactgcatggacaggaccctgagaaccatgatgagtcattctgtgcaatatacgaccagatatagtatcaataagataaacaaccaatgacgactcctccggggtagctgctccaatttcaccactagcttttggcgtaacagtggaaacaaacatcaaattttttgagatatacttgtacattacatcatgatctcctataatctttgcctgagtatggaccacctacaaaatgcaaatcacaatgcaatagaaatgtaatcaggaatcagaatgtaaaaggaaaaaacatagaaagatccaattcaaatttcagttaggaaggtgacaggtccccgcagcagcatccaaagggatttgaaattaggttcacaaatatttcttgttcttcttcataaaataacatttattgtctccagtccagactatccatttaacttattttatttatttacctatttcaacactactaaaagcatatcaataacagttgtaccaaccaataaaagcatacctcgttcaattttcttgtcacagttgcaattatcttttccgagtcagatggaaatacaattgaccatacatctctagagtcaaagcagtactcatcaaggttttcaccagcagaatttctcttcaaagcatgacccttaatgatgcctttatcagcatcaactgagtgccagtatatgtttgaaaattcacgttgaaatatactaatagcctcaggtgttctggggtataaatatgtccgttggtccacatctatcagtagatgaagacgctgttcggttgcatcagtgaagggcagtggaagaacttgtacaacagaatgagtaggactcaatgaacttatttcctttccggtgtaagtatcaacaaaagaaagtattcctggtgcgtcataactttgcccacaccggcctactatgagtacagatggattttcatccaatgcatgatgatggggaacctgccattggtaaatactaagcccacttggatacttgcatgctgaattgcgcagtgaaggcagtaaaagcgaccaaacaactcgtccatctccgctgtgcaaggcaaacagctttcctgctcgagttaggactagaagcagcttccggaaaccattgtgatctcgggtcattttgctcttctcggaattctttaatctcatcccttggattgctacaacatcctcagggcttgcaagcattaaagttcccttaagcttcagcatgtgaccctttgaatagcaaacatcaaccaaataaatcatgtgaggtggaacaagtaaatcaaatgcatgccagtcaacaaattttaaaacgtaatatctgaaatactaactataaaaaaaaaaagaggccaggaacacaaaaataccccttttctaattctatagttgcaaaaagccttcaaactttgaataccatcttaacatcctattatgaactcaatatttataccttaagccattcaaagaggttatcctccacttttgcaactgatacaccctccttctccacaggtagttctgatgttgctacatctacaattgacgcaaggccatcctccctactccagacaattgctccttgttgtaacagcaagagtgaatgatcttctgtgacaaccaaggccctaaatccattagacctgtctgtgcggatataattgtttataaacactctatggacaaacccccttccatggtccatcactatactctccttatgcaattccttattccagtcatggacaagcttcactgtaagatgaatcttgccatcatcgtgctgaattagtgcaaaagctttttctccctctgaaagcaagagaggatcacttacaactgctgcattattgactttatccacaacctccagatttccttcaccagttattctaatgaatattttaaatccattgatttctaaagcaaacatttcttgaagctttaagggcaacaatactgttgtcccagaagaatcaccaataagattagatagatatgtttgctgaaatttgataccatcctgaaagtttattgttactatctttgacttagtggcatccaatgccacaaccaggtcatcagaaaccaataacatctcccctgaaaaatcaccaggaaaggcagcgccatgtttattcagcaagtctccattcctagcatttattgcaaacacctcaaactgggaagagccagcagagcctagcgcatatattatctcactgtcagaaggccggataatctgttggacctcaatactgcaaacacataaaacacagaacattaatgacgtcgtattttagaacagaacacacctctgaaacctgagagaattttctgaaaaaaaaatacaacaattggccctttgacctccatttccgtttacctttctgcttcaaagttctttttccaaacaatctcgccatctatactagatatagcatgaagacacccattactaaaaacaaggatcaaattatccttgtcgactttcaaatttttctgtaaaagataaccacattaaaccggatgtacgtaagaaaaattgggtttgcaacacttacaagatcctcacaccatgcaacctgctccaaagcaaatcagagaggacccaaaaatctcaaaaagcagttagctcttgcagaagcaaaattatattctgctttaagttaaccagaacattaatttgcatttatacaatttcacaaccagcaataattatttttatgaaaaatgtagtacggaacaacaatgaccaggtgaagactttacaatgaagagaatttattttcagccatcaatatataggaaatctcagaccctttatgcaccatgatattgcataatttaaaaatacgccaattttaaaaaacaaaggcaaagaatgtctttacaaaagtttgaccaagctacccttaacattcaaagaaacctatctctctctcttccctcacaccccctcctctctttctcacgtaagccccctctttaatctgtaaacccaagaaaatattggcttgacactaattgatagatttggaacactttgtgcaatattttttagtatgtttgcaaagaaaaaaaattccagatgaagactgaaaattgtgaatttcgtaataaaatggatgcaagatggttttgtgatagtcccataaaatttattaggtaaaaatcaatgcatctaacgatacttcgagatctaagtgaaaagttagtcatcaaatttttgtgcaaaaagttctcaccaaagttttcattaaatccatcgcaaaccatcgtactcatcaattagcatttttttttgaattaaaataagttatagtttaacgttgcaaaaccatcgttaagcagcgctaattatctctttttcccatcggttttcataagaccatcacaataaccgtccttaagcatcactttttgcccaagaaaaaaatcaaatcatggacctcaatcttttcttgggtttaagttttgaattagattttcaatcattaaaacataaaagaatttgagggagagggaaaaaaaatcattgcgttttttttttcaggttttagagagagaaagatggagcatacatgagatgagagagaggaggggggacagtgttacgggtcgcttggtcaaatttttataaaaagacatacttgcctatgcttacgagggactactcaatttaatggtttcattttttttcccttcaataacaagttaccaataaataaattttttttagaattatattaattataattaattatattttttaaaataattaatttttaatttaaatatttaacaaaatatttttttagtaattaatatttataaataatttaatttttattcacgttctgaccaaagtttttattaaatccatcgcaaagcatcgtacttatcaattatgatagtttttgaataaaaataagttatagtttaacgtcgcaaaaccatcattaagcaacgctaatcatctctttttccccttaaaaatctgtttttcataaaaccatcacaaaaaccgtccttaagcatcactttttgcccaagaaaaaaataaaataaaatctattataattttttaacaattaaaccatttcactataatatttataataaaatccttttttttttttttacaaaaattacacttccacctcttttaaaataatttttttgaataattaattattgtttaaaaatgacatttaatttttttttttttgcaactgcttcactcatcttcctcccttataaaaaaaatccccaatttcaaaaattagagtttcaatctgtcctaacctaacatcatgtgaattttccacttcgatgcaatctcctacatctctaccacaaacccattcctccaatccactagctacagttagatttttcttcgatttttaataatttgcttgctaatttcctactgttatgtttatttgtaagaaagtaacaatctcaattaattaataatctattttagtaattttgataaacatggatctcaattgatagataatctactttggtaatttttttttacaacttctagattgatgaagtttatttcaccgaggagcaaaaatagttaactaatctttaattttataattgttattacattttaaactattttttaatttaagttttcaaattttttttttacaaaaaaactaaataacttgaaccaatatgaaactgacacactgatttggcacttaaatgtattaaaaataagattgagtgtaaaattacttcaattagaggtcattcttactattttttattaattaaagttatgtgtataataattttaaattataagcagttttgttacaaatatttcaattatttcagttaaaaaacaattaacttcaagatctttacttagtaacaaattatatatttaataactattagtaatttaattttcaatataattaattttaattatgcttttataagaaaataaaatattatattaatatgaggttacacgttatttattatttatttattttttaatttctaaaataatcacaatagtgatttaatggctaaaaataaatacaattttgatggctatatatttgatgtaaccattgaaatctcttccatataaaaatatatacccctataaaaataattgacatatattcccttttaaatgtagaggaagaaacatatacaagatattatatagggaaaatagtgacataagtacccaaagttttagatttgtaaacggcataaacccaatgattttttttagtggcataagtacccaatgtt

SEQ ID NO: 16614 - DNA, 5958 bp, Cannabis sativa
  modified_base (3399)..(3401): a, c, t, g, unknown or other
  modified_base (4300)..(4304): a, c, t, g, unknown or other
  modified_base (4374)..(4376): a, c, t, g, unknown or other
  modified_base (4453)..(4468): a, c, t, g, unknown or other
gtttcatgatcaattgtaaatgaatagaactcaatgaaaaataactatcaacctacacacctataaatagaggtagaatccaaaaaaaaaaaaaaaacagcaaaataaagagatggaattctattatttatcattattaagaattatactctgtgttcaaattattatctctaataatatggactcatggtggaatattatgtaaatttaactacaaaatcacgtaaaatatctagtgtttgtgattataattaaattttgtagtaaatttattaagtaaaaaaacaataaatttaattaacaaaaatctgtgttaatagtaatataataaaaattaaaaaaaacttaatatattacttataataaaaatatcataataaatataataacaatatagcttaaaatattatacttaatatctctttaacaataattttattatgtcattaatgataatttacatgacaattatcatcaaaaatgactttatttgtttataataacagtttccaacgaattttttttggaaaaaagtaattttatataagtttgtatgacattagaaataaaatgtcataaatattttgtcgtgaaaaataatttttgttgtagtgtatacaatttattattactcttatctcattatgtcaaatacacttaacaatctgagtaaattttcctaaaatcttttttgctatttagatggaggaatatcatcaacagtaagattttaaaatttggagcttatactcttttgatgtgaggaatggattttagaattatattattagcttcacattcttcactaatttcatcttcacttgcaatgatgggcattagtggaattcaaatttcaagaccgggtttcatatgttgtttcatggtcagaaaaaaaaaaaaagtctgagtattttatgtagaaaaatcaaattcctctattgagttatctgattgacgaatcgttgcaaaacttattgttgtctctgagccatgagttgtttgggttccttctccgatgaggtcaatggtgcccttaaagagaaatttaaaaagggaaggctaagaagtttttgatattgtagaaaattttcatgatgttaatgttgtatttctttcaaaaagaggttgttgttaaaatattagaggatatgaccctaatagattgtttggaaccataatgtcaaaggcagaaggaaggggcacataggtcatatgttcccctcgactttttataaattaaattttatatataaattttgaatagtttacattttattcttataaaactaatatttatttatatctttaagtatttttatttttgttcccataaattttattttttttttatccttataaagtttatatttttattagtactcattttttaaataataataataaaaaaaattggtaagtctcgagtacaccccgaaaagggttaatctggtagatctcctacctattttggcattctcaaaagataattttgtccaattgttttcttcataatcatgtgttataatgagttagagaacatagtattcttgtggagaagtataaaagggaggctaagaagttcttaacattgtagaaagttatcatgatgttgatgttgtattaattccaaaaaggttatttgttaagattctagagattttgactctagtaggttgtttgacaccatggtgttaagggcaaagggaatgggggccagaatgtcccccttttaattttttttttttttggtaaaattgagtatgaaggtatatatattgtttaaacaagtaataaaagtgataaacaagatatcgtccaataggaattactttttaatttccaattaatcaatctcgatttgaaaagtaaataaataaaaacttaaagtaaaattaaaattagaaaatatgatactaatggattggaataaggtaactactatctctttactatgttatcaatacaattttttactatcattcttcttattgtaatagcagttatacacatataaatctcaacctatatgtgaatattttacatatttgtgataaattcttacacatagcatactttacaatcaaaaattataattgctacataaattatacaaatacgtttatctaatatgcaacctatctctatctaattataacaaaattaactctctacttttcgatcttaaattaaacccattaaattatgcaaaagattattataacattaagcaaaaattaaatacatcacaacatataagaaaaacacataaaaactgcattaattaaataatagaggttcgagagaatttattaaaattctaaaagtaaaattagttcatcattaaaatattcatgacataacagtaaaatgatatcataaatagaaaaaggaagagaaaagaagaagaattgagataagtttgtcaatccttacgtgccaataatgtttttctacaattgtatagagtgtttttctaagttttgaatagtctaaactctctaaaatcgcactaatagtgttgtttaaatagtaatttaggaatttttgatgaaaagatataattgtccttccaaatttgaatttcttcacgcgtactgataggtgtgccacaaccttttaagattgtttcacgaccctactttgaacgaaaattttttcgtgttctcggattcttgcaggagttgcgactcaacatactgtgttgcaaccctaaattctctagagaaaattcctactttttggagtcgttgcctcatcaatcgcggctcttaaaggcttgtgactcagtgggtggtgtcgcggcggtaattcatttttctcacaagcacaaatctcgatcttccccttacaccacgttatcaccgtcactcaggtttgcatattttctccacaatcctctccaaatccccattacatatgcttgaacctaaaacagaacaaaacaagcataacgccactcaaaaaataactcaaaacactttccaccacactagaaaacaaggctaaaattagcctaacaactttttataattaaattttatttctaaatttttgaacatattactttttattcttataaaattaatatttttttcatttatatctttatatatttttatttttgcctccattaatattttatatatccttttattatgataaaatttataatttttgatatggtaaattatttataattttttaaaattttataaataattataacctacataattatatatataacaaacacactaaaggtgaaaaagtaattaaagagtctacccgaacaatccatccaaaaatgcccttaagatttttcacatattttgactgaactgaaaatttgtggctgcaggccttatatcgcaatacagtatttatttatttatttatttnnntatttatttatttatttttggaagcaatactatttgaatggatgctgaaaaatgaggaatgacagcatatataggaaaccagaaatgtagtcatattattattatagctgtagaaaaaggtacatataacaataaagagtaaagactgtacggcacaattactaatgaatgaagactgtagcactatactcataacctatttcgattactccaataaaattatacatacaaattagtttctccatctgccacaaacttattaggacgctctataagtatgttgctttgttcaaagtaatgaaattgaataaaatggaaaagtattaatctttttttaattaaattttaaactattagaatgtcaattaatagaataatttttttataatatcttagtgaactaattattttattttaatagaaagaaaaatcactctactgcaagataaaaattaaattattaattttttttatacattttaattgcattccaatctttctttatatatatatttttattctttttaactaaattttatctttcaaaacacactacagaaaatattacttttatattgtcataataaaacttgtgattaaaaataaaaaatttgtaagtaattataaattatcatttttatgttgtgactaaaaactttgtggtcaaaggtattaatcacaaaaatcacaatttattgtaattaattaaatctgtttttagtcgcaatatttattgtgaataaaacaaaattagtgacaacttatatctaaatactatattttagtcacaagttactttttcttgtgactaaaaattttgttgtaactaaaattcacatttagtaaaagaaatataggctaattaggactttttcccccttaactttgacatgtactannnnntgccccctgaacttttaaggtccttaaaattaccccctgaactattgaaattgttggatttaaggatttnnntctaatttcattcaattttacttcagtgattgtttatatactaaatcatgcttctcagactttaatatctaccaaannnnnnnnnnnnnnnnttgacatgtactaaattatggtccctggactttcatccatattagacttttttactaaaattggaaaaaaatccttaaatccaactatctaaatagctcagggagcattttcaacgatcttaaaagttcagggagcataatttagtacatgtcaaagttcagagggcaaaaaccataattagccaaaaatatatatatatcactataatttttttatatgatatttttttgttaatattcatggaatgtttttatgtatattttatgcacacgtatcattaaatttcgttgtttttaagttataaatggttacacaatggcatgcaaattatatatatatactatttgcccattttctttctttcacactagcatatataaactcataagttatatatataattgtaaataaaggccaacttataaatatacatatatatatatttgagcacatgtatagtataacatataattactatataaaacataaatgagtatattataaatatgttataccttggaacttggtgggcggggtctcacttgcatggtgcttgatgctctagctgcagcttatatggcgtatcttttatatatgtacgtatttaactaagcatatatatataaaaaaaaaataattataaagtggccaacaaatatgcgttgctttctatgataagagaaactatcaactactgtaatggaatattttgtaggacttttctgcaacaatatatgcttaaaagcttatacatgtagtattttaattttccaaaaaataaataaattaaaaaagcttgaaagtactgttatgtagtattcagagatagaaagtcatgagataaaggagtacttgagttggtggttcctgtgatgaattaagatgcattgaagaacgagaagactaattatatatgagttggaacttggaaaagacatgttttcatgtctgctccaacacaatatatatatttatatacatatatcaagtgtgtagagaccaattcactttagtgtattatgctaaaagagtattactgattttttttcttaagaaaaaacaattcattgtgatcaaacaagggggaaaatagggaaggtgtgggagctagcttgctccaaaaacttgatgagataagttgtataagattacaagtgtcattgatcaattattatacagtagttatgacttttactcccatgaagtgaaaaagtagaagaaggggaaaaaaaaatgaaccaagtggggtaaggttttagacctggcctgcaattaattactgagtcagaaaatgtatatacagtgatgtatatatgaacaagtaaaattatatatagtagaaataattgatgttaaatgatagcattattattaattaaggaggagctcccttcagtccaagcacagagaaagagggatgcaaaatctctcccgcttcattcacacaaccacagtagaaaaagttatacatatgaatctctctctctct

SEQ ID NO: 16615 - DNA, 4759 bp, Cannabis sativa
  modified_base (2938)..(2957): a, c, t, g, unknown or other
ccacgttacagagtacaacagacaaaatcgattcctcttcttcttcttcttcttcttctccttcaacctcgtttcttttttccataaattaatgttattttcttttcttaattaaataattttgaatcaaacattacatatttatgtatgaaaaaaattgaaatgtatatttgaagctctctgtctatgaatctcatggagaatgaaaatgaaaaataaaataataattaattaattaattaaaaaataataaaagtgggatttgagagatttttgggactgttgcggagagaaggagagagaaaaagatcatctctagttgtttcgactgttcgaatcgaatcgttaacaaattctccaggctacaatctcctgcacctgcgtttttagatcaatgttcattgttaaccaattaaattatgacatgtaagactgcgttctcgtacaaactttttttgattgggtgtgtgttggaggtgtcttggggtcgagtgcagaggatgttggcttacgtttcgtgttaatttgtctaaaccacgatgaatctttgtgctatcacgtcaatgatggggcccacttttgtggccacgtggacccactgagggattcaattgccacgtcatgttatggggctttgaaaggaatgttttccgaaaagggaggagttttttggcttcttcaatggtactcaaacgcaccgtattgtttaaatttttcagataattatttgttttttgaatagggacaagtgtggcactaattaatgctctgagattgtgatgtaaatgaaacttaacaagtcccaagtcaaatttatagtgatgattattgcataaaaaagactcacttatgctttaattgttttattattaactttaatataatgcttatcttctttcttgctatttgattatacattggttgaaatgaaaactagtatttttatgactgaatattttcttgtaggttttaactgagtgaggcatcatcaagttttttcttttctttaatggaagttccattcctttctaaaaaaaaaacaaatagtttgtggctaaatttcctgaaaaatcttggtacaatcaatccttagactgaaattttggagttgaacttctcaatctatactcttttcattcaactttagtttgtcaagtgctaaaattaattattacggtgtacaaaaatatacgtggtaaaattttattagtctacataatattaataatttaaaaaaattaaaaattaaaaataattaagaaaaaaaaacaaataatttttttaaataattattttttcccctttttcttcttctttctttattcttctttgatgaaaactctattatgaaaactcttaccctaaatcactacctcttctctgttcctcaccactctctctccctcgcggttctcttgcacaacagtgctcccacagaccaccacgagctctagtcccataaacttagaaatccccctcccaagctctctcttcctcaatctttctctctgtcgtcatcccacttgtcgacgaagccttgtgatctacgatgggcattgagatttgagggtaagcttgtagacatcgaaacaagcttcgactgagttggaagagctagggttagcagaagccgtagatgaagagaaggggatcaaactctaaaatggtggtaatagattttgaaacttagtggaatagtgaagaagaagtgccatcatcatattaataactagttggaaagaagagaaaatgggtgtttgagaatggaaagtgaaaaagtggagagagtttaaagtatgtctcgagcatattttgcttgacacaagtgaagaccctgttcagtgtgctgaacttcaatacacaggaaatagtacagaggacctagatctttgagagagaattaagtattgaatgttgagatgagttcaacaataacattatggtcactacttgtgatgataacgctatccacatacacaagtaccaaagtgacaacatttacagtaagatggataaacaaagtgtaatctgaatttgatgaaacaaaattaggagacaaaaggttattttgcagcttggtgcgaaattcaaggattttagatgaaaccttcaaggtgaagtgtttttccaaggtattcaaaatctggtgcgatgtgttacagctaaccattcttgtcagcaagctctctgtcatggatgacaataaccaggagctgatcttgcacttcccattaatcaatttcctttgattgcagataagatctgttgtttccacatcaagaagttatgatcgttcaaatggatcgagatgctatgattgaagaacattggatcttgattcacacgttacctgccgagagcttgtgatccattggcctttgcaccagcaacattgtttcccacaatcgccatgttagccacaagggacggaaaatattctaatatcatgttaaaccttctagtcattgatgaacatgaagaacaaaatccgaaaggcagaagaagaagaggaaagaaagaaaaagattgaggataacaaagaaatcttattcattcaatgaaacaatagagtgtttatatacattgaacaacatcaataacagaatccaactaatgacaaactctgctgactaggacagttggagctaatgactaactaactaatcagctttaattggtctcatctagtttaatgtaataatttttagagaatatcgctagtcaagcgcaagacgacatatctagaggtgttaggcactactgatgtccaataataatactcatttgggtttcaagaaccttaacgattcgacagctaagtggggggctagattatttttgtaatggtcttcttaacttttgagaggtgagtcaacataccaaaattttattttttgcttaatgaagtttttcttatttttcaataaataataataannnnnnnnnnnnnnnnnnnnataataataataataataacacaacatgtacatgcgtaaacaaaaaaaaaaaaaaaggaacaccacttggttcataaaaagagttgtttctaaataataaatttgatgaataatataaattattggtgaatgaaagtggatacaactcttgtttagctattttaatttatgagatatattcttttattcaaatttaaatagtaattttttcaaaaaatatatgttgattccatttttaccttttggaatccaaacaaatttctttccagagttgtatccactaaaagttgtaatctcttcttcacaatcaatctcttcctataaatcatcagttttggtaccaaaattgtaatctgaaaaaaattcattatttaacacaagtaaatggagcttagcacaattttcgtaaactccgaaccaaaagtgggccccaaacagagcccattaagacttggacttaaatcataagtaattgggccggcctgaagatcaagcactgaaagcgatacaagtgaaaaaaaataccttaggcttggaattttgtcacacacaacatcgaaacttgaaattcctccactacttattgaataatatttattaagtaataagtacccttttggagttacttcatcaaagattcttatatgtctttttaagtggatttttcacaaccaaaacttgttcttaattagaaccatcattcatttacaacttacttaataattcattaattaataaccaaccaatgaatttttgtccaatatgatgtcatgcatgtcgcaagcggtattctttttaagaccttaattttatctacatagatttcatgtttcttttctttatttattttaaaattaaaataccataaatatgaggatgtatattattgcccaaccaacatctaccaatttacaaataatacatacgaggtaataagattaaaaaaaaattagacccatttgttgggttaattaattatataaatgtaataaaaaaattaaattggttatttttttttacatatatgttaatttattatggtgtttgttgactagtatttttaatacgaaaccgccaaaatgaagagaaccaacactagctagtagctataagttggtctataatattgtatgatgatatatatatacatatacatacataaagcctatatggaccacaaaaccagatatgtgttttctgcattatgttatggcaaattatataccaaaatggcattgattaaagtgttcatcatccaagttaattaaagattaaaaagaaattaaatgttttatttatttataaattccagctaagaaagccaattaaataaataaatagagttaaataattaattaatggtatacttttgcagttgagtctggtcccaaatgtttgtgtcttagatgaccgtgcatcccaaaaagattgttgggaatattctaattcatgaaccaaattataatcattcattgactcacaactaattaattttttttatatatatatcttaattaatatagtaatattgtactgtacttgtatgttattatatatacacacacatacatgaactaaaaaaatattcattttgaattcctaattatatcatagttattattatttcacaaatatgtttgcatgaaatgagacaattatgaattcaattcaaccaatatcaagaattgaatatatacatatcaccatttttcttttaaagaatatggacattgtaaagtgatgaaaagatttcttaaatcaaattaattaactttattaattgttaaattttaaaagacatg

SEQ ID NO: 16616 - DNA, 3774 bp, Cannabis sativa
tattattattatttacatgtgtccactacatgcaatagccatcttttgtcttcaatggatgcaattttgtcctttacaaatcttttgtagggtcttcttcatatcccttgccttgtttctttttcctttattgatgcaacacaggagctatgattcaactcttcaacttttgtccacagaattcacttgcaccaatgatactatacaataatacacatacatcttgtaatatatagatatagatttagatattatgtgaatgaatgtgttaacagcccatctcacagtgcaaaaagtgctttaataatgaacactttactcctgtgctagaatcaacaaagtcagttgctcttgagccaaactgtgcactaaatagaaaatggtatgcagaaaagcctattcacttttataatatcatttcagattgttttctaattagttgagcatgtgaaaaaggacctaatagtgattagagaggttgataatcataacaccgttaagcatttccatttcaaacaatccttttttaaaacattacacacttgcttctaaaagtatcattatttgctttttggggtgtattgaagttttgtattttagtgcctaatatgtatagcaaactgtatcacatttaggctactaactaaactagtatcttcatgaaatttcttcccacaaccacttcttttaactttccctttgaataaaataaagagataaaaggaaagaaataactctgtattatatatgccagagctaccaaataatacatatttgcacaaaagtttctgaagggccactaaaaaacagggagcacatgtagggctactaggcatagtttaaattaaaaactatgccaaaaagataacaataaagtggcaccagcttccataaaacagagattcagaaacaaacatttcaataagctgaaagggaaaggagagtgataatctgataaaactttctatacaaatgtcagcacccatgtgacacgagttggctgcatccccacatgtggggccatagaaaacaatatgtgacaaaagagcctcctaaagtaaagtgaactttgatcatggaatgaagttgcccttttaaatttacccctagttattctctaaaactaaaaaccaaagggaaaaccatgttcaatgaactgtgatcatgtgataatggatatacagtaacaaacagaacacttgaggaaacccagaaagaagaaaggaaaaaaaaaaggatctttcaaataaaatatagtaaaagagtttaaacgaaacaaaacccagaaaagggcagaggggatattaaataaaaatataaaaataaaaggtcacaaacccagtttaacagcttttgatgacctctcctcctgtgttccttctcattttgcctatgtacttcacttttttctctctttttttttttttttttcctttttaactccccactgaaatgaatctttcttcagctgctttagtaaaacatgtacagatcacctaatactcttacaatctccaattcaactaaattcaaccccatgaagtaaaagatagtaaagaaagcaaagatgtgtagacaacaatgtaatccattacaatcttggtcctgctctaagtctctatgtggtccaacaaaaacctataaaaagatcttacacataagtagaaaagagaaaacctacccaaacaaaaactcataaatcatttcatctgtcctttatgtatggaatatgtatatgctgttagcagtattgtatagacgacgatggtgtagacctcgctgagatcgtctctatggatctactctttgatgttggtataattcagctatacatctagagttttcttccttgtctatgcttctaagtttctgcaaagatgaacattagaatcaatcagaaagaaaccacttctatccctcatccctttcttttcatggtgaaagaagaaaacaataatccaacgcatcacttcttacctaagaaaagtcaaatccctgctggccatgtttactcctgagataaagaagcaatgttaagcaggtttcttatgccatcttccactctatgtattgagggcaaagagattaaaataataagagtaatagcagcacctttgcacaagataaatcgttatggattagacgccatatagcaagcagaagagataggtggtggcgaatttttttcactagcaagtgtggtactttcatttaattccaccacagcagtggagaagtcggagatatgattaccagatgccttagtaggagaagcaaagaggttgtcaggaagcacctgttctacactgctctcgggacaaagcaaaatgaaaaggaagaatatgttataaagttcaattaacaaaaaaagcacacataacaaattgaggcttttaatggtgttaaacaatataaaacttgttttctttgattccgggagtttcccctactgttttaataaaacaatgcacaataccttctatggagatcacgatcttctgagacaaagaccttctccttaacatcattgtcaatgcaagcagaatcttcttcttgctgatgctgctgcactgctacttcagaagtcacagaaatggtggcagtagcagttttattacagtctgcgatacaataggcataataagcaccaagtatagctttttatattagacaatcagaaaaaaaaaaatataatgatcgttaattagctaaccttctgggacctcctgtttaacgccatcaaatgaattttgactactgtttgaaagagactgagggggtaagggaacaggagcaccaacagagagacttcgctgatgatggtgcaatcgatcattcttcagctctggtagctgcagattcatcaaccttctcccttggagttcaatcgcctgttgaagttcagcttgctccaattttcttctcaagagaatgtcctgtgtgttgtacaacattctcccgcctgtacagacaacacattatttaaatttgacgagggcaagagaaatagttcaacgtatgcattaaccttctcttttactattatttaagaatgatataagggattaaagtttgaaaggaaataaggaaaaagatgatataaacagaattacctagctgaaggtcgtaggattccctagactcaagtccagaagggctcaaacatgtcgaaaattctcgctcaagctgttgttgttgatgctgctgcctcctgaatttgaatagtaagtgtttaatacatgaattacaagagacaatctagatatgccaaaataaataaaagcacatacttgtctagaacttttcccttctccttataaggcttgacaagaacacgagaatcacatataaaatgaggatttcctttagacagaatgaacctcacagtttctggatggacaaacgtaacaaacccaaacatccgcttctgttggtaaggaatccttacatcttgcacgggtccaaacttgctttaaaatttcaaaaagaaacaattcaattgcaatgtcttgagtttagcctaataatattataactacaataaatcaattggcatttgaaacgaaatgaagatcaattttgcatgtgaaaaatagaaataaaaataacattgttgcgaaaataaatcatgtgttcaagaatattcaagaaaatatacattttatgatgcctcaaagttagtctccttgctgtcaaatttcagaaacatctaacaagcatgtgcccaatttactaatccagtgaaaaggcataaacttttcagaaagttccaaa

SEQ ID NO: 16617 - DNA, 3931 bp, Cannabis sativa
atatgtaaatcaatatctaatttacactttccatattaaattggatcgtgtaaaatggattgagtattttataaacactttcaaattaaacactagaataagcattgctactggacaccagtggtactccacaattagttaacaatattctttaaaaattattttcttaaatgatatgaaactcgagacataattataccaatatcggtatgacatcaagaaaggtgctagacactatagtgccttttggcaattctctatgagaaaatagtagctagggctgagcatgaaatccaaaaaactgaaccgttcaaactgacctgccgaatactgctggaaccaaaactggtggaaccaaaagctaaaaaaaccgctaacgattacaatggccattgaataatcgatttttttgataataaatcgatctaaaaaactaaaactgatcattatacatacattaatttatcattttattaatattaaagttaaaagaataagacaattaatttttgaacaatttatttatatagttgtagaatgtaaactaatgtgcttatagaataaattgaatcatattttaaagaaaaaaaaaatcagtttggccgatttaaaccgactaaaccgaaattcaaaacgatcgattttaatataagttctaaattggtcggtcaattttcgaattacagcaattcagactaaaaaccaaattctaaatttttatctaaaaaaaccgaccaaattagccgatgctcaaccctaatagtagccacaaccactagggtagagctatatggtagccaagggtggccttggccccacccaagatttaggaaaaagaaaaaccacataatattatttataatgtagtccttacttttatagaagttatatatgtttggccctcttttttttacattttggccccccttgaaattttatttttcccctccaccctggccacaaaactcaggaatatataatgtcaagcgtatatttggtctctacaaaacctgtagaaccattatatgaccaacttctattgcttgcccttcactcactccagcaatcgtttatgcttacaccaagcaatagcaagaacatataagaatatacatccagtagtaccgccaccaatggtccacaagaactccggcatacctgcttttttatcgtcaaacagctcgatagtgatattcatgccaaagaccccagccacaacaacaaaggcactcaccaccagggttgcagttgttaacatcactcccatttgtagaaggtggttctgtttgtcatccagcataatgttgatataatcctctgtgtcatctacgtattctctcagcttcaaaaggacaaaccgaattcaaaatcaatgcaatggttgggtgagtgtgtcagtagaggattgaatttaataaacacaactccttctctatttttcaatacaaaagtacaacaaacaatttttctagcacataatgtagcaagaatgaatttcacttaaaatattaggagaaaggctaaaagtgtcgtcactattagtagaattaaatatcaaactccatgaattaaataccgctaaccattcgcaaaatgctacctcatgatggtgctagctaggtaccactaatgcctaatagctaacagtcagatattagatgtcaagtggagttgcataccgtggatagtttgtttaatgtaccatcaatttgaacaaagtatgcttctaaaagcatttccagctcctctacgtcaaggttcttgcttatggcactacgagtagtactagtatgagttccgtggctgtccctatgtgctccaaacaattgatcctgggcattatcagtgttttcaaggtcgccttcataagttctgaaactcgccccagcttccaatgcaatttcatttggaatcctgtaaatgtagcgggacattgtgggagggcatcagagtgagctcaagcgaagacaagcttacaacagaattatagttagatgttacaagcctgtcatccatgtctgatcgacgaagatcatcatctctctcatttattgaagcagtagaggaattctcaagctgttgctcaattaacttttcagttagatacatctcagccatatcttcatcatcgtctagcaagtgctccagctcatccctcacctaaatatcaacatgtacgcacccatgaacatatcatgtgaaaaatgatgcatgaccagaaactttagtagctataaaagtaaaaagcatgaaacaactggagtctatcaagttataccaatgtcttaaagatcagactaattggcaaaagaaagagtttcaaatttcaaatcatccaaccttctgaacacgtcctgttattgcaactaaacgactcttaatttgacggactcgttccaagttgagagtactaatcttcgaagttagcttatctaaggcaggatgagcctctagctccagtgtccttgcctggtagaattcagaaagaaaagaaacaataaagatcggaaaaagcattgtaagtgacttaaacaaatcacatggtagtttataaaccagagtcaggtcaaacttacttcactctctaagcaactacaggctgcctcaaggcatgcctccagtgccacaaactcgaaaggtaaaatcttcagtccatcttgattttgaagaccatctttcctttctccttcaccttcaccatcctgatcctgaaacttaggaaaccctccaccagaattttgaggactatgatctcttgattgtgggtcttccatatcatacagatttgtccagtttgaatcatcaccatttccttcctatattatcaagagagattaacagtttgacagtttactaagaaacctaaagaagaaaagcaagaacctcaaaaatgtgctagactatagtaaaaccagatcattaaaatcaaacataacgatatggatatgatctaaactacatggtgaattaaggacatgaacaactgagtccaatttcaaggcattgattttataaataaacaaatatatgggagaaaaggcataagctaattttggtcaatccacatacgtctcaaatacagttcaataatcacaattgcatatagttccattataattataaattcaaaatactccaaatacacacaattcagatacttttagggaacaaaaaatacttagatgaaatttcataattcgaaccaaaattatagaaaaaaaaaaagcaaaaacaacatgaactggtatcaatagcaccaaaatctataaacaatttagcaaattaatatatctttaatcaaagtaagaaaaacccaaaattcaggttatacgaaagaaaaaaaacagaggataaatttaaaaagaaagagaaggaaaaaaaaaacctgggctttggtagcttggtagtgacgcgtgagtcgtcgttgaagctcttcaacaaaaggcgttaccgatgggtccctagagttgagcaaaagaacttcctgcgctgtgattatagccttgatgtgctccaagtttatcactatagctctctctcgtcccagtacagtcgaagggtatgaaagcaacggatcaagaatccgaagatcacgggcaggaaggcccgtccggcgcatgatggcgtgctttccggcctccaccacctgggcttgccccgttgagtccaccaggagccatggccggactccggttcctttcttacggagaccaccgcccaccgccaagcccaaagcaccggaaatgggccggtttaggtcgggatcgtcttctggtgggccgaggcccgatttgggcggctgaggaagatgacccctcatcacgttcgatggctggccacctgtttctgcttcacttgttttattccctctctcacttgctaaataataatattgttattctattttgaaaaatatttttaaaccattttt

SEQ ID NO: 16618 - DNA, 4551 bp, Cannabis sativa
  modified_base (4512)..(4525): a, c, t, g, unknown or other
aaatacctaacataaaattagtatacgtcgcacataactttttactagtaaaaataaatgcgtaaaaggagcattctattaaatgagctaaaattgagctataatacattttttcagctcaataaatagtgattctctacatgtagagaatcagtattcattgagctataaatattatattatttttattaattttttttaatatatgtgtgtgtgatattaatatattaatgtatttcattttaaaaaaatgatataatatattaaaaatataacatttaaataatatagataaaaaaaaaatagagaaattgatatatggtgtaatgtaaaagtgtgaagtaaaatataaaaaaataaaatttttgtgagatattttaaaaaataaagtggagaagctcatgatagtgctcttaaatttattttcttttattctattatccgtaatgttttttttttattaaaaaaatatattattaactcaaaatgtaaaaaaaaaaaaagaaagaaagaaaaaaatgttgttcttctatattaaagaggtgatgaaaatgttgctggaaaaaaaaaaacaaaaaaatgatgaaaatgatgggtgtgagagtaaagctcatcttgtggtagtcattatataatacataggtacagtaatgatggtatgttgtaagcttctccttcactaattgggtggtagttagctaagacttaggagaagcaaacaaagaaagagaagctcttctttctctctttatttttcataatgtttctctaagtttctacacaatccaactaaccttttagtatctaacattattaattgacatcttccaatgacttacagttttgagaaagttagataaagaaaaaatgattttaagatataaatgtcaattgaagaaacttatttataaccacatatttatgataataaagagttattaattaaaagaatgttgtgtagactgtagtgtacaaggtgttttaaatgctaaattactccctgcttcaatttgtttatgcaaatccttcagtgaataataagtccaaacaccctgcaactcatccacataatgatctccttttcaatttgggtggaactcaaatcaaacttttttaatatcattagttagttcactatacaaccaatcacaatgcataattgtacaatttaataaatagagcacagatgaggaaggaaggtatttatcatcaaaagttaaagtgcaaaaatagagaaacctttttcttcttttctcaaagctcttggggaaaaattacattaaagtttacttggtcagttgccaaaagcaccacttagaggttacgccttgtataaatatagtgatatttcataataattattaaattaaattatatgaaatccgatacataattataccaataacaaattacacctttaggtggtgctaggcactactggtgccttttagcatttctcatatatttatgtatattttccgtcttaacattaaatcatttccctgtgctcatatgtttcatgtcaaaggtacatatctataaagagtacaagtgagagatagaatatgctagctactccatgttgttgtactgaagtgaaaattgagcatccctatatagaatataaaatgactaacgatgttctgttgtaagattatccttcactaacgtcatggtagttaggggaaccaaacaaagaaccaaaaagagaatgtagtgtagtatagttttcttggtcctttcatgctatattatttcgccatgcttaaaattgtttatgaagaagcttgcgtgaataaatcagttcaaacacccttcaatactcaaatcatattttgcctaatattatttgttagttcacaacacaattatttataataaaacatcatccatctaccacaatgcacacttctacaattttgaagaacagaatacacacggggaaggtatttatcaactaaaattcagtgaaaaaagaatcatatagttggcttttcccctctgaaagcaaataaggttcaaatgcagaaacagaaagttcccaatgcaaaagattgaataaagatgcatttgtgacaacataaaacacaagtttcattcaccaactcaagggagagaccatttattaaaagctggaagagtagcagagtaaaacaattttttctcgaacctctcggggaacaattccatgaaaatttacttggttggttgccaaggctggtaccttgtccagttcctctgtcctggattgagggcgtgtcccttcgaatggtagatatattcatcaccttctccagagaaattttccttgtgctcaattccatatctttttggttttaacatcagaagctgcagacgttataccgttcctctgttactcatatgtttcatgttaagagtacatataatgaatagaaaaggttagcagtacttgcctcatcaccagtatggtcagttatgtagtgtaaccaaccatgccattctggtgggacttgagaagcattgtagcgacccttctctgcgtattccacccacctgtgccttcctgtaaaaaaacaacagaaaaaaggtcaatcagatgctacatttgcaccaaaaatgtaggaaacaaaagaaatggaaactttgaaggaatcagcacaatagtgagaattatccaaagacaaaatccattgtagtgtgtcaagacaaaaagagagagcgcaaatactaaccatattgtgtgtcaagttgctgataatacttgttgccaactttatcaacacccacaagcgttgccccaatattgtggatttttgtttgcctacatcaatgaaacaatattgtggcacgagatccataaggacatgtgtaaatatcataattaaaaatgaatgaaaaatcaaggaataggtcacaacataaagaatctcaatctgatgaatgatatagcttatcaaagaatgatccgtaaccatcaaaacttacttataacaaggaattctagccataacagtttattaatgcccatgaatgcaacacaaaatattacaagtaaaagtttaatcttgcattggcacaattttttcatcacaaagtacataaaattccaaaaagaagttaataacagaagttttcatgtataaagaatgaataaaagcattatattacttacattaggttcccatcgagaagggctttcctgcaatagttgataagtatggtcagtagggtacaaagattagagtcaagaatcatcctaaatctcaaaaacatttgaaaaattactaatgatataatcacttaaaagggttttgacttgcaatgcataaatattcaaataaaaattttaacaaagagctttatgccgtcagctccaatagccatgaaaaaaatttgtcattgtcatcaccaaattattgcattttctcaacatttctcttcaaaatcaagcaaatttccagcaacagtataatttgatttccctttaactgtcaatgaaagaacccagttcgatacattcaatatatactttttttaagcaaatgttacaactttctttctgcaaaaacttgacataatcatacccattctttattgaatcaatcaagtgttatgaaaacacttaaagccatgttgttgagagttttctaggtatccaaacacataatttaaggaatgaaaaaaaacataaaaacatattgatttaaatgatatataaataaaaagaaagaaagaaaactgacaagtagccctcttctctgagctccctgaggaagttgccgacgcctctctccttgatcgacttgaatacgctcttcaccaccgatgccatctctctctctctctctctctctctctctcttcccttgttcgtgtcaaaaccttcttcaaaatctgtagaattgggccgatcacacctcagcctaaaacgcactactttaggcccaagcccaagcccaaaagtctatgttaattcaactgttcatatttttattgtgatttttagatttatttacatcttttagtatatttttatgttgttttgtttatcaaaattattcaaaaaaattaaaattattttattttctttataaaattagaaaaggtaatataaaatttaactaaattatcattattaaaaagtataagtatttttatttatatttatagctttttgaaagatatatttgtttttttaattttaattaataaaattaaaccaaaagtaaaaaataattagaaaagagaaatatatttcttataaaaatgggaggagaatttttttttttttttttgtttattttctctctgatttaagtagcccctactaagtcttaatttcatgatagaattttagtaatgagataaatgtaatattttgtgtaattttataataataataataataataataataaaattatcaactttcccaccctattgtccattgagcttgttatgaataaaagcctaaattgtataattctcttagggctcgtttggaatgccgtattaagtcgtattgtattnnnnnnnnnnnnnntatattgaattggattatatatcata

SEQ ID NO: 16619 - DNA, 2409 bp, Cannabis sativa
agttttgggctagacattcacatattagacctaaataaatataaaaattgatatttttataatgtgcggtgcgatttaaaccgcatattaacaattcaaaacattttttttttataatgtagtgagttgcaagtagttagagcggtgtaaagtctttttccaaaataataaacatttaccagtctgaataatacatgtatggataaaccctcttacataccatccacacaattttccctttttttttttcttaaataaatatatatataaataaaaactcaacaaataagaattttataataagaaaaacgaagatgatgaagaatattaaattactgaaatggatactaaccctaacaacaattatccaatcatcatcatcatctgatattccgactccgttaccggcgccgtggccggagcaattccacgcagtggtggtgatgaacttgagcgaaagccaacaagtacacgtgacggacttgtggtacgactggggaaagggtagaaacgtaaatatacaccagaagcaattggcggagaaagaatacgccgttgaatggaataacggcacgtcgttttactactcgcttaaccacaacccaccgtactgtaatatcaccactttcgaagtgggaattactcgccccgattttttacagactgatgccgagtactcggggactcaaatggtagaggggtttttgtgccacgtgtggaaaaaggctgatttcattgtttattatgaagatgttatcactcaccgtcctgttcgttttgatttcgtcgatggtagtaagtattatattttaacccttttattttaaaaaaaaattaattttggtcatcttagcatttttattttgcattttagccctcttaatgtactgtttaaattgcaattatggaattttaaaccacaagctatgcacacatatgaattacttgttgttgattgttttgagatatgaaactccacacagtatcacaattcacaactctactttttattaatagattatgttattattaactcagtaaataatagatatgattatcatgatcataactaggggtgtttattaatcacatctaatatttttaggcatattcagatttaatttaattatatattaaatgttaaattttactatatgatttaatttaattaattttagtcatctaattgatctaatatcaattcgacatctaacggatattggattgaatcggttctattcattagatgcatatcatgtgtatctattggtttttttttttgaaacttatatttatattggtttaattttagtttatccaatattttatacctagtatttatgagatcggatcagttctatctaatattttagattcggaatctattgaattgaattcgattcatacaatctaaaagaaaaaaaaataaaaattttaatgttaattttcatatatacatatacatatatttttgtacgtatagcaacataatatctaatcactcattctaataaaatgaaaatattaattagtttaattagatatttagatgtattagatttttggacatcttatttaaaatctgattcgatccaattagatattcaaaaataatatctaatcttattcaatcacaattgaatatctaatatttgacgattaattgtaattggatcgatcagttatcattagagattgaatcaatttatgcatcataagacaaattatttttggatgaaatggtttgtaacttagaaagtaatattagaaattctttcagatagaccttatttaagtctaatttttgctaattatatgtatatatatatgatgtagctagacattaattttggctttggtatttatttattggaaggtatagtttgagtaattaatttgtgaaattatatatatttatatatatgcagctatttataactacgtgatgacatttgaagttggtgcagttttagctgattcagaagtccaagcacctgccttttgctttaaccaagatactattagtgaaatatgagaacaatattattacatttgtagtattgtatgactataattttctgttttttttttttgatggaactataattttctgaaataaagaaacatttataattaggtattttaaatttgcatgcattgctttgtaaatgaaattgtttgatgatgccattaattctctttagtagtttaataatgaatagtgtttttatgtagaaaagtattatttattgctcaaaatttattttacttgtattttgtttgttttatatatgtgtataaattaaaattatataattaaaataaataaatatggtgacgtttatagataaattaaagtagacctttacccctagcttgagtaaggtgggtgtctccaagaaggaaaaa

SEQ ID NO: 16620 - DNA, 3942 bp, Cannabis sativa
aaataagtactcatgtctattcagtaagtttatagtactatgttttcacatttagaatttatttctttaaatggtgtaaattataattatttaaaattaattataaattattaaaatattctaaatattttatagtattgaaaataaaatttaaatagttatttgatacttgtataaaataaaagtcacttatggaacaaaacatttaaattttattttcaataccacaactatttaaattttttaaaattttactgattatcttgaataactacaccttacactattataaaaaacagtttcattaaaaaaaaaatactgaaatcaataagtgatactatagatttttccatgtaatataactaaaaatatcatatccctaaaaaaaaaatataactaaaaatatcatataaaaaaatataactaaaaatatcatgtaaaaaaactatataactaaaaatatattaattgattaaagactaaccatgcaatcgggtaagcaggaatccgggtcgagatcgggtcggtccccagtagtccatggagacccgccttgagtagcccaagcagtactgacagcttcataatccaatctcaacaaaatctgatgtttctgtttcttcatttttttattcttttttatcaacatcatcatcgaactagtactactactattcttcttattatcaaaaacgacgtcgtttacatcatttccattgtcgtttttcatttcctttatcataatattattctcatcattctcctcctccacaccacacgacggtgcaggtgacacgtcatcgtcgtaatcatcgaagttgaactgaaaaggctccctcgtgatcatcaccatatcatccaaactagtattacctcctaatccaacggctaataattgatcatcattctgatcttcttctttttcaacctttacacctcctgattcttctgttgtcgttgtcgtttcatcttttgaatccacaaagcccaattccttcataccaaaacactcatcattttcaagcccatggcccaataaactctccacgtcagcagcgaactccgccagatcatccatctcttgagccggaaaaacaaacccatttattaaattattattattattagcagctccaaacgacgtcgttgatttcgatacttgtgcgttttggcttgccacaacgaaaggatcgtatacgggaacacggtaaagaagctggtcctcattttcttcttcgggcgaattcaaatactcgggtaccaaagaaaacgggttcggtaccgtacccgaacttccactggagctaccgtggggtttgttgttgttgttgttctgtttcgcttgtctgggtgtacgtgcttttttagtgaaccctcggtgccacgtaggcgaggagggtaattcggtcaatttaatcggagacgacgccgttttgagtcgaactctctcgtgccttttggctaaagagtttgccgagtgtacggaatgatcgcatgactggcagaggaaagcatcgtctgcggcgcagtaccaccgtgcgcgcttttttacgcagctatcgcaggccctcgctgttttacctcctacgacgtcgtttgatgccttcttgttataaatcgaagtagtagtagtagtagtattgttactcatatttctggaaattaaaaacggaaaaaaaatatttatatatatctggaaaaattctaatcacaaaaagaaaaagaaaattagaatttttgaaatcccagttgatagagtgacatttgaaaaatagtttgattttttctatatatgatctctcaatttgggaagatgacccacaaaacaaaagtaagcactttacagagattatatatattatttaatattcagtgagaaaagaaaatatggtgtaatgcactttttggattgtacttttctttttctcttttttcttttagcagagattggattatgcactttgggtcccacaagtttgccttatctggtttttgattgggtaagaattgatataatcctaattcgtgggttctgattggttaccgttgttatcgagcgatttctacaaatggggcccactttttttttggatgagaaattaatgagatttttgaaaaatgaatttgttttgctgtaatttaattcttatgtctcggctttctctgcccatcttttgctggtaaccaaatgaaaaaaattgaaggggacttgtgtttgttttttgttgatttgcaactcaatgcctttttggtaaagttctatatatgcggtagaactgttaagacgggacaaatacgataatatgactctaaacccgcacaaaaattaacggatttggatttgggtttgtcttaaatgagttcgggttgtgtttgggttgaaacttctaactcgtttaataaataagttgtgttcggattgatatagctaacacgaaacagatttgttagtgacttatttaaagttatttcagtactttaacaaattaaaaatgggtcataaacgtattgaatacttcataaacgtgttattgttattggttaacatgtttaaacaaaatatacttataaacgggttacacgggtcgtgttgtgtcgacccgtttataaacaagtcgtcttcgagttttattttctgacatgattattaaacgagtcatgtttggatcgagtatatacttattatacatgggtctcgatacgacccgcgaacataaattgctactcctaatatgcgagaacattactacgagacattaaagtacctgacactactataaaatgatgttttataattaattagcaattttttataatatttattaaaataataaatttcacctgtaataatattacattacaaagatagtcatacccttttaacattttcttatgtatggcgtcaatggagtcattggactccatcattttttcatccatttgtaaagagcattgttgtactaataatttgattaataagttagcgtctagcacttatgaggtggcaatgacgtatacaatttgattaataatttttattaaaataaaataaatgagatttaatattatattttttgaatggagttagatctgatattgaattatacttatagtaatattacatatcataagggtgctaacattatatttgtaaagagcattgcaatggggtttgtagcatatttcggcctagaaggaattttcagtacatttgttatttgtttcgatattcaaaaaaaaaatttaattttaattttttttttctgtgtatattataactatttatacgttaatattaaaataatttaatttaaatagtttatacgttaaaaataaagtaaagacaattatttaataagaaaataatcacacatataaaagaatatttaaattttaatttgtcaagcaaaaatttatattaaaaaactctcgtcaatactaaaatataaggttctttcaaaaaaaaaaaaaaaaatactaaaatataaggataccataacacctttagaatatttcataataaaactcattttaaatttaatatttattttaaatattaaaaatgttttaagttttggcatcatttttaatgtttttaagggctcaactaattgtttcactagacacattatgcactccttatcatcaataattaatgtattatttccccattattttcttatatccttgggtaaactttttattttattttctttaaaaaaaaaaagaaagaaataagaaatgatatatattatattatattatgatattgagttttgaaaatatatatataattcttaaatatttttttttgtttatgggtctgatatctaaacaaatagaatattaaacctatgcactattgaatcaatcctcaaactcaaagtattgtaattttcttggcatccattaattctttgaattttattaaaatatataaaa

SEQ ID NO: 16621 - DNA, 7297 bp, Cannabis sativa
ccctcaatattctatatatactattgtattccctccaaaacactacccttaatacaaagactcaattaaccttttatttaatatatgttagcacaccatactaatcctaggtcctaacaatgaataacgcagatgactaggtaatggttgcgatgccttgatagctggaaagtaatgtctggtgattttttttgttgactactataatatacatgagaacgatctgcaataatcttgatatacatctaaatttatgcacttaaagaatgcttatgtttttattatattttgtgtagctgttcaacagttggagctattattatgactccacttcttaccaaacttcttgctggtcagcttgtacctgttgatgctgctgtaagttcaccgtaacttaattattgcttgaatttttgtattctaaatccaatatacagttgacaaggttgaattttagtctaacactagacaaaaatttcgataatataatctcaatcccacaaccaacctagatattttatttgtcgtagttatgaggagtattaatcgtctctatccttgtttctccatactttttaattcacccaatgggagtcttactttagtcctgcttgattttcatagcaccaagatctgtaattaagggaaaaaaagtagtttgtacaaactattaatatttatatggaaattagtctggacatccaaattgtaacaaaaattccacatcagtggagaagtatggggcatgaatcttaaaaatacttctatatctagtatttaatgtgttatatgaaggttttaatgtaattactgagtaaccagtgtcatatatttcaattttagaaaatttgcttttactttgtctgtgatgtttattcctttaagctatgcagggtctggcgatgagcaccttccaggttgttctagtaccaacaattgttggaggtaactaaaaggtgtcaatacttaagtacaaaaagcattcattatcagtgctttctgcatctaatggtttggtttttattcctgctctttccggcagtgttggcaaatgaattcttccccaaattcacttcaaaaattgtgacattgactcctttaattggagtgattctcactacccttttatgtgcaagcccagtaagtttgaaaagtattcatagatgccttaattacgtttcattgtagtgtaatagaaggatttccttttcatcaaatgaactaactagaatatttaaaattcagattgggcaagttgctgaggtcctcaaaactcaaggaacacagctaatattgccagtggctcttcttcatgctgctgcatttgctcttggttactggctttccaaactatcattcggggaatccacttcacgaaccatctctatagagtgtggcatgcaggtaatgaaccatcttattatttgctcatgatttccttctaaactgtcactgttctgcaatttgccactgttactatgtgcttgaatttgaataaattatactgtctttgtttctacatgttaaaaagttatgtccacataacttggtgtgaagaaagaattaatcattaccagttgctggttgggtgaccagatttatatattagctaataaacacaaaactactaatgtacttgtttttatattggaagaagaagcacatcagtaaatgcaatactttccatcataaagagtgaaatttcagaatcatttatgctcaccatatgacacgtacttatgaacaggataacaaagtactatggaagctaataaatattattcaattcctcatcatttatcttatatataaacaaaaaaggcattatcaatacacttgatagaatatctagatttttatattttcatcatataactagcattttcttttcccaacttcttgattttactagcagataactaaatctaaagtggctgttattatattgaccttgatttttttattattattattatcatttgcagagctctgcattaggatttttacttgctcaaaagcattttacaaaccccttagtagctgttccttctgcagttagtgttgtctgtatggcggtaagactcatttactacccttcactcagaactcttttttctttcccagctaattttgattgcaaataaccactaactgtaaaatataaccatgtcctttacagcttggtgggagtggtcttgctgtcttctggaggaacagaccgattcctgtcgacgacaaggatgattttaaggagtgaagatttctcttgatgatatgttggtttaagagattttacacttctcattcttagttttttctttatctttttttagaacatgagtgaaggacatagcttttaatgattcgaatatcaatgtgggctgttttttcttatgaaaattttcatgaatgtgttttggagtttccttttttctgctttgcttttttgggctcaattcatatttaaaaattataaagttttctattatcagcacattaaattaatcatgagaatggaaaacatgatgtatattttccatgtgctcttctgggaaaattccttgcaacagatttgaaatctcttcccatattttttgagatttgtgtgatgcttttcctctgattttttctttttctgaagtcactgaataaaaaaagtttctgtagctaaataaatggtaaaaaacaaaaacaaaaaagattaaataattacccatcatgattgaatttaaagtaataaattttcagcaggcagaaaaaggagaagctagccttagacttcagttgggtaattaataactattctaacttatttaatttcaaaatctagatagattttgtttacagaatatttgaatttatgtggcaaagaatatattttctattatttggttggtttaaagaatatatatatttatgaactgaagtaataaaatgtgtggaaaagtttaatggaatttcattctaatatttttccaagcagacaaaattgagtgggtctgtctatctatctctctattccttgggtggtgatttgaaaggaaatgtatggtgttttgtaatttgacttttagaagtcaaataaggattgcttttttgcctttgggcccaaccactcatttattaataatagcttcttcttcttcttcttcctctacttatttcttagtacacctaacactgatacagatagtgatgccagcagggatccatggtcacttgcataacaagtttcaaattaccaaagcaatgattcaacaatttcttcattattattttactttaaaactcatatgattgaatctgattggaggcccctacatataagtatcctactatccataagtgatccattttatgtgtacaaacaatacaataataatacatctttcgcttctaattttatcttaaaagtaaaaaaaaaaataaaaaagatacattttaaattatttccaaccatgactttaaacatatttttctttattttaaatctgcaaatattaactttatctttaaataaagttaatttgcattagggtaaaagagggcaattggcttattatataagagtatgtcatacatttaagtgtggtttagtggtaagttgataggtttatgtttatgagagcaaaatttcaaattttgccttctattgttaataaattttacctctcgtgacaattttttaggtcaccactattgtaatttttgtgaataaacaaagtatacataaataattaaaggaatcactctaaattttgtttattcattcacatggtatcagagctccaattgataatgtgtagaaacttaatgtcatatataaaatgtataatctattccttttattgctaattaattttgagaatgaacctcatacatcttaccatacactcaccttattctacattctccaccacactcttacaatctaacatgatatcagagccagataaaatataacgagtatttgacccaaatccaaatattaattcaaaaggaatagccaaaagaatgacttgtgatttgagaaaagtgagccataaaaaacgcctaagccaaatagtcgcttatgatcaagtcatccaagattggtaagcaaaaaaaaaaaaaatagtcattattttgagggagaaagtctcacattgataatgcataaaaacttaatatcatatataatatgcatgagtcactcctctcattgccaattagttttgagatggaacctcatgtattttatcacacactcatcttattctactttctttatcacacattcacattctaataatttaatgaacaatccaggatttcataaaaactcgggattaagattgatatattaatggtcatcattgtgatatgaataactcttttatgataaacgacacgttgataaaagatgttaattcaaattggtttagtcatgcataatcaaatttacacggtacctacattgaatgtctatccacaaatgtggtccgaatcaaaatcacacgtgctagagtataatgcttagtaaattgtacttggtgattttattttaaagatttcatactttgatacagttaccaacttgttttattcatattctatgatattaattctttcatactccttacaaagagtatacctactctatatgaataaataatttttagatatttattaattatatttttataattaacacattaatttatcttacacttgtatatcatttattttctaatatattatccattaaatatttgcttttagggcataaaccctaacatgtactgttgcaaatcatccgctaacactctcagaattaacactataaggaaattaatattcgatcctttcagaaagttttgattccattattgtatagcatatttccagccactcgtgttattaggttctcaaaacaaaagttataagaatcatcttatttgagaaaatttaaggagtaaatcaaataacttaatgaacaaaaataagagttcatgaatactcagaattaagactagtctactaatgatcatcattgtgatatgaataacttttttatgataaacgacacattgataaaagatgttacttcatattggtcgagtcatgcataatcaaattatgcacgatatctttactaaatgtctatccacatatgtgatccgaattaaaatcatacatactagactacattgcttagtatattgtacttggtaattttattttaaagaaatcatactttaatacactataaacttattttatccatattgtatgatcttaattctcttatcattccttacaagatcatacatactctatatgaatatggaatttttagatattattactcaaaatggtaaactacgtaagtgtacatatcaagtagtactcacataagtaaggtcgaaccacattgaattgaaattgaatactactaaactagatttgtatttctatttggttaatcgaaataatcttgacaagaaaaataattaaatttaacagaaaatttaaagacaacttttaacgttgttcaaaatggatggaagattagaaatatgaatctcgttgtttcagttacccaattgttaatgcaatttattaattttctttctttaagtgatgacaaattataaaaataactacaactcttctcagatcattaaggtcctaaattatatattataaattaacatataatttacattaagtaataatctaaatatcacacaagctctgtgaatactctcatttcacataaacctatgtttgttctattagagcattcatgatattcacttctcagtaatttgcttacccctagtcttcttcaacactggtgcatgtgcctattgatcttgatcctcatttgtcactcgctgctctactcctggcctctcatattatttactacttctcaatgcaattgctttgcaatattctttggcctttacttcactagtgtcagaaaaattcccttaagcatgttgtgccataaaacttgccaactgatccatctgagtctcaagactttggatcacaccctagtttcagtcataaattgattaagagcatcaggttgaattttattctttggttgaggaggctgctaaagttgtggttgttgtgggccaaatttttgtggagggaagccttgttgttgttgttgttggttagctggttgcccttgataattaggccaacaacagcttgccatatccctttgatacgattcctggattgtaaggattgcttttgtacttcatgatgtaagtcttgaaactgctaagtcttgatgtattgttcggatcgtctacccttgccctactcggtcaggcagactctatccgtgcagatgtatgctgaactctgtttggaatatctctttcagccagatgtaggaaataggagtcacgtgtcaccaatatgtgttgtcacgtcatagtgcaaaaaatgggataacataatttatttaaaattgataaataaatatttattttcattctaatcaaattatggagctttttaatgtactgcgcttttgagctactttatttatgcttatgtgacgtgccttcggacttgttgtgtcgtgtcatgcttaagtttatatttttgtctcgtgtcgcgccaagtttccttgcaatatcttatcatatcgtgtctaagcttatatttttttttttgtgcagagtcgtgctcgtgctttacaagctcatgtcaattttgtgtcgtgtcaaaactcttagcctgtatttgtgacactagccttaaccacctaaattcatctgatggagtatcaagatgcaatacaacatgataacgactctcaaacctattatcacgacgataagtatcaatgtagtcttctaactaagtaaccatcaaattaggaggcaattgatgattaatagttgaaccacttaaatttttaatttttatttcatatttcttaaattttactcgttaatttttcttaatcttaaaaaatagtgttttatatttatttatatttatagcttaaaaataagcatgaatgagtaatttccataatttatactaaataattatgaaaagaaataagaatgcacatagtcatcgaagtacatatatgataagttgattattatataaaattcccatgaagaaaaatataaagagaaaagttaaggacaatcacaaactaatcctaatgattattaggtaggtgacttggatttgctttcttatcaatcactagtggtgattgcttaataaattgacttgccgttatttgtagaatgctcataacataaca

SEQ ID NO: 16622 - DNA, 5279 bp, Cannabis sativa
  modified_base (3931)..(3931): a, c, t, g, unknown or other
ataaaaatctaaaatcaaaaccacataacttatcatagtcttgtcaaatttacctcatacaataataaatggacaactaaagttgttcattaaaaaaaaaatagacaactaaagtttcattttttattttttattagcaattaataaaaaaataaataaaaataaaaattaaatgaaagtcttgtgctttcatcagtctaagtcgtctctgagcttgacaaaaatggccggcttgtttgacccgttaaaacctctctaatatcatcatcttctctctccatctctccttcagaccaatctgagaatttttccaccaaagtgatttgcccattcacactctttctattttctcttgtttatttggggaaaaagtttgttaatttgcccatatgactttaaggtgtagacttagatgtggacttgcttttctatgaaccgatggagttttcattttcttctgcaaaagaacccaaattcaagctctgattcaagaaccctttcaagggtttttaaaaaatttcactgtggtttctgaatttggactgtggattctcaggtgggtatttgagttttttttcttttcatttctgaattttgtgaatatttacaccttttatctttgttcttaattgagtcaactcaattgggtcaacttaaattttgagactttgtctatgtgcataatgtgaattttcaagttttagtgatgaaaacaaatcaattgttggttgatgtgttttaataatatcccttattattgcttttgaatttgtttgcagtccttgtttggtgagatcattggccagcctcaaattggggttttgttttttcttgtttgtattggtttggggattctggtggctatgaatcccaagaatatggtgctgagtagcagagttgttgaaagtttagcttttattcttttatggttggttcttcattctagcttttgtcatggtgttcagagtgatattgattgtttgaagagtataaaggattcattagaagaccagtttaattatttgaactcctcatggaattttaacaataatacagaaggttttatctgtaagtttactggggtagaatgctggcaccctgatgagagtaaagttctaaatatcaagcttgctgatatgggactcaagggtcaatttcctataggaattcaaaattgcacaagcttaacaggcttagatctttcaaacaacaagttttatggttctattcctgaaaatatctctagaatgattccatttgtgacaactcttgatctctcatcaaacaatttctcagggtctataccaaaactgctctctaactgtacttatttgaatgttctcaaacttgatcataatcggttcacgggtcagattcctttagagcttggccagctctcgcggattaaagaatttagtgctgccaacaatcttctcactgggcaagtgccaaaatttcaatttgcaattacagcacagagttatgcaaacaatccgggactctgtggggaaattttggatccttgtgaagagactccaaagaaaaatcggactgtaattattgtggcgtcagctgttggtggtgtgacttttgcagcattggctgttggggttgctttagccttcttcttccgtagagtggcggtgaggaagaaggaagacgaccccgaaggaaacaaatgggcaaggagcttaaagggaactaaagcaatcaaggcaagctaattcactcaatctatccaatgaaatatagtttatgcataaattgaacatcatataacatttatgtgtgcaaaatttcatatttctgagcttaatttagtaagtgtagagtttcattgattagtctttcttacttatattcaggtttccatgtttgagaagtcagttacaaaaatgagattgagtgatctcatgaagtctacaaacaatttcagcaaggacaatattataggatccggaagaactggaacaatgtttaaagctgagcttgaagatggcagttctctaatggtcaagaggttgcagcaatctcaacactctgagaaagagtttttatctgagatgaacactctagggagtgtaagaaaccgtaacttagtcccacttttaggattttgcatggcgaagaaggagaggcttctagtttacaagctaatggttaatggcaccctacataataggctgcatttcttggaagaaggcgataagcctttggagtggcaaacaaggctcaaaattggaataggggcagctagaggattggcatggctgcatcataactgcaatccccgtattattcatcgaaacataagctcgaaatgcatactgttggatggagagtttgagccaaaaatatcagattttggtcttgctagactcatgaacccgattgatactcatttgagtactttcgtgaatggagaattcggcgatctaggctatgttgctcccgagtatgcaagaactcttgtagccacaccaaaaggagatgtgtacagctttggagttgtgcttctggagctggtaaccggtgagagacccacccatgttgcgaaagctccagaaagcttcaagggaaatttggtggaatggataacacagctgtctgggaactctgaactgaacgatgccatagatgaatccttaactgggaaaggcgtagacagcgagctttttcagttccttaaagttgcttgtagctgtgtagtagaaactgcaaaggagagacctacaatgtttgaagtataccaacttctaagagccataggagagaaatatcatttcacagctgaggatgatatattagtgcaaaccgaaaacggtgatgctggtgtactagaggaactcattgttgctagagaaaactgaatggtaattgaaaaagatgaacatcactattactcatttgtaattatttttgctgcagtattgttagttgttactattacatattttggcttctttaggtaacttgttactttctactagtgtatgttaagtttgttgtaaaattctagtattattttacaaaactgtgaaagttatatatatatctatatatatgtctccctcatgtgatgatcatatgaaaataattcaaatctttcttctttagtcatatcacctatatatctattctcatgttaagtattattgttgtattgtttgtatctattatgcatgtgagactagtcaagatgacaatgttcaatgttcaagcttattagattgttttgatgaaagaaagtaaatcaaattctttagaacaaagttgaagcttatctttaaagtagagaaaaggaaaagggttcacctttacaagtttgtgcaagctaagcttttatgttgagtcattgtttgttgtactgttttttctttttttgtttgttttcatttgccctatctatctacaaaataatgtcttgaatttagtggataatcataaatttctctccattttttcttaattataatatatgaatatttacagtattattactgtaaatatctatatgtatgaaagagtaattgtataattagtaattatgttatattttaaaatacaaaatgtgtttagatatgaaatggtaattacatatgaattcttaatattttatttgacaaaacagtaagtaattacatatgaaaataatattttttagtagtttatatttaaaattaaaaattttaggtaattacacagtgaaattactaggattactttttgtccccgaatgttaaatggggtgcggacagggatcacactctctgtcccgacggggacccgtttagtattttatttatatttttaataatattttgtaattaataatgtatatttgcatttctttagcatagtattatttttatgaattttaagttatgttttggataataattagtttatttaatgtgtaatattttaattnttatgtaatttaatatttttatatatttaaatttttagtgtaaactttattttttttattaggggattcaccacccccattaggagatttcccgccctatccccaatggaaaataagcggggatggggattaaaattcttaacgggaatagaaacaggggaagcactccctgctaatttctcgctccgtgtgcatccctagtaattataccccatgagtactatgatgaaacaaatgactaaatgaggccaaactatagccaatagatgtcttgtagaatgatattttaatatatttttgtttagttttccaataataattcaatttacaatcatttttacactaatattttaatttttaatggacatgttgtagaggtggtgcagtagctgctactcctactagcttactgggctcaacctccgtctctgtcacacactctagtactactccgacatcttcatcctcttttgcactaagagtttggttttagactttgctagacaatctaattgatttgttatgtgttttttgtttagttttggactttgacaatcaagctttgatagattgattatatagataattacataaaatagtaatttttgtaaattttttacacttttacatttattatatatatatttacgatattctctaaaaatataagaaaattacatgaaagtaacaagaaaataacatcaaaataattttaaaataatatacaaataacaaaaaaatcaacaataaaataataagagtacaacagaaaaatatattgaaaaactgtattttatataaataaaatctgaaaaaccgtaaaaatattaaaattccgtatttttgtaattttttttgttatttttgtgatgttttaaaattattcattgattatatgtttggactatggatttagttttgtttggactttggactatatactttggtttatggactatgaattttggtttgttggagttgttgaattatagattaagattaacttttcttaaaacttttaataagtttagaaggagtaaaaataatgagtaaagattttattttataatataaaagttacaaaaatagtattgtaagatgtaaaaaaaaaaaatagattgttaaagagaaaaaatttgttgaaattttggggacatgaaaaaaaatgtaaaaagaagatatatttaaagaaaaaaaacatatatatttttggtggcccaatccagcccgaaaatccactcgaacccactcaaggggtaagttgaaaaatgcctcttttattaatcaattaaccaaatttacctctatttttttttttaattgaaacatacctctttttatatgtatt

SEQ ID NO: 16623 - DNA, 10503 bp, Cannabis sativa
  modified_base (9744)..(9751): a, c, t, g, unknown or other
gatctgatccaagatccaataactatccgaatgtttcggatcagtaatgatccgtcggatcggatcactgatccgatccgaatgaatggatctttttgccatgcctagtcctccccatgcttagaaccaatcaaactaactatccagaaacgaaaacttcaaggattcattcgttccaaataggaattcaggaatagcaaagagaaataaatgaagagaaaatcgaagaaaagactcaaaaccaaaaggattttgggcatagaaaatttttgccaacacctctgttgcagaacgatcagttccaattaaaaatataaattttaatataaaataaaaattattaaaatagtaagtgtttaaaagtttttggggaatttagatggtaaataaaattttaaatttatgatttcaaattaagtctaaattatgggtaattaatcaaacttctcacacatatcactcaccaaaacataaaatagagagacattttctttatatttggacatatgaaacatataaaactcaaatttctgaattaaattttacttaatattacattttgtgtttcatagtaaaacaaaattaaattccgacccccatcgggtggaataatcaggactcaggagctcttcctttcctcccttacccaaatctctctctctctctctctctctcttcggccatggacgtgctctcagtctcatccacactctattctccccttccctccaccaaactcctccactcctctcgccccaaacccttctcctaccacctccctatctcatcccccaaaacctccattttcaaatgtttccaagcaactgcctctcccaccccaaaaccctcctccaacccccataatttcaccccttctatgctactagcttcctctcctcagggccccgataccgccatgagaggcgctgaggccgacgccatggggcttcttctcagagagaggatcgtcttcttggggagtagcattgacgacttcgttgccgacgccattatcagccagcttctcttgttggacgccaaggattctactaaagatattaaactctttattaactccactggtggctctctaaggttcgaataagctttgttttatttctgggtttcaattgtttgtataagttagttttaattttaggttcaattttttgaattgggtttgaatatggaatgtatattgggaatagtgattatgggcgtgattaaatttaaatcaagaatctataaaatgtttgattttggtggtgtttgttgctagtttagctcttttaatggattaaactgcttggagttgaaatgtcatatatatgtgcataggtaattagacgcccttaaaactaactagctgattcccaatttcttgctgttaatcctatttagctgaaatttttcactagaataagtttgctgagctgattgcttatggtgagaacccttttgtcttagtttatgaattccaattgtgtatttaatggcctaatgtggtcactcaagaagggtagcttaaatggtcaggcatggagtaaggtactagggtgttaggttcaagttccttctgtctacttagatatcaactgatataggttttcggtcctcaaatattgttggggttagaacctagatgaagagcctagttaaaaggaaaaaaaatgtcttaaggtagtcaaggattgatctagccttgtaattgtttccagcatgttttgcttgttccaccgcacttaagccctcgtgagttggtgttgaataactcatctctggtctcttgtttgtggggtgtagtttctagttagataagagcagacagaacttcaaaacttgatgagaaagttaaagttttcggtgtgtttatgcattcatgaaattgtaacgaaccattacataaatgcatatggtttaaagttaacaattttcagctatgccaagtcatttctagttttagccacttagagcaagtaaatctagttgcaaacttttttatccattcaggtattaatctgcccgaattgagtgtttcgctgaatttgtgtttgcagaccgatggcactttgccccttatcagtgctatcaattaattgattacacagcttaggctttccaaggtgttacttcttcattgtgttgtgtgccagacttattgtggatttagggcaattgttaatatagtttcccggtccctaaatattgtagatttaagcagggatcctatgtagtttcttttctttatctttaatcattgacccagttatttcacttttaggttgattattgagatttgttattttttgcgtattgtttcgacatcagtactctgtgttgcctcgctaatttcttgattttatgtacttcagtgctacaatggctatctacgatgttgttcagcttgtcagggctgacgtatccacaattgcacttggcattgcagcatcaacagcttctgttatccttgctgggggtactaaaggtaaacgctttgcaatgccgaacactagaataatgattcatcaacctctcggaggtgctagcggacaggccatagatgtggaaatccaagcccgagaaatcatgcataacaaaaataatgtcaccagtattattgcaaattgcaccggtcgctctttcgaacaagtccagaaagatatcgacagggatcgctacatgtctcccatagaaggagttgaatatggaatattagatggagttattgatagagacagcattattcctcttgtgcctgtaccagaaagggtgaagccaagactaacttatgacgacatcagtaaagatgcaaggaaattcttgactcccgatgtcccggaagatgagatttattaaagcttttggtgttgatacaagggtacattattcataaactttcatttaatgtgttagttgcataaaaccttatgcctcagccacatagtttaggatcaagaatttgtggaatggagttaagaaagagttgtttttcccccccaaagtttgagtaatttccatgtgttttgttttttctcattagaattaatttcagcaaaacgtactttggatattgctgtttttacaagacaacttacctttttattgagccctgtaaactgtgaaaccacctaccacaagatttacattaatttttgtttaactaattctaccagttataaattgacagcattttaaaatgaatattactattattattattattattattattttaacttaaactatatatttggtttacaattacatgaacaattattttgagtggaatttttgacttggcaaggttataaagagtttgcattactcaatattttactcgatgtttattccagttatatattccggagagcctatcagtgtttaaagaggagaaagaaatgtggttgaaatctagtgtaaatggcaagagagaaggggacaccaactcaagattattaaacaacttgtaaagcgcccgaaaagtaaagaacacaatctctaggattgagagagatgacaacttaattttagataaagaagaaattatcactttcattcgattccaacttagtaaaatgaattggagtaggggtattcataaaatacttaattcaatcctattcgtacttatacgaattgatttgtattgaaaaatttaaaatctatacttgcagagattaaatattaatgacatgtaaaaataaccaatcatatttaatccacatatttatatatatttgtaaaaaaattacatttataattaaacttatagaaactctgaaactgtattgaattttaaaagcctaagtttctatttatagaaaggtaaaaggactaatgtgcaattaaacttattacaaattgtatgtgggtaaaaatgtcaatactaatagttaaaaccggagtgacaggtggcacccgctgattggttgctttgagtgaggcagtgccacgtgtcatcctttgattggttgaaaaatgagagcaagtggactttttgggctgaagaggaatcgagcagatgaagcccagtcgcgcctcaggcgcgtgcgtgacacgcccggaccaacgacgtcgtgtgctacacgcgcgcgtgggtcgggttggggggaaaaggagcagttacttctagtgtcttctgctgcacgaactcggaggtgccacgtggcacctatgtcggctgggagaggattttgggcccatttaggcttttgtcttttgtgttgttattggatctcaaaataccatcttttatagtttttgggccacatttttgacaactttttattctttttcttttacaaatgttattcttctcaataaaacacaaacaaaattaaattaaatcaaaatatttccaacataaaatgtatcacattaattttaataaaaatatatatttaaaatgtaattaatttgtaattctttgaataaaaataatgcattttcttaactaatttttttatttctttttctccattatgccataaatactaattagtatctataaacaaagataaaattaaatctaaataaaatattttcaacataataatatattgcattaatttcttgaaaatattgtttaaaatttaattaattttatatttttatactatttaatatgtaattttttggcatttaacattgcttgtagactgaaacaagcagaacagagtagaacagagaggaagaaaatcatgaagcaaagcttatcccataccagggactttattgatatatatagcttaagagagctgaagcaattacaagacaaacacaattataacagaattggtaaaaatgaatacaaaagcttaacataaacaacagaactaagaaaaactaactaactaatcttgacattggttatcatcccccctcaaacgaaaaggagtagacacccctttgagtatggttttgagatagtgaaaacgctctttgaaaagacatttggtaaagatatccacaacttgatcaatggtaggcatataacgcatatcaagttccttattcaatagctgatcatggacaaagtgctgatctatctcattgtgtgttgcacctagcatgaaagatggaattcgcatccaatgaagcagccccttggttatcaacccaaataacaagcacatcaacaagcttgacttgaagttcactgagaagagaaagaagccacttaatttcagcagccgtgttggtaagcgcacaaaattcagactcaatggaggaatgagcaacgacttgctactctttagctgaccatgagatcaaatttggtccaagaaaaatagcatagcctccagtggaccttcggtcatcgacacaactagcccagtcagcatcaaaataggcaaaaagagacagcctaggtactggtttgagaagaattccatcagagatggtgccttttaagtatcggaggagccttttgcaagcttcctagtgtacatgagtaggagcatgaataaactgggacagcttattgagaatgtaagcaacatcagaccttgtcaaggttaagtactgaagtgcacccaaagtacttctgtataaggtaacatcttcaaaaggagccccttcatgcagagacaatttgtgagaggtggaagtgggactagcacaactcttatctccttctaagtgaactttgagtaagagatcagttatatacttcgtttgggacagatatagaccttcagaggttctatgcatttccacacctaagaaatagtgaacttgtcccaaatctttgagggaaaattgattgttcagatcaaaaattagcttctgaataagggaggtattagggccagtgacaagaatatcgtccacgtatactaaaaggatcacaatattagaacctgtaccatacacaaagagagatgtatcagccttagatgctgtaaatccccagccaagtagagtggattttaacttgtcattccatgctctaggggcttgctttaaaccatatagagccttattgagtttgcacacatgagtaggataatttggatcctcaaaaccttgtggttggctcatatacacggtttcttgaagatgaccattcaagaatgcgtttgccacatcaagttgtcgaatttcccactgtgatgagatagcaagatcaagaacaagtcttattgtaacaggcttcacaaccggactaaatgtatcttcaaaatcaatgctaggtttttgaagatactttttagcaacaagatgagattttaatcaattaagagtgccatttgcattaagcttaacccgatgaacccacttattcccaatcaagtgcatgtgtggttcatatggaacaagagtccaagttccttgggaaataagagctttaaattctgtattcatagaagcaaaccagccaggatgattgagggaagctttaagagacctaggttcaattgagaaaagagattcaggtagcttatgtcgagttgctaaataatccttgggtttatatattcctctttgagaccaagtaaccatagtgtgagttctcaggggcatagatgaaccagaaataccagatgcaacacctgaagcagcagcagcagttgtatcattatgttagcaagatgtaggagtaacccttggggaatttgagacaataccagagaccgcagacacactggtgtcactctcattgtgaacaacaggagtggtgtcaagagctcctccagaatgtgcttcagaactagcaattagtgcagaagcatcaatgataactggtgcagcatcagctgttggtgctggtgcaagaggatcatgtataacaactggttctggtggcagattctttgctggtgtaggagcattgtactcatgtaacacaggtggaaaagcacagtgaggtacactattagaagctgcattattgtctgtcatagaaaattgagcagtagggaaaatagaagttttagaagttacctgagatgaatttttgattctggttgtagggtagacaagcccattaaacactacatttcgagcaataaagatcctgccactagaattttcacataggtaccccttgtgtttgggtgaatatcccaagaagatgcattcttctgatctgtactccagtttgtggtgattataaggtctcaaatgagggaaacatgcacatccaaaggcctttaatatgttgtagtcaggtgactgttggaacaaacactcaaaaggactcaaatgatttaaagcaggggtaggcattatgtttataccataggtagcactctgaaaggcatgccaccaatatgtcatgtcaagacccgattgagctaggagagtaagacctgtctcagttatgtgcttatgctttctttccactcttccattttgttcatgagtatgtggacaagagtgttgaaaccaaattccttgatctcttaaaacttgccaaatactcgaaactcacccccaccatcaccctgaactttcttaataggtagattaaactgtttttcaaccaaacttttgaattgaataaacaattcaaaggattgagacttgacaaacatagggaaaacccaagaaaacctactaaagtcatcaataaaaacaatatagtacttgtaattatccttggaagcaatgtgtgatggcccccacacatctgtgtgatggcccttacacatctgtgtgaatgagttctaaagattgattggctctagaagtggacaagggaaaatgaagtctatgattcttcccttgttgacaagcattacagaactttaggtgttttagagagtgaggaatgttagcttgagtcaagattttagtatatatagcaggtgcagggtgacctaacttataatgccacaagtttatatcatgagaaagtgtagaattatagacatcaacatcaaaatctgagtgaaaagaaagcaaatttttattgatatctgttgagttacaagaatgttgaccacaatgtggaatacaagattgtgaattacattgatgtggcattaaggtacaatcagactcaactaaatgaacagatgtgtgagacaggtaggagccatcatcaccaagaaggtaaagaccatctttaagtttccctttgaccagttcagctcctgtttgtttgtccttgacaaagcaagttttatggaattcaagaaaaacatgattatcattagtaagtttagaaacactaatgagatttttggtaataaatggcacttgtaagacagaatttagttgtaaagatgatgagtgtttaacatgcaagaaagctttaccaatgtgagaaatgaggagtttcttaccatcacctacaacaactgtttcttggccagaataagggaccacattatcaagaggagcttcactgtatgaattgtgatgagtagctcctgtatcaacaaaccacccttgatcatcaccaaaatcagggacagtgttggcaacaaatgcagcaggctcatagtcaataatctgctcagtgagatgggcttggggttgagaatttccagtaggagttttgggtgtgacccaactcttattgtagtgacatgtgggggtagtgtgcccatatctcatacaaacttgacattgggggcgattgaagttggcaggtcttgaattgtaagcttgctggttgccacgattggcaaatcttgaagaaaaatctacaccagatcctctccctccattgatgttggatctgaaaattccatttcttgagccaaaagtaagattggctgccattttagttgataaatccatcatagtagtgtgcctttcaagtctagtttcatgagccaataacagtgcttgaacttcttcaagagacagagtgtcacttcgagaagttatgccagaaaccatagaatcaaactcaggtccaagaccatttaacagatgaagaaacaaatctagatctgagacaaaatggccagcaacagcaagagaatcgcagacaactttgagtttatcaatatagtcagagatagactggttacctttgtgtgcattagagagttggctcttgagttgtaataatcgagcctttgattgactcgagaatttatgttcaagggctttccagactgcattcgaagtggtatagcttgccacagttccaagaacaccttccgtcattgaagacctgatccaagaaagaagaagctaatctttcttgcgtcattgtgggaaggatgggttcggatcaccattaacaagatatcgtggtggagacagatccgtgagcaagatttcatcaagctcgtgaccaatcaccgtgggtagaacttgagacttccatgccagtaagttgtttcaatcaagcttgatcgtaagagaagacgtcagggaatgagataaaggactccaagaaggagtggcagtagcagcagaaggtgcagtaggatcatacataattgcacgagacgagttgttgcctaatgaagccattgatgaaggtcaaaggctctgataccatgaaacaagcagaacagagtagaacagagaggaagaaaatcatgaagcaaagcttatcccatacaagggactttattgatatatatagctcaaaagagctgaagcaattacaagacaaaccaattataacaaaattggtaaaaatgaatacaaaagcttaacgaaaataacagaaccaagacaaactaactaactaatcttgacattggttatcatagactcagttaattggttttaattaatcaattaatatttaaattagactatgtcttattnnnnnnnnttcactaagcaaggacttaattgtgaagaaatgaggttttagggtttatttattaattgagagactttgtaaggtctaattaataaataagttaattggcattttatttgataattaattataattattaattaaatagttttgacatttataggattgaaattaaaaaaatatggcattagtgaaagaaaatataaattgttgaataaaataacaaaattgtaaagtaatgcccactatgtatggttctatttttagccattattttatctttttatttcatataattaaaatcctagaccctagttgaaatactatataaggaataagatgactctcattctcatccaactctaataacctagttttcattctttgttagacaactagaaattgagagcctccttctatagtaattttgaattcccctcttattcttcttcatcaatttcgagccattagtgatagagtacatgcccactcatatcaagttaagtactcaatcatagtgtggaagattatgaaaaatccaaccaaactgaagaagagaagatccaagttcagatattgataatgttctgttacagaaaggaatcaagggctagaaatctgaacggaaggagtcatcatagtccaatgccaccactgtaaggttttgtaaactttatatgtgttatttcatcgtattagaaattcatatttagaatgttagattatagtattataatcacatgttagtaaatctagatcct

SEQ ID NO: 16624 - DNA, 4671 bp, Cannabis sativa
tattttattacaaagcaaaaggcccatcaatctcctattggttttggacttaaactagaaagcccatttctcatggccggaaagagcagatcagatcatcttcttcattttagaaagagaaaacacagcagagtagaggagagagagaatggggagagaagtctcagagagctgcgtggatagtctactgacggagatggtttcaacctactccaaccgattctacgccaataagcctgatctcgccgcccatagcatcgaggccattggttaccaggtcggccttcagctctctgaacggtaatttttctttagggtttttgaagctcttgaatttggatctaaaaaactgaaattttattcattgaccctataccaaccacaactattgtttgcatattaatcattttatagaatttagtggagctgtttggtttccaagaattaataggaaaacgggagaaagggatagcaatatggttaagaaagagtctttgggttatatgcaatttgtatacaaattcaagttaccttttttaggtacaccatggatcggtctcgcttcggtgatcatctagaggctatcaaattcatctgtaaggacttctggtctgaactttttaagaaacagattgataacttgaagaccaatcatagggtaattattaattattttttttttcagaatcaatgaggacagtttcaagtacaagagatgtcttaaatttgatagaatcacgcacctttgtttgttgtgtctttagggtacatttgtattgcaagatactcggtttcgctggctttctaggatgtcgatcgagccctccgaaaatggagatgtacctcataataatcctgaggctgtgactgagaacaagagcacacaagttacaaggatgcatctcaatttcccatgtggaatcataaggggagctctttctaacttgggaattccttgtgctgtatctgctgatataaccaatcttccagcttgtgagttacttgcacctgtgatcttttttttcttttgactatgttgtcaaatgggaatatttttctttagggttcgtttgaaagaattacaaggtagtgtaattactaggataataactgcacatgagagtaattacacttttaacatccaaacacaaatgttaagtagtaattgcatatgaattcttattatcacgtttggcaaatgagttactacttacacaatttagtaatattaatgatctaaaaattataatattgtataactacacccaattttcagtagggatcataagtactggagagtgtaactaagacttctcaattacctccaatgacatagttatggtgtaattacttggttgaacaaacacgccaagccttacaattattttgaattatacagtgacttttcaaacacactcttatagaagtgtacttacacctgtgatctttgtagctgttaatacttttttggttctttttataagcagtttatacaagttttctggttttcttgtttgcttgttaatttgattggctcaaggttgctaatattcttgtttcgtgcattaaaagctactatgcagggcttcgaatgcaacgatatagagttctccattgtttgaatgtcttttgctttatgtttctatgtttcctgtgatttatttgttatgttaattagctaaataaaacatttgcacactgtagagttgatatatctataaactattgttgctaaatttataagcctagacttgttatttcaaacccttacgtagattctagacaagcttccggactcagcttgctctaatagtctatattagaaaaagtcctacattattaatgtgtggaaagagaataacatatataaaatgtatgggttacttctcccattatcaattgattttgagatggaactccatgcaccttaatcctaaattctaatgtggtatcaaagcaattaaaatgcttttgctgtctccacctttgacctccatttggggatctttcgacaatgtgtgctagtttctagtgttggagtccttaacctgtttaaaaaattcacaaatttttctacgtgtacacccacaaatttttcgatttggccttgtgagattttttcaaatgttactttcggccctgtggtctcttaaaggtcgttcactatacctatttttcaagtccaaatgtgaggaggatatattaaaaatagtctcacgttgttaatgtgtgaaaatataatagcatatataagatgcatgagctactcttccttggccaattaattttgagatggaacctcatgtagcttactaaattctataagtctaagcgcctaaagcttatttgtgaattcagctaatgtcttttttgcaacttaatcaatcactatcagatttcgaaccagtagattttcctgttcttccaaccccagtaactagttactcatcctctatctattttgttttaccactagttttatcctcaatattgtttgttaatcatagtgtgattttgttcctgaaatagtgcggatttgcttgttgaattagtattgatgatcatggttcttgtctttgttgaatttatttactaattagagacattgtgtccacgtgtatcttattatggttccctctatcttgagatgattttgtgaaaatgtatatcaaaatgatgtttgtgacattattggacaggctcattcgtggttcgtataaaggtctaatcaacacttcatgagaaaattgaccttttaagatttgtgcaagagttaaaatcatttgtaaaggttctaatgatgcacactgtacctttcaagacatatggtgggagctcgagggaaatgtgaagaaactgataattcatttgctctgctttggatttgaaagcttagccttacaccgtaatctttactgttctgtttttcctttttacatttttgtttctgtgtttggtattgttagatatgaatatcataaagaaatcgtgcttttggaactgatgtgaacttaaccgtatatgacaatcaatccatcccttttacctctgagggaaactatcatgtgacaatctaagaaatttacttagttaagtccaagtgaagattggaataaaaacagcattgtactcattaaaaaagatttaaaacaacgtgatccttattagtgaatttggtaaaaggcaatctctagaggaatttagtagtgtctaacatgaataggcaatttaatattttattttaaaaaaatttacggcataaatatttattttcttttgatttgttactaataagtatctaatttgaaaatagcggcactaatattcaaaagcttgtttttccaatttattgttacttaactggatacatggacaaatgtggttaattccaactttttttttttttttttcattaaatatcatctataacaaacactcagaaaactaaaataaaagctgaagctatttaaaactaaatctacatccctaaatttctcatcatactaaactcagaactgaaccaaaaatccttccaaatccaaaaattgaacttcattctgacgacaatcatttatgacaactggtataatctgtgtgaagtactcatttatatttgaactgatattggaaagcttgtatacaatcacaatatataagattttgaaatattagaaacattattcataatacatattgtaatgtacaaatctcctactgtaactattattttactaattgatagtgcatattgtaatgtataaatctctttaagaaaccacaatctgagaaactctttcctaatttgaaatcaatcacaatgaaaaaaaaaaaacaatagacaaaataagattgtcatgctccaaaaatagtcaaaatgcaagataagatcaaataccaaatcactttccatggcattacaatgacaaaataaaaagcatgaaatccaaactttacctcagccatatcctagatttacaatgaaattataaaactaatttaccataaatattacaacagcaacaccagaaataatcagcacaatatgtttcaaattttataacacccactaatgacatttacagccatgaacgtcttccatacatccctctcttgtttatcagttgttcctatccttcataaaaaattaattgatgcacaagctcattcacatttttcaaaagtccaaaaatcacttgtctacacctcacagccaccctcatcttgaaattataagagaaaatgctaagattaacataaatctcagccccaaaaagtctctgctttcaaagaagaaagaaagccaaaatcttaccattgaatatattgacaatttataaatcgataggcggctgggttattctccgtccacaatattctttttacccatgatataccataagaacgaataattttcttccttccttttgatacaccatacaacctcttccatggatgtatttttcttcttgattgcgtaaaagacacatcacctttcaagctactcattagtggttgtcgtgggaagggggttcgattactaggtctcgatttcacgtcgtgagatttctagtgggaggatttttggttcgagttctgggcttagcaagcaagaagagacttatttgtttttatatttttcatgttttcttaattgttgtttttttttttttt

SEQ ID NO: 16625 - DNA, 4739 bp, Cannabis sativa
aagtaatggacgaccaatatttaaaaagtcgttgtccttattacattataatataacgatataattaattagatatttttttatattaaaatatattaatagcaatattctacattttataatacttaacatcttaaattgtgacttaaatttctcgttaattaatatattattgatgtgacgtaagactacttacgtcacgtgagaatatcttctataactttaacttaaataatgttaggtaggaaaacattaaagtgatctcctcacatgctgtacgtaccctataattgcttataatatataattaaatatatatatatatagaaaggtcaggacactatatatatacatacatatatcttccaattatttttacaagataccctatagttttcctaattaagtttccttaatagttataactaattaaaacgatccatcctctgaattctggtacgtatttataacttgtttgttataattaatatatataaataataattaatgaatttgtttgttttttatatgttggacatgcagaaaaaatggtagtgtgtatggtcaaatactattactacttgtttgtagtaattaatggattgtcatcaatagtatcatcattatcgtcaccatcatcgtcatcgtttgcgagagatggttgtgaagaaaagtgtggggatgtaacgattccatatcctttcggaatgggatcgtcatcaaaatgttatattgacaaaagctttcaaatctcttgtgagaatgggattactccttttctcaacattagtagtactagtagattacaagtacttaatttctcattattcgacgatgatgatggagatcaaggccaatgggttcgggttacaagccccattagtttcttcgataattgttcgaacaaggaaaccaatgcaaatccaccgaatttgtcgggaacccccttttactatagttctgggaataaatttgttgcagtgagttgtggtgttcttgccaagttggaaacaaatgcaggtatatacatatttagttcaattttgtacgtagtaataatattcacacactcacataactaagacttaattttaaatattataaacttgtgttctttgtagatggatgtgtagatttgtgaaaaaattgagatggaatttgattagagaagaaaactatcgtaaataggagtaaaattggtaaaataattaaaaaaagaggtaaatataatatattttaaaaaagagggtaaaaattaaaagcatcaaggtaaaaaaaatatgtaatataaattcctctaatatttcaacccctcaactaaaacccactaatttaaactcttaacaaacacctccataatattttattttattttttaaatagtccataaaaagtatttttagagagacaataaaaaaacagttacattaagtgataatttttcaatcacaatataattttttttgcgactaaatatgacttttagtcacaacaaaaaattacttgtatctaagacatagcatttaattacaaattgtcactaatttagttttagtcacaacacgtattgtaactaaaaacacacttagtcacaacaaattgtaattttatgactaatacttttagccacagatgttttactcacaacataagaatggtaatttataattagtcataacttttttacttttagtcacataagatttttttttttttttatagtaagatagtataaaaatctataaaatttattattaacatggtttggttattaattacaggtgataataccttttttggatgcacaagcagcagcaatggatctacatgtaccaattcattatcatccaatattgatattaagatgattaattgtagtaataatgaagttgattgttgtactactctcttctcttccaattctgctaccaccaccatcaacatctccatggataataataacgatttatccatggcagcggggacatgcaaatatgcattcctcgtagataataattatacaggaaaatattataatgataataataatatagttcctgttcgaataagttggcgtcttaaccattccctttttgatatattcaaacaagatattatgccaacaaagtcaagtaatacattttactgtaaggattccacttctgatctcccatttatttgtcactgccaaaaaggatatagaggaaatccttatattgtggatggctgtaaaggtaggtaatatttaaattaattatatgttaataataatgttctagctagctaatcaatgaattaattataattaaaattattaaaatttacagacattgatgaatgcaaggagacaccaaaaagatgtagtcctcccaaagggcgttgcgtgaatactgtcgggggctttgtctgtaaagacagcaacaagctcggacgtactaaagccaagtttttctttataggtacgtacctaataattattaattaaatctttttttcttgtgttttgttttggtacactatcccatatctagtttatttagggatggcaattccagttagtatgttgtgtggagtttttaaatttattttagttacatagttgacacgtaaaaatttataacaacaacttgcataattttcgtatcatgtgttgaatttataaaacacaaacacataaacacaacctgcataattttcattggaaaaaatcttcattggaaaaaagtgacatatatatttatataaatccatgtttacttatatgaaacaggtattgggagtggtcttggagcaatagctcaagtttttggtgcatggagactaatgagacatgtaaggaaaatacaagatattaaaggcaagagtaggttcttcaaacggaatggtggtcttttgtgggaacaccaaataaattcaactgataataatgatctttctttggtggaagattatgatgaagaacaaaaaaataattcaagtgaagataatattgttgatccgaataatttggaggagggaaatgaagaaaaaaattcaagtgatgtagttgataataagttgttcgagttagaagagttggagaaggcaactaatcgttttagtgtacgaatttttcggcaaggaaatcaaggttctgtgtacaaaggaatgttggaagatggaaggattgttggtgtaaaaaagttcatattaattgatgaagccaaagtcgctgaattcatcaacgaggttgtgattctttcacgaatcaatcatagaaatattgtcaagttgtttggatgttgtttggagaatgatgttccacttcttgtttatgaattcatatcaaatggaacgctttctgagtacattcacgagagaaaggcagggttttctttttcatggaatatgcgattacaaattgcaattgatgttgcaacagctctttcctacttacatgcaattccttcttttaaaaattttcattgggatgtaaactctacaaacatactccttcacgaaaatttgagggcaaaacttgcaacctttggtacaacaagaacgatttccttggatataaaaaatcatttgcacgatacatctgtttatctggatccagaatactttgaatctcgtcaatttacagataagagtgatgtttacagttttggagtagttctagccgaacttttaactggacgaaaagcaatatctacaaaagggcagttagaggacgaagaaagaattttggccgtatatttcgtcaaaatgatgaaaataaagaatgagaatagcgtgtttgagattattgagagtgaagttgtgaaaactgcgcaaaaaagggatatcttaagtgttgctgagcttgcacgaaaatgcttaagggccagcggaaatgatcgacctacgatgagagaagttaaaaatgagcttcagaagttaggaggcattggtgatggaggtggtggtcaacaaattaataatgaagacgaggaattagtagctgatgatcaaattttagagaataataatgcctcatcatcagcagctggagggttttttgatagtattactagtactactacatctttttaattatatattatattcatgttttgataattaattaatatatgtggtgtgattgtagtaacttataatatgtatgtattcatgttttaataacaattaatatgagatgtttgatttggtgggaatttagaattaaaactcaacaaatcatgaagctaagacaactacactggtacgtaagagttccgcaattacgattatccttgtctaggtgtgtttctttatttctctttcactttaatatcttcatgcaatctatgattttttttattcaaatttaaagatctataaaataatcattaatttaagttcatttctagactagatactactttatgctttgctttacttctcttgatctctctaatacttatttgccatttttttcagtcgaggttagaatgtagacttataatataatcatagacataatataccatatttcataatcattaagtatgtgtttattttgtcaataatcataataggatagttaatagtcattaagtatgtatttcacatgagagcacccttaaaactaaaattggcccgtccaccgaggagcattgagcgtcgatctgatggtgagcactatgttatattatattgttataatataagatagattaaaatattaaaatgtaacatattatatattgatatgagat

SEQ ID NO: 16626 - DNA, 5883 bp, Cannabis sativa
aaaagtaacttaaaaataatattgcatttgttatgttgtgtattactccaaaattgattacctcatccactctctgtctctccctctatatatatataaatattttgaatactcaaatccattcagtcagcaatcaaaataaaatttagcaaactgaactcggcatatatgaagtatgtgttctatccattttagaaaatacttttttcaaaaaaaaaaagaaaaaaaaaagaaataataaataagtggtaagcaaaatcccaaagagaaaggttgaaaaaaaaaaagagatcttacaacttcccacctgcgtattattcacctcaaaaaattgccttctatcaccccactgatttcaaacaacctattcattcactcctcaggcaggtgaaattgggggacagaaggtacatgtgatagatgatgtttccttcaaattactaatccaatgaaggacatgcaccaaaaaaaggaaaataacaggaagataaaaaaaaaaaacaaaaaatagaacctcaaccagattggatttctgaagcttcagaagacggcgatgagggtgccaaagaactagcctgtttcgccgaatcatctgagagtcttgaatccgagttatgattttgcatgctcaaaggtttgtttaccacatcaaatgattttgatggtagggagtgagaagtctctggcacattggctgttggagagcctttgggataacttaaataaggtgaatcaagcatggcaggaagagtcataccgtagttataaacattcggcacagcagggtgatcaaatttgcatgttggaccatatttgcacagtccatacatactgtaataagaacacacagcctgcccctgcatagagttgaagatcatcgattacaaaaaatataaagtgcatacatagacaaaggaattacaaacatgcagtagaaatgaacttacaggccgcgagggaagcccgatttggttggaaatggccgcagacggcgcaatcctttcctttgggtgatgatacttgcaatctgttccatatttgcatgttccagtgttcataaaatatcggcattccggttgatcaggtctctcaggtagacttggagttggatgcagtaagtttacttgtccaccagaacctgattcacttggattcctagggttgaacacataattggatccaaggataccagtggaagatgcagggctcatgttcccctaaatagaaaaaacatatattataagctaacagtggtattcatcttcgttacaatatctacttaatggaaaactcacaaataataacaaacacttatattttgaggagcaaaccaagtaattctcagtcatcagtaaaattaatccctaaaattgtttagaggtatagacgttctggaactactttccaaagcatatgacaaataaccagtcaaagactcaaaagtatcttcgaagataaaataaaatattcaacaacatggtgtgttcaaaagcgtgcttatagcagaactctaaaaataagctgaaacaatggtatattgcctagaatactcatatggtgcaaccatgctagttacaatgttgagatcaagagatttcagttccgaaactatgcataaaagaaatgacagacaagaagaaccagaatagagacccattgcatttatgggtggtcagggaacatatatatacaattaaattagcttgataattagggagcaaatactgaccacataggtgttccaaactcctccagatagaattccttgagaaggagagacaacaacaggcatataaggtggtggttgaggttgtggaccagaaatataaggaactcttggcaatgaccatgcagcaggaagtccactagcatatggtagatttgaagatggaagcattgtggagcccgctgatccataagcaggaggagcaacaggaaatgcagttccatgggatgcaggctggggatgatgaaacttgcatgcaggcccaaacttacaagctccggttcgcacataatatggacaagatttttcttcctggaggcaattaatttaaaattgttttaaatttgaaaaacacatatgagagtagcatggcagcaaataaaattatatcagcagtaaaacaataataggacatagatgacctgtcgcatggggagacctaacatgttgaatgaaactggtccagcaccacgcctgtctcttgggtgatgaaacttacaggtagacccatatttgcaagtcccagtcttcagaaaatactatttgaaaaataatgtatttgaagtgaacaatgttagcgtacaaagattcccataaacattaagcaagcacaaaaatggacaatgattggtatcatattcaggatcaggtgggaccctctgctaacaactaagaatgacaaattatttgggtaacctttgaaaactatccattgaatatcattgtagaaaaactttaaattggcatgaggccttcaacaacaagaagaaatacaaaaaaacaataatataatattaaatgcagactgtagagggagagaaagtaaatagagatcatgaacccaaaacacttatgtaacaacttgaaaaaaccttaaccataatgaaacagatggtgataatgaaacaaataatgtcaatccccaccaaagtgcaggaagaataagcatcagagtatcataccacactactaccctttttgtgaaacaactgactagaaaatcagaaatatctaataagcatgtgctatgtcaactaaacaatttttcccacttcccacaaaaaaattacatcaataatcaataaaaaattacagatagcacctcaatccatcaactttgtttccttttcttcaagaattccagacactagatttcatataaaaataagacgagaatatgtaaaagaaggaagaaaataaatccatttcaggaaccttgcagaaaatcttaccccacagtcaggctgtccaactctttcaggaagctctccattgtactgagcctgcataatgtattcgggattaattaaccagtcaaatgtttgatcccttaagcgttttaaagcacaacagttgagaagtagtgagaacaaaaatgccagtcacagaatcaaaacatgattgcacttcaaagtggtggaagaagtactatagaataaaagacaatttttagttacctgtggagcataagcagggtgattgaaccgacagttattgccataaccacatgatccagtcctcaaataatatatgcaatctggctcaccaggacggtccgggaatgggtttgattgagccaaaccacccacttcttgactatcattgatttttagccgccatattgcttctacaatgcataagagcaatacacattgcaacaatttttaataaatctgttaaacaccaccttcagcataacataaattgccaaaaacacattgaaatcaaaactcagaccatgctaccagatatctcagtgggatctctccatcatctaccttacacgttccacagaaagtaaaaacacacataaacccaaatgatatatgtccagaagaggtttaaaatattacttttgaagagaataaaacaagtcttaaaaaccctcacatacattagatcaaccaataaagttctccaaaagaagaaaccaacaaatcatcaaggatcatttgtatcatcgccaaacctatccagaaatcttcaacagaaacttaatgaaaaaagaagcgtttctaatcaacccttattatgatgcattccagctacaacaccaaaattgttaaaaaccaaaacccagatagcattatccacaaaaaggcagaagtaaatcaataatttctaacttagaacaatttacacacattgcgatttcgtaaaaaaaataataaataaataaagtaaccatgatcatcatatttaagaaccccaatatcatatatgttcccacaaaaattcatcttcagatctctaaaacacccaaaagagaacacaaaaataggtgtcaccttcaatgttaccatcggattgatttggaacagcattcttctgaggttgccgagtatctggcatcggtaagcacagagagccttttttgcagtctcaataatcaaaacccacaaaagttttcgaatctttcgaacaaatcagagcaaagcaccacaaaatctctcagggaaaaaataaataaaaacgaaaacgaaaaacaaaaagaaaaaagaaaaattccccaacaaagggcgtgatcaaggagcaaagatataaaactgaagaaaacaaaattaatacatatgatgatataatgaaaatattttctgaaaaaaaaataaagaagagtgggaaatatcagagagataattctgcaaaaacaatgtgaaatgcaaacaaatacacaaattgtttgggaaaattgatataaattcttcgtctttttttttttttttttttcaagtcatgagtctttttttccttttggtacttttaaatgaatgtgaaaccgagaatatgttaaagttttcttgcactcgtgtacgaacattaaattaattgagccatgtgaaattacaataataccctccacgtgtcagatttctgagctgggtttagtttcggtcttaaatgaattgagtttgattaaacacaaaaagagcatattgttcaacaaaatggcgcctctcatatttttggtctattattttattctttgcttcttattatagtatcactttttgtctttttatttatttttatttcttaccatcgttttgcaatcaaagccgtttgatatttcatcaacgataggaaaccaaccactccttttggtaagcccaactgtatcaactacttcttccagatgatattatctttagttaaataaatattgaaaatgaaaagtgtcaatttggtaaattcaacatttctcaaagccattttccttaaatccttcaaaaaaaaagtgaaggtttttgttgggatttgattgtaaataaaaaaaataataaaatcgtgatcgtttaattggtatggcggtggcaagtcattcaccactcagattccatggtctcgtgtgggacccacgtgaagtttcctttggttccatacatatggcaaaaataagaaaatgacaaaagtatcctcggaatgggcttttaatattttaaaataaaatcagataataaagaataaattttgttacatactctttggtattaaaatatagtatataccctcaaaggtatgtatctgtacgtgatatatatttccttttaatatataaaaataagagaatgtgaaaaatcgtcgccgtcaaagggcgaagaagagattttggagtaagcaaaatgggtcgtggagagatttggacctttggattttaaaattccagggacgtgggctccacttgagagagagagagaggaaagaaagaagtctaggattcgcaatcgcaagcaaccccatactagaggagtttagtttagtggggctgcggccacaagcggatttattaacctcgacgtgaaacccttagaattacttttaccactatgcgccgctctctatttctatatataaagctaaaatataaaagggtaaaatgacatttttaaaatgcttaaaagtattttttttatatatatattgttgaaactaagagtggtcaacactcacttgttagattaggagataaaataaaggataaaattttttttggactttatgtcttgcaaaagttgaattttctgttttgttaaatgataaaatggacattgtattttccaaattaatacaaataataccatgaattaattttttcttaaaataaaatttaataataatctaatctaaaagtgttacaaaactgtttacattttttgtat

SEQ ID NO: 16627 - DNA, 9014 bp, Cannabis sativa
  modified_base (371)..(372): a, c, t, g, unknown or other
gaatagtatgagatcataataagaaaatcaaaacctagttgaacactctaggtttttacaaatgaaacactcttctcacaaagaaagataaaatcgtttggctgttctctaggtcctatttatataatattaatatagcaaccgtagagacaaccacaaaaacaattttccagctgtacaaaatattcttaaaaaaattcctaatttgtagcatcagaatcgcgttttgcaacagcagatcaggactagaaaggaaatttttcaaattgatccaagatcacgaatttggaattcaaacctgccaaataaagtttctttgatctgttaaaaaaattgaaatcatcaattagaaaaagggaaagtcaagtttnnccaaagttagacaactttctataagagaattctttatcttacaagaagtttcctaaacccaaaaagatcagctgaaaaagaatctttccttagaagaaaagagtaattaaatgcacaaaatcaatgtaataaaaacaatttaaatactctataaaaatgcacattaattaaaaaaattattttgacaactaaatttctaaaaaatgacctaacaatatcgatgcatatattatatatatatacctatgtacaaaatttcaaatttttctaaacatcttgtggagaaaaatatatataagatctttatttatttaattaaggtcttgtgagatcacaaattctaaattctaatatggatttattgttccacctcgctcttatgaaaattaggcaagaatggggttgaagggataggcgaagcattagttggattttagtcgggaaataaaaatgtaaaacaaaataaaattaaaaaaatactaaaaataaataaatttttatgttaggtatcagaggcagaggggaatggagtcatgtgggggcacatcaccccactcaacttttaataaattattttttttcataactttttttatatatttttatttttgcccccacaaattttttttttttaatttttgccattatatatttttatttttatccttgtaaatttataattttttttttatctcacatatttttatatttattctataaaaatttatttttatttttattctcacatatttatttatgtctctaaaaggtttatatttttctttcttacaaaaataagttttttttttattaataagctacttttgcaaaaaaaaaaaaaaaaccccactaacatttacggctagctccgccactgttaggtataaaatgaaaaattgtataaaaaattctcgatttaacaaaattttccatgtcaaacacaataatttgattcttttttttttattcaccacactttttttttctccaacattctttttatctttttctttccttacaaaaaattcaattttcagacatataataattgagcgtctgaaagtattattaagattgagcttgtcaatagaaggaagaaaaaattcaatattgagcttgtcaatatagaaggaagaagaaattaaataattttgttttggtgagaagaattttaataattgaaccaaaaaaaaaaaagcataattttaacctgaaattttagttttcaaaatggtttattaaaaaaataaacaattttaaagcattgttttttaacaataattttaaagcatcttgattacactttttcatcattttttaactctactttaaagcatcttgattacactttctagttaaataagtaacataaataattatggttgtcttgtataattaagtaagcaataatgttatttataacatttttttttttggtagagtgtataacatctttattttaagtgagtagcttgttgccaatgacaactccattaatttggattccaaaaagtgtacaaaggtaggggactaacataagcaactccactaagcaagcatcgaccctctcctaaccacacatgttggatcatatagcaatatatagcataattttaaaaaataatttaatgagaataaaaaataaaaaaaataaaaaaaaaagttaggaaagaaataaaaactctgatgaagaatatatagagcactctttttgtaatagagtgctattgtgaatgatgtgatgtgtcccatttatttcgatgacatgaaattaatgtaaatactaatgacacatgtcacaataattgacattacaaaattatattagtaattagttgatattattcctgtactttttttgttcatagtatttagagatacaatcagtcatctatcacgatatttctttcttttttgttaaaaaaaaaaaatacaactgaaaatgagaaataaaattaaaaatagaaaaggaaatgatcatcttatgatgtgcagatagtaaaagttataggaaattttatgatgcattagttttaatttaaatttatatatatatattataagggtattataattatttaagatattttgtaaattttttaaaaatttagaataatttaatgcgtcaaaaataaggtattaaaaataagattcaaacagtcggttgcacgcgtgtaaaataggcagtttaaaccctactatctgtattgtaatttttttcaattttctcaaaattttacaagatgtcttaaataactacgatatacatttttatatatataagaaataagattaaaactaaatattaaaaacacgaaaaggtataccagtgcaccccaaaatagaagcatcaagtgttttatatgctaaattgtagtttgacaattcaagtcacgacatgacaaaacgacacgaatttgatacgaattattgcgggttatggtcataaaaaatagttgtgaattaaaattaggacaaactcaaatgacacgataattatttgagttaggttagggttaacctgtgtaacacgaaatcaacacgtatcgacccatttgtattcaatctatcattaaaattattaatttataattaaattattatttattttcataataaaaaaatacttacaaaagtataaaataccttatatttaatttcatattaagaattttattcatattgatattttaggataaattattaattaatcaatattatttatttgcgaatttaaatatttttatttagtatattatttaaatgagtcaaacaaattaatataattaaaattatttataaaaatcaaaatatgcgatacaataattatgttgattagtgtaagataagttatagtggacaagtaatacgataagttaatatgcgaacagaatgtgtccagttaaaattgagattttttgacgaaatgtaataaattgggttataattgaccgattaacccaaataacacaaatagacgataacacaaattgttacacctactaaattggtaataatttttagtaaatcttttatataatattgtttcctcatgcatgtaatatataaataaaaagaatgagaacaatcccagaatattctttcatcagaagcatttccttattattccctttaaaacatagtttagaaagaaaagaaaaaaagaaagacaaaacctgagatcctactacaaacatttaaggggaattgtttatttctattttttataattttgatcataaattttactttgaaattaaaatattgctcatgatgactcatgacatgcatatgagccttcaaatttcaatcttttgccgattgtgagatttttgtggttgagaaattagagtagatatccctttttaatacaatattctatgacatataaatataattggattattatatttcaaccattttgttaagaatctcttgctttgagtatctcttcttaattataggtaagcaatgaaatggctatgtattaatattaaaactataaattagaattataatattttccaaattaaatttttaactataatagagaagacattaaaaagatgaaaaaaaaggtaaattgaaagttcatctttcaaataaagaagaagaaaagaattgcagatgggagaaaatgacaatgatgttaaaattgaatttttttttttttttctatcagtccaaatttaaattttccatgagaattatatatattcacatattgaaattgaagcaagttgccatgaaataaatcaagtctcttaaagaaacttgacttaataattaagtgcctcaaaatttcatttcagatagtaaactgataaacatcattacaagattataccaacccccagatctgttttttcttttttttttttttttatataaacaaggatctacccataccaacccaaaatgaaaaacaaagattaaaaatcaaaattttatgtctgcctcatacaaaccttccacacacctttacagatcacagactgatcatcatcaacacccttttaatcccaatgtccccaaatgaccattttcaacatgggaaaaattccttttcttttactccaaaagctcaaagattgttattaatgttaaatacacagctttgtatagatcatcatcaggctactgaaacagtgccagtccttgaggttttgcttggagtagagtccttattggtctctgattttctcatggctctgctactcattttccagctcttttcctttgcttcatcaaactctatttgctcttgtctacattctttgctacagaatggagtatttcccctgaaaaaagatattccaaaaaaaattagtaccaataagattccgaaacaattgattttttttatttcttttttaccaaaccaagaacaacccagatcaagaaaccccttttggaatcaaaaagttgaaaactttccaagaattgggaaaaatctacatctgggtatcaaagatttatgatgaatttaaaaataaaggtatatgtaaactacacacctgtacatgaagatgtctgagttatatccaagtggttttctgcaaaggtaacaagcttcaagaaagtgggaatcactggagtaaaagtcttcagtcccagccaaatgaaacatttttgtggccatagttgaaagaaagcttaaagaggaataagaataactgttgaaaaaatcacaaaaagagtaagaaaaaaactgaaccaagaaaattggtttgagaaaaatgggctttttctatttttcttttcttttgcttgagcaaaaaatgagagagaagaagggagaggagaactatggtttagtgttgttgtttataaagaggagctttggccaagacttgcggtacaatcaagtggtttattgggtattatattatggtggattccaatccaggggtatttcggtaaattctcagaagcaaattatatggacttcgttggtctgacgtgtcaagggttttgtaatatagtagagagacagtagttgcaaacctgtccaataataaagtgtattgtaatgatgaaaaccagaagtggttttccaagattccatgggattcaatctattggctctaccttagtttagttcatgcatctgttcatccaatattaacttttctattttatctttcttttttcatttaggtacacatgaaattcttattttaacttttggtccccttagtgttgaacatcaataaattagcctttgtcatctacatttgaaaaaaaaatatattttcaaattagcctttgttttttaaggttctcttaacctatactagtagaagagacatttcactagctatggcagtaaatgtgttgatttctttattaatgtttaggagaatctagaatagattttctatgtgtttgttccctcattttgaagaagagaaagttattaactattggttaaacattaaaaatatgttttgctaattttcaatgtgctgaatgtaaagattataactattaaactaaatctatgaggaaacaagtaagtgaatgagaactattttattgctatgtgtcattgatttgagtgctttatatatatagcttgggtttgcatgtgagcctagaaaatgtagagtggaatctagctcaaatgaatggtttctttggtagctcaaacaaaggataaaaaactcaattgggttgaaatgcccttaataattaattagttgtttaattagtagagctaaccaactttttatggactatttttatgtttatatatatgattagtattgttggaaattctaattggatgggacttcaattttaaattgatttggtcagttaaaatgtctttaaaattagtgtttccgacattgtttattataaaatgttaaatcactatattttaattattgttaatacgtattaacttatttgttaattatatttatttattaatacttgtacggtaatgtagtatttaatgataagatagatattgggtgtatacattttggagacataaaatctaaatcacatttctatgtgattattaagtgttttatttatttactattatggaaattctaaattttgggtatgacatacacaattacattaaaaactactatatttttaatttctattaatagcattgaagtaaaatgtttttagactgttttcttgaccaaatgcacaatttaagagactttttaagactagagtgcataataaatatgaagggtgggaatttagggtaaaagccaaaattatagccactaatatataattctcacaaattagtgggaaaaaaaaaacaaaaatcgaaccgaaagtttattctcagaaatcaataaaatatcctacattgattttataattacaaagagaccatcatctagaacatatcatacgtagacttagaagatggtatttttgtaaataaaagaaatatcagtggtaaacatgtaagtagaaaacgtcacaattattctagacccttaattattcaatgtcagccgttactttcactaactgggacatgaacgaagcaaatgggccccacagcccaataagaggaaattaaaaaagtaataaaagccctaaaacaaacaccaaaacgttggagctgactaggagtggggcccatttaaggcccacaaaacaacagaagcatccaatttgtgggacccgcaccgagtcaggaccatgctggcgctacgccccaagtacatgtcccctgggtcccacacacacctacctgcccgtagaatccggtctgcccgatcccttcgctgcccgttacacgtgagccagtgaccgtgcaccagcgaagcccccaagaagaagaattattgagactgacacgtggcagtgactgagaataaaagacacggaatctgatgttttctattttgtgggaaagctgccacgatgatcgaggttagtgaatcaacggtggaaatatcgccacggaggcaagtctttttcaaatattattactttatttatattttttgggaagtgacaattttgggttctcaattattgggtggtaccactaccacttttattttcccacgttggggcacgagcctttggtgcacttgtggttattgtaatttgttttctttgaaaaattatttcaatattttattttgtttttaattttattggtattgatgaggtgtaatgcacgagtgtgactcttaatcgtgttggacttataacgtgtattttttaatttactttttctttccaatttattaaaatagatatttttttccttattaaaatagattttttgtgatcactaaaacattaaaacaatttttattccattaaaaaaaaaaaacaatttttatttttacatatgtgaaaaactattggtgacacgtgcaccgacttatttagctggggctacaagaactaaccaaatatattccgtaaaaaaatcagagtaattaaacaacttcatatgtttatttatttaaataattatataataactatgtaatattgtaattagagtttataaataaataaaaaaaaattataatttgaatttggagctgaataatatgccttaatataaggcaggatacactgatacatctctatctgttttagtattcgaaaaaaaaatttagtcaaatttgttctcatggtcatgtaaattatagttatttaagacattttacaaaattttaaaaaattcggaaaagtttaacatgtcgaaaactacgttcaaacagtatgttgcacgcgtgactattttattttatatgtgtgtaaaatagactttttgaacattgttttctatattgtaaattttttcgaatttctcaaaagtttgtaagatatctttttttgagcaaatttgtaggatatcttaaatagctataacatacatgaatatgaaaaagattagacttaaattttttttggataccgaaataagtagtaagtgcatcaatacattccttttaaggaagtgcattgtagaatcaccttatattcatttagtactataggttttcataaaaatatatatatatatatatatatttggtactctttgttttcaataatacttaattggtacctcatatttttaaattgtgcatatttaatacattaaaataaaatttaatcaatacaattttatcaatttaactaaatagttctcagttatatgtaatcaaataattaaatttaaattcagaattcataaaattttagattgttgattgtattgataaagttttatcaaaaaaattttaatttagggtaccaaatatatgattttaaaatacaagatactaaatttatatttagaaaaaacacaggatatcaaatgtgtagaaatcttatattttttaattctaagttcttcgtagtttatgataattgaaatattattattttaaaaagaataattactattttttgtttatgacactactaatatgatatcctcaaatacatactgtttgttaaaaatattctttaaaatataatatttatagtaatgtggtctttttgttaccatctatttcatcttaccataaaaaatgtgatgtggcagtacacataattggtagttagtcaatttaggacgcgtttggttgggaggaatgaaaatataagaataggaatgagaa

SEQ ID NO: 16628 - DNA, 5144 bp, Cannabis sativa
  modified_base (3409)..(3416): a, c, t, g, unknown or other
  modified_base (4002)..(4004): a, c, t, g, unknown or other
agtagttttgaacacgtgtattaacctcttttgaccgaggaggaagtaaaatgagattaattacgagagtaaaagcagggtagttaccgtggtccaatttgcacatccccaaaacccaaacttcgtgtttgctttgcttaatttccttttgcgtagcgagtctccctccctcttcattgacactgcaaaactcaatagggttgctttctcctctagtctagggcttcattcgattcacccgccatgtatcgaactgcagcttcacgacttaggtctctcaaggttagtaccaacttcactccaaaattctaccgcttcattcaacgtctaggtggtttaagatccgtgtcgtgatgtttcatttccattatcaagctcgattaattgtgtttttaattagattatattgcttcaccacctttataattgattatatgggaaaatggagaaaaactagggaaatcaatttattagtgctgtgtgtttatgtatgctttggtcgacaaaatgaaagattttaatcaggtttattatctccgctgttccaaaaaatgaaaagaaaagtttttgggggcgtgggatcatcgtaattttggcgagggaattttttttctttttcttaaaggagaaaactcatttaagcattgtaatttttttttgaaaaaaaagaaaaacttgatatcttttaactttgtgtttcaggcaaatcatattatgagcgtttagtttcgttgttttcttttcgcataaacataataaactgtacaaattggtttttcttaaaagtgaatgctgactgcagtctgcactgcaatgccttcttattcttttctgagtagggtcgtgtggggagttcaggtgctgccaggtatgccaccgcaagtggggttgccacaagaccaacctcagggggtttctttagttggttgactggggaacgttcaggttctcttcctccactagaaatcccacttgcaggcgtaaatttgccacccccagtacccgattatgttgaaccaagcaagaccaagattacaactctttctaatggtgtcaaaatagcttcagagacatcaacggtatgcaataatcaattcttttatgcaacctgtctatattagttgaattccattttattttaagattttatctttattaattttacggtgtgtgtttgtgataaactctgacgggctatttaatcagaaccctgcagcttctattggtttatatcttgactgtggttctacatacgagacttcagaatcatgtggggcttcacatttgctggaacgaatggcttttaaaagtacaactaaccgtagccacttgcgaattgtgagagaagtggaatcaattggtggaaacattggagcttcagcttctagggagcaaatgggatacacatttgatgctctaaagacctatgtacctgagatggtagaattgcttgttgacagtgtgcgaaatcctgttttcttagattgggaagtcaatgaggaggtaaccttgttattatttatttatttattttgtaaaagcttataaattggattcggaactgtaaaattgttgcatttacctaatgctattgtcatgttttgcagcttttctgccatcttatcaagattaatatattattatcaattgttattgttgtgcttgtgaagttgtttcatttgttaccttttcaattgatattatgtttgtgtagctgcgaaaagtgagagctgagatcgcagaattgtccaataatcctcaaggcttacttctggaggcaattcagtccgctggttattctggtgcattgtcaaattctcttttggcttctgaaactgcactgaacagattagatggaagtattctggagaaatttgtttctgtaagatacaataatatttatgaatcccttatgcattctaggtgtcttgttaaacttttcattgtggtaattgtgcatttatttttcttgattattcgaaacatatgatatttcaaattcaggaaaattacactgctcctaggatggttcttgcagcatccggggttgatcatgaggagttgatatcactagcggagccacttctttcagacctacccagtgttcccaatcctgaagagcccaaatctgtatatgttggaggagattatcgtcgccatgctgattcatgggtatgatgtttgtgtgtgcatgtgtgtgtgtttaagattggttctttcttctcctcatttgcaaaattttctcatagatcattccatcatttttctttgtgctaatattctttacttcttttgtgttttttcagaccacgcatgttgctcttgcctttgaggtccccggtggttggcgtgaagaaaagcaagctatccttttaactgttcttcaggtgtgcattttaatattggaaaactcgtaagaattttttcttgattttatatcatttttctacaatgatgtagatgtgacattgcttactttcatgcttaaacaaactctcattttacagttgcttatgggaggaggcggttcattctctgcagggggtcccggaaaggggatgcattcaagactatgtaatattccttagtcttccagtttatttatttatttttttgtaggttccactttattggaaaattatgggacaccaaaacaggaaggaagatgaatctcttccaagcaataaaactctttgtctattctaaatgcatgcaaaaatgctctaggaaaactagacaataaagcttcaaagtctgtagttgtgaagcattcatcttgctttcttcattgcaccaaaagaatatttacaaattacataaatagaaatgaattagtaacaaattttaaggaaagacatgaaaattacacacatgataaagttattttataaacataaataataattagaacttatctcatggaaatctttaagtctttagaacttatccagtttatttcttttgttacttaatttatcatggttttggttttacagtttatatgttatttcatgacaatttaacatggccctctttgctctttcatttctttataaattgcatagtttagcataccttattgtgccttttctccttcgaacagatctccgtgtcttaaatgaataccaacagatgcagtccttttctgcattcaacagcatcttcaataattccggtctatttggcatttatgctagcactgtaaggcttacattttagaattgtctttgtgaatctaggatgctatttgttgatgtattagtaggatcatgtggaatcagagacttagtgcagtttgcttataaggctgatactttctttttattcctttttttttttttttgataataatgaaatagctatgactcattgagtggatgtccagcagattattattattattattatnnnnnnnnttattattattattattaattttccttttctgataaaataaaaaacacagaaattagtcatggtgttaaggttgcatgtttgtccacaatgatgatctaaagcgttttagttggtgatggatgaggaatttttaactcattctgaatttgtatggcagaaaagttaagttgcactagtcatctcatcaacattagacctttgcattgacacagccattatgaactcaaaatagatcattagggtgtttcgtgatgtcgatccttattactagtgattacattattgtttcttttttcctaagactgaagatgttgaatattcggatgtagggatctgactttgcctcaaaagcagttgatattgctgtagcagaattacattcaattgcaacacctggacaaggttatctttccttccctttaatcttgtttccccttgtgtattttcttgggttctctttcttacttttatttcttataattcagttacccaagtgcagcttaatcgtgctaaagagtccacaaaatctgcagttttaatgaatctggaatctagagtattatttctttttctctctctctctcnnnatatatatatatatacatatcctgacatattttcatatagtttgatagttttatcttcgagatgaaaattcatatatggctgcatatgatacgtttaagtattcaatcattcatatctatttcttattgaattgttgcagatgattgcatctgaagatatcggtaggcaggttttgacatatggagagaggtaaaaacttgagttgattttttattttctcagttaggaaacccatgctttctagcattcttataattttttaatacttgcaggaaacctgtggagcatttcttaaagacagtggatgaaattactctgaaggacatcacaaacattgcccagaagattatttcttcgcctttaaccatggcatcatatggggacggtaattgttatttttaggaattacatagtattaaaatttactgattagatagcgctgaatattaacaaatgattttgtttttcctggcccagttattaatgtccccagctacgaatctgtgagctgcaagtttaattctcggtgagggcacttcggtcgcttcgccatcagccttaattatagagttcaaggttacttcttcccaaacattcttactaaggttcaatattgaaataaattttaatcttttgaaggaaaattatccacattgagtatacccggaatatttggctttcttttttgccatcttcctcgcttggaattttttagcgggtttttctttaagcaattcattatcaatgaaaattttgcatttgttataattttcttttcctacactttgttttcttttttctatttttttgtatggatatacacactatgatcaatcattcttgttgaataaatgataaaagcagtgagaggttgctattttgtcttgaccgaatattttggttgttggaaacaagtaaattaagcttcaaagagttaaaatgtaaatgattttatgcttcgtcttaagcatctaaaactggtaacattttgtaaatattattgatcttggagaggtttgttttggaaaaattggattgtgatctggttagagatggctgtttcaaattttcaatttcatttttgctttgactcctcttgtcagccgttgatggtggcttttattcatgctctctctctc

SEQ ID NO: 16629 - DNA, 5793 bp, Cannabis sativa
ctgacaataacaacacaaaaactccaagccctgacttttgatactgatttaagttatattctcttatttattttgtttaatttctgctttgtggtttcagattcctgggcaacgggctcttgcattgcatttgcttttagctgttcttgataatgcaatagacaatattaaccgagttcacattggatgttccatgggaaaggaggataaagatgaaagagtttctgactgggaagctatttgggcttatgcacttggcccggagcctgagcttgttctatcaatgaggtgagttacatcaaaattctttgtttcttcatagtcttagtcctggatacttgctttgggttgaatgtctctcacttatttctgttagagtggtgcatctgagcttgactgacttttaccagtatttctgtttgagtggttaatcatgtgtatttgaattgaattttgtacatcttagaaattattggatcattgagaaagtaaattttttccaatgatccttacagctatccttaattcatgctaaaaatcacacacacacacatatcgttgagctaatttgtaaattttttctctagttttatttttttaacatcatggttatactatttaactcaatagtttattgatttgtaggatatgtcttgatgataaccatacttcggtagttgtagcttgtgctaaagtcattctgcgcatattgacatgtgatgcaaatgagaactacttcagtttttcagaggttttttattttcatatatttttatgcattatccatcctaatttagtctacaaaaatgtacttatttcaagtaacttttttggtttcagaaattgactactctcaaggacatctgtactgcccctgtgtttcgaagtaaaccccagattgatgttggtttccttcgtggtggattttggaagtataatgctaagccttctaatattgttactctagatgaggaaattattgacgatgaaactgaagggaaacatacaattcaggatgatattgtgtttgctggacaggattttgcagcaggtttggttaggatgggagtccttccaaggctacgctatcttcttgaggtctccagcattccattgtattgaatatttagtttacgttctattaataaattaacatattatgcaatttcccagtcattacttggaaattttctggaactgaaatatcctgcttgttgcgaatgcaataatatatttcaatgtctgcacttattgtatctggttttattgtttgctaaatgtattaattttattgtttcagtcaactcctacagcagctttggaagagtgtgttatttctatacttattgctattgcaaggcattctccaacaagtgcaaacacaattatgaaatgtgaaagacttattgaagcagttgtacacagatttactgcaaaagaaaacatggaaatatatcattctaagacaaaatctgtgactcttttaaaggtaaatattttcttatgcattattttggtgaacattttggatttgtaggtattgtacattttacagccacttattcaagtacaataaggatagggaatgctgacatgatcattattgtttctgtttctgtaaggtgttggctcaatctgatagaagaatttgttttgaatttataaagaatgggtttttccagaccatgacatggcatttgtatcaatatatgccgtcgctcgaccaatgggtgaaaactgggcaggagaactgtaaacttctttcagctttgatggttgagcaattacgtttttggaagatttgcattcagcatggctattgtgtatcatacttctcggatatttttccttccttgtgcttgtggttgaatccacctacagttgaaaagcttatagatttagaccttcttagtgaatttgcttctgtggcagcaaatgcgtaccttgttctaaaggctttggctactaggcttccaaattttgtttcacaaatgaatcaaagcaataagatccatgaacatgctgatgatgacatggagatctggcgttggagtcatgttggtccaatgattgatttagcagtgaagtggatagttttgatgggtgatctacaccatggtagtcataatttacacaattcatctgtgacttctttgctgtgggtgtattcagctgtaatgagcatgcttgcagaagtgctcagaaaaattgtcccagatgatatcgccaatcagacaggaagtggttggcttgtcccatggcttccagagtttgttcctagagttggacttgaaatcattaaaaataaaattttgagtttttcggatgctgttgatacaaaatttgggtcaggtcttgctggagagatctcttttgttgaaagactatgccatttaagacaacaaaatgaatatgaaacatcattagcttctgtaagctgccttaatggaatcttcaagactatcactaccattgataaattgatccagttagtcgataaaggggaacaacattcccaagagtacagtctttctagagaagaggacgtactcaaagatgggttgttaaatcgatcttttgttgaattcagaagcgtgcaaaatatttttatgaagttagttacttcagagtggcaatttgtgcagtccgttgagacatttggcagaggtgggcctgctcctggggtgggagttggctggggtgcctctggaggaggatattggtctggaattgttttattggcacaagcagatgcaggatttatcattgatctgcttgaaagtttccagattatgcctataaatgatatgctcaatgctgaagaaatatcttatgctgtgcaaattgttaattcttctttagcagcatcattaattgctgggccaagtgatagaactgttgtggacaaggcttttaaaattttggttcatgtctctgttctgaagtgtcttgatcgctgtattcggcattttgttcatctcaatagtagaagtaagctgtttggctgggaacataaagaagaagattacctactctttagtaaaatattatcttcacattttggcaatagatggctgtcactaaagaagagcaaaaaaattaaaagcttgagttgctcaacaaataagaacttagttaaaaacagtggttctttgagcaccatatatgaggactcggacacatcaaataacattgaagattgtacatccttagttgtagagtgggctcaccagaggcttccactacccactaattggtttctaagtccaatgtcaactctttgtgaaagcaggcattgtggccagcaaaaatcttccaatttagaaaatcttatacaggacgcgggcgatttgcttgaagttgctaaagctggactttttctcctcttaggtatggaagtcatgtcaagtttccttccaagtgatgctccttctcctgttcagagtgtaccgctagtttggaaattacattgtttgtctgtgatcttgcttgttgggatgggtgtgatcgaggagaaaaagagtagagattgttatgaagctttgcaagatatctatggttccatacttgataaggagaggcttaaagatgctgaaatgattcgggagaaggatgtaaacctgttgtcagagtctagaaatactgactttttggactttttaaggttccattcagagattcatgatagttactcaacattcatcgaaactcttgtggatcaattttctgctatatcttatggtgatctaatttatggtcgacaagttgcaatttatctgcacagatgtgttgaaactcgtgttcggcttgctacttggagtacattgactaatgctcgagtccttgagcttcttccacccttggagtcttgctttggagaggcagaaggctaccttcatccagaagaggtaggcaaactagtttacatgtctatactatttaaattgctggatgatcttttcctgcttttgtttccagttaccttttaagctattcttgtattgctttcccagcaaatatcttatatcttgctggaactttgagcatttattaaggaaagttatggcaaaagtgtataatgttttttgacaagtaagaagtagaactcaaggttcaatgtttttatggattggatgtatttgttgaataatcttgagaagcttctgcatggattgaatctcatgttcttgcatgaatgagaattagaaaattattaaggaattctttaatttgttaaggttttatacattaatccaattattagaacacaaattagtactgacatgatgcattgatgcagaaattgatggaaaaataatgtatttcttaatctgcaggataatgatgaaattttagcagcttatgtgaaatcctggacttctggcgccctcgacaaggctgcaagtcgaggaacagttgcatacacactggttcttcaccatctttcatttttcatctttcatttctgtgctggtgataagttattgctgcggaacaagcttgtgaggtctcttctacgggacttctctctgaagcaacaccacgaggtttgcgattttcgtttttatacaattcttttaaattccgttttgaaattacccacagttgctgaaactagagcattattacctgccaccattcctttttttttttttatgctgaaatggtgtccactctcagctgtcaaaactgttcttatcttcaatgggatgataatttagaatacttcttgtcgttgcctcatgatttttaccagcagtgttcttggtcttttggaattttatcatcgattttgcttgtacgaaaaaataccttttattttcatgatgttcctggaatgttgtaaaagggtatctgacttcttgctctattctataattgcaggtaattatgttgaatcttatccgatataccgaaccagaagtgcggcagaattctaatgttaaagttagtttaccattagacatggagaaaaggtttgaggtcttaactgaagcttgcgaaagaaattcttcccttttaaatgaagtgaagaagctgaagtcacttgtacagaacgatctcttgtaagcttatcagaattgtttcccttgagttttaagtttactgtcgtcaaaaagttttgccttgtaaatataaatttgatcagagaagaggagctcaagtggatttcactgttgggaacaccttacataaatatttgaatatatatgttaattatatctttgggatccaattattactcctatttatttaatatgtaaaactaacctttaaatttcatggttcaaataacatacatggctacttgatgtgattatcaaatgattttttgagatggcaaaattagtttagtttttattatgtttttttatttttttaacctccggtaaaatatataccaaaaagaagacaaagaacaaagtttagtttgtagtagccacaaagggccaagctgccaacccatgatcagcaggattaaaagttctaggaatttaaaacacacttttaaccaaatcccctaagtggaaatgaatgataaaccaattcggacacttcttaataactgaaagaaaataatttgacttccttccagcgtctactaaattgacttccttgtattaaattcacatgcactttggttgagaaagcttccacaaagtcaccatgctcactagaaaccaacaccacaaaaatataggccaaccatctcgaatacagtaagagcacaagcactatcgtttagctgtaaaggaatttgttaatattggttaagagatttgttaattacac

SEQ ID NO: 16630 - DNA, 5064 bp, Cannabis sativa
tgattatattgaaatgacttttatttagggcataaaacccaacaatgatagggttatcactactatcatggcccatatggggcccacttatgaagaaatgattcagaagcctcatggggaactttgtaagtcccgacaaccccacaaacatcctgaacctacccattttccatggcccattaacgctgataaaattaggctgttggaggaattaatgggccctgccccaatagataagtttgaacctatgccttcagtttttcatgacccagtagacttatctaaccaaatacatgaaaatagccaacccaggaaatggaaagctagtctcaatctcattcctttcgttcaaagaactgaagaaaatatgcaggagttttctaaagtaataccaactctacccccattttcaccttgccctctttcaaccccgtttaagcttggttcaggtgcttcttcttccaagtcaagtggagacaaaaagaggaagaaagtcatgagtgccaaagctccagcaaagaagaagaaccttcaatctcaagagaatgctagcagaaagttggaagatgaacttaatttggtggatgcgaggatcgatagtgtgcaaaactttcaatcgggcgaggaggcggcccttatcaagccccccattcgccatgaaaatcccttcgtggaattaccgaggtctcgctcgagactcggcaaaccaagccttaatggcttgggtgagaaaatacaaaccggaatgtatatttctcatggaaactaaaagacagagtagtcatatggagatgatagcgagaagattgggttattgtggttcaagcatagtttcggcaagagggttagcaagtggattttttcttcaatggaatcaagaaataaagctgaaagtcattcattttgataataacatctttgaagcagaggtgcaagatcctcaatctctcaacttttggagattatttgcaacatatggaactccttatgaaaataagatcctcaatctctcaacttttgaagattatttgcaacaaagtcttatcttgcaaatctccttggctagtagtgggagatctcaattgtgtcctcaatgatgaagagaaaatgggaggtagagctgttacaagcaaggacacaatgtggttgaaggactttctttattattttggggggattgaccttcgcttcaacgggtgtaagtacacatggcagaataagagattccaaggcgatttgatcagagaaaggctagatagaggtataggttcctctgaatggattgcatatttccctgacgttagagtcagaaacttccctatttcaatttcggatcatgctcctattatattagataccaagatacactcaaggcggggtagaattcctttccgcttctatgatgcatggacggtggaaaagctcctgtagggatgtgattaggaagatttggggtccaagcactttcgaagctaccaaggaaatgctaaggaatttttatcagactagaagagatcgtcaaaggtggaaaaagaaaagcattggtgatatggatcaagctatatgcatgttggaacagagacttgattggatccaacagaaagaaataacggatgacctgaaagaacaagaacaagtgatccaaaacaagcttcatgatttctggtgtatgaaagaaagtatgtggcgccaaaaatgaagggagacttggttaaagctgggagaccgaagcacaagattcttccatgctgctgctgtaattcgaagacgaagaaaccagatttcgagcattcaggatatgaacgacaatttgttggaaaataggaaggatattgcaggtactataaatcaatatttttctactcttttcttttcaaattgccttgatattccccctactttggatgagctttttgataataaactggatgaagcagcaaacttagaattgataaaggttcctactctgagtgagatacgtgaaacggtattcaatcttcatccgttaaaatctcctgggccagatggtctctcggggtgtttctttcggaaatattgggatatagttggcaaaaacattagtgcagcagttcaagagattttttaacagggtgaaatgcacaataagtttaactatactttcgtttgccttattcctaaaatagacaatccaaggaagatggaacagtttaggcctattagcttatgcaatttttcttacaaaataattgccaaaatcttagctaatagacttagacctttcatggatagtcttgtatctccaattaaatcggcgttcataccgggaagatggatagctgagttttcaattttaactcaagaaataattcataagattcgtcatcagagagggaaggaaggtctgatggctattaagctggatatgcataaggcatatgacaaaatggagtggagcttcattcaaagggtgctggaggccaacggttttaacaggaaaagtcagaaattactcatgtcttgtgtgagtagtgtgacttattcagtattgttgaatggttctcctctcaagaagattgtccctcaaagggggttgagacagggagatcctctctctccattcctttttttgctttgccaagaagttctatcaaagatcattcagaaaaagggaaagaaatggacttatacacggaattctgattgcaagaaatgctcctccaatttcacacctaatgttcgccgatgatacaattctttttgctcgagccaacacgaaggaagcagagaattttattcagtgcctcaaaacctatgaagagtggtcaggtcaacattgtagtaagtcaaagtcaagtgtgctcatatcaaataatattttcggtgacaagagaaaacaaattcttgaagctctttcaatcgatgaaataaatgggcaggaaagacatcttggaaacccattcattttcaagaggcgcaagaaagagaactatatcaaactgaaggagagtatgctgcaaaaacttgaaggatggaaaatgaagcttctgtcatatgcagggagactcacacttatcaaatcggtagtagcatctatgccaatctacatgatgtcaacaaacaaagttccaatctcttcatgccggggattggatgcaattgtgcgaaaatattggtggtgtggaaacacggagaaagatagatatcttgccttgaaatcgtgggacactatatgtcaacccaaatcctctgggggcatggaattagacgtttctaagacatgaacatgacacttatcaccaagttagcttggtgtgtagctaacaaggaagacaaaccttgggttaaggtacttcttcataagtactgttcagttgataatttctggcaggtatcaaaaagatccaacgactcctacctttggaaatgtattctggatgttagaaacatcatcttaagaggttcaatgactttggtggctgatggtaacacgacggatttttggaatcaaccttggattccctggttggagcctcctgaatttaaagatcttatggataggctcaaatcgaagaggtacactgtcaaatctcttgttgatatatccttgggtatgagtggaatagagagctggttattcctattttcagggaggaattaggtaactgaatcatgagtattccaagattgcattttccctcaaaggataggataatttggaagaactcccaagatggatccttttcagtcaagaaggcttactgtgtggatcaaggaatgacatttgaaagtaagaaagaagtgtggaaatggatctggaagtcgagcattcatcctagaatttccatcctcttatggagaattcttaacgaagctcttccaaccaaagatagattgaagtttgttgtggataaggaatgccccctttgtaatgagtcatgcgagaatggtctgcatcttttcaaagaatgcaatttcgccaaagctctgtggttctcaggcttatttcccattataattgagggcataccaggtgaaaatatctctgactttttcttcaacttgatttccagttttcccaacaacaataaggcagagatggttacctattgtggctgtgttttcgatcaaattttgaggcagagaaatgattgtcgccttaagtgcagcagtggtaactttgatcaggtgcgaattagaattcttaaagccttctctatattgagtgttaatggaaagcactcaagtgttagttggcttgagaattcgtggatcggtggtgatgaagaaaatgcatgtcaggatctcggcttagtgtgagtaaaagaggtggactgtatcatcctcactgatgcttcgtggaagcaagaaaaggccgggttggcggcagtcatgatcaataggagtaatggcaattgggtatataaaacacaacttattatgacaagatctgctatggaagctgaactccaagaaattcttatggcactcaaatgggcgatagtgaatgattggaaagaaatccatgttcagtctaattccttagtgatcacccaagctttggctaaaggcaagtgcccctctgattggaaatcctttaatatttccctgattatcttaggtttaattaaactatttaaaacttgtagtttttttcatataaagcgtgattgtaattcctatgcggatgggttagctaaaagaactagggtaactaacagttttgtaaacttgtgtcaaggggagggtgatcctcctgtaatccccatctatgcttcctttatatgaatatcttattcctccaaaaaaaaaaacttggagttaaatctcctttttttttccagtaaccacgtaggcccatgaatcgatatataccacatttatttatgtgagcacatatgtgatgattaatctgtaagagggtcccgattacacacgctcacatgctaattttcttttttgggttgagttacacaccaattcataaatattttttcgctgacttatataaagatatttataagacaagtctatggtcgagctagcaaaagttccctaccggtaggaaactttttttgaccattg

SEQ ID NO: 16631 - DNA, 2336 bp, Cannabis sativa
tgaccagctttctcatctcatcatgtttgctactatgcgccttttagaaaaactaatccatagcctttaaatgtgccttgtcctcctcaatcactaaagctgacctgataggaagggtgaagtggggaggaggcaatgggggcatagctatattttccctggataattgggtggcagtagcaggaattatcttaggcactaggggtgatggaggtggattctcattgtccttggtagttctggtcctccttttgggcggctttccactaacagaggcatcagaccccttctggggcccgacttccacggcctacctcctcgaatctatcaactataagagcttctccttggtttctacccttaccttcttgttggtctgccatctaaagagccttgccattttttgggaatcacactggcctatcgtaatcagagttgtccccttcagtgttctctataggaacctactgcaagggttccatgttcacaacaggctcattcagatcaataatggaagaagagatgtctttcgtgtttagagccttaggagcagcctctcggtttgaagccaaaagtgtttccttttaagatccactccgagaagcttggcctttcctacctttgtccttgccttccctagcaatctcacggacattctcagatctggagtgaattttgcctaagaacttattgagtagacccatctgtaatgtacctggctagtctgcaaagaataaacaatcaatatattagccaaaatcatgtctgaatgtgattatggtaacaagctatcaaataataaattagaaggagccaaactgtttattttagcataattgacttccccctagaaaaaagagcaatgtcttctcgatctaatttattctcatgctcgaagaatcttggaaagtaaatcttactaagcacgtccactctaacatgatggtgcgctggcagaacaaaatggttgggactccttatgatgtaatctaccttatctatgtacctactctgcgaatacctactctggtctaaactcaagaagtatggatcaaatcctcctcgattaatactttctaaattagctaaggtgggagtcctaattatatgaaagggagtctcaccaatactgaaagtgctcgctcctagagcacccacattttgagctacttcctagaatcagatagtgagctcatcagcctcactcaagttttttggtaattatctactccaatccgctagctattgctcatcggcctttactgcttttagggcctcctctgcatttatgatttagcctcttgaacctcttttggatcccctcaaagagactcctggatgttttccttcatggaaagatgttccacgtcctagtgggaagtgatgaggcctagttctcaaaggttttttgtggttacaagtttttccacttgtaattccttggacaaaaaattgtagaaggttatctctgtcttccaactctggtgtcaagggcgattgaggaagacaatctaatagatataaaagatatattagagtacagcaagtaggaggaaaatgaaattctaaagttcaagcaatgaagtaacacttacttgctatattgaagtctaaactgagggtggaaaccctcttcaataggaaaccaaaggtgtaaaagtaatagtcctggaatcgcgtgtgtactttctggagctagttggattggagagactcttggaatagcgctcaagcctattaaaacctactttctccttcttacttctcatgggttgagacttgatcttgtagaagtataagatctcctctagcgtcggtggagatttattgtgctgagcacaaaaaacataccaccccgaaaatagacgatacacctagggaataaatagaaaggtgctactccaacaatggcacaaaagttggcaaagtaacacctcaggggcagatgtgcaccaatttcgatatgaactcgcctctagacgttgaagcctccttctgcgcacttgctatgcatctccctctgaacagagagtctattctagaatagtcccgaaacactttagagccccatttgggtctcatagttcctcaaatagttataaatcctaaatttattgatatattggtccatctcccatagactgtcatttaggatcaactttagaacaccatatttctccatgatctcctcctccatgtcaacttcctcttaatggagcttctaaggcattattttgtacaaaaaagactatccaagtagttagccaccctaactacctagtataaaaagggagcaggagagtactcccccataaactactttgagaggtcctaat

SEQ ID NO: 16632 - DNA, 7517 bp, Cannabis sativa
  modified_base (5702)..(5702): a, c, t, g, unknown or other
  modified_base (7485)..(7491): a, c, t, g, unknown or other
tactatttcagtgattgtttatgtactaaaccatgcaccccagactttgatatctactaaatcatgcccatcgaacttcgacatgtattaaatcatgctatttgaactttcatttatgttagattttatttttattaaaattaaacaaaactccttaaattcaattatctcaataatttagagggtatttttaacgatcttaaaaattcaaaaggtatgatttagtacatgtcaaagttttgggttaaaaatcttaattagcctttgttttaataaaagagaaagacgacatgtcgttgttgaggggcgtacagaattattattattatttaaagaatttctgatcggcgacgcggagctctttggctgtctgtcagaattcagaactgaaacaaactttcttcttcattcaattttgtccatctgcaataatctctctcacaccccgcttcgccagggtatatttccaaatctctctctctctctctccctctctctctttatatatatgtatattaacactgtaaaatttttcttttgttgtgattttcagggtttttggctatcaatggccgctaagtccaaacggttattttgaaataaaggtcgacgctttctggctttgggtgttatcataaggtagagataatgctggaaggacttgtacgccagttgatattggggtatttgggtcgctacatcaaagatatccagaaagaacagctcaagatcaccgtctggaatggtaatcaatattcattttttttctttcttttattgttattattaaaccctaaaaccttgtttctttttgatttaattaatttatttatttgcagaggaagtgctcttggagaatgtggagctcactcttgaagccttcgactatctggaattgcccttagctctcaaacaaggtattaaatcaacttttgatcattttacatatattgggtaattcaacattctattattatgataatgaatagcaaacttatgttcattttacgtaaatcaggtcgtgttggaaagttgagcataaaaattccatggaaaaagctcggttgggatccttttgtcatttgtttagaggatgtatttgtttgtgcttcccagcgggacgatgctgaggtaactaatcttaactctttgtaatgctgaaaattttggaagctaactaatatgttcatctcttgtagtggagtgccgatgctgttgaaaagagagaatatgctagcaaaaaggcaaaacttgctgctgcagagcttgctaaattatcaaaacacgtctctggtatgttaagctttctattctgttttctattattattatttttggagaaaaggaaaggaaaagaattctagcttctgcagttttcaaggatactatctgcatcagttttctgttttctttgtgggcattgacatctaaggagttcaaggataggataccatctctttggtgctttgacttctttattttaaatacaattcttctaaagaagttagttttttctttttgttgattgacttggatcaaattggagattcatatttcattatgcttattgcagataattgggccgggcgatcatttatatcatatatttatgctaaggtaacgttatcttattatttatgagtatagattggcctattttttttatatcgtatttctttcggaggactgaggcataatttatgcctttccgttgatatttattgttgcatgaaaaaccactgatctttgttgtttgcttcaatagatatttgacagcatacaagtatccatacggaattttcatgttttgtaccatgatttgcggggtgactcggtgagtaaatgcataatgaagtctatcagttcttccagttttttggcacaattgatttttgcactatgaaacatgattaaacactatcaagcacaaaacttgtgaacaatgatcaattctcagtactgaatttaccgaggctgaaaatatttgatcatgagtgagcttaccacatttttttatttttttatttttttcattcattgtgatgtttccctgaaattgtggcacaaattactaaaagagtttggcttgattgggggtatacctccaaggtgtgtggaaatgctgttgtttcacgttaaagagggcgaggaaagacaaattctttgggccactgctgtgtcaattctattttggggcttgtggctggaaagcaataagaggatttttgaagaacagagcagcaattttgaatacgtggggggaaagattaggctttggtagcactggttgcatgacataaggggttttaaagggattccttctactttacttagagaacggaccgccgttttgtaatttctttttctttttttgtttgtatttttttttttaatacttgtggaaattctacacccttgtatttttattttaaatcaatgcaaggcagttttagaaaagtagaattcacttaaaagcagcatgattatggttgaatgattttgacgagagtttaaatgttatcttcaattctattggcaaacttagggaatgacagtatttctttcaaatatttcatagatgctaccagagattgcttatttgcttgcactggcacgattttctaggatacttcagcataatttttctgctcttgttaaattcttcccaggtgcatacgatgtttggcttgaaattttccagcttgacaataatgaagcaaaatccttttgggtaattttcaatctcttctattgcttgttttagcagtgacaacctgtacagttatgtttttgttcatcaaccagtgtaaaagagctgtctcttcattagtttctaatataaaagaaaattacagatacctgctttatgtcagttttatagtgacattatttttctgctctaatccttctgaacatcattgaagttcaacaaaaatattgttttcttacaagtagtaatttaatttcttttatttgtttttaagacttaagtatcaaaattgataccataacatagttaagtagtgaaaattttatttattttaaagttgtttcatagacacagatgtgtcactgttaatatttttgatctagagagtattactacaactttcacataaagcctgggtatctgtaattttccctatatatgctttgttttttttgtgccactaacgcttttatttggtcatttgaatttaagatttttttctttacgtaaatagctagttatgtcttatcaacttatcacacttctacttttctaccgattgtataattctttcttttacataacaaatggtaaatagctagttgtggtgccagtagatattttaaatttcaatattgtgatcttctatcccagatcaagtgtgaggctaaaaggtggccaaatcagcaaaactttggaagttataggcttggaactttattgtggtacattccaaggacctcttgacttgacgactatggacaatgccagatctatggggagatgtgactccatactggcaccatctgatgtttccatgtcaattttggtatggaagctcctataacaacttgtcttctattccttgccactagagatacaaaaagtgttagatgaaacactttccttttctctgctggaaaattacactctggttcttcaatcatttatctcatgttttaattttccctccctttttgcgttgcctttacaacatattttatagggtggttaatgccattggtggtgtttctggttttctatctctatgtaaaattcctagttctgtaattttgacccgcactactcggcccaattggttcttgtaaatgaattctttctcattaggggctaccctgcattcttatagtgtcacgtttttagtgaagcagtctttatgacaatatatgagtaattaccgataatgtaatattttggggcttttcgaaaagactccatagtgatttatttcccgctattttccttttcctaacttgaagaacttttaattcaatgtttgatgtttttttaggtcaacaaaccaggagagctttataataacaacctgctacattccatcaatgccgagataactagtttggttggttattttattttgtgcttaaataaatttggtcatattttaattaaacttctaggtttattataatgtcacttatctttcattttaatgtgtgcacaggagctaacattgaatgaggttcagttgcaacaaatcttatttctgtgggattatattagtacatcacaattgaggaagaagtatgttttcatgccaatgccaatgctaatttttatttttattctttgattaagaaaatgatattgattgtccacacacaaaaacatgaaacaatattaatgcgaagcttgcaaaggcaattattttacataccctgattgtcaccagaagggtttcctttactgccatgattgtaggcaataactccagcccccttttttgctatgatacggctttggtgctgcgggtatgtaaaaaaaatgaaataataatgagattgcaatctttttaaaaccggatgaatcagttattataattgtttttgaaaaagagaaagaggccatttgtcttagactggcccctcactgatatgtattaagaacctctcttgtggcgggggaatcagttattaaattagagttggagtcttaaattgatgcattatatcttcggctgaaatgacagaaaataataattcaataactttagctctcaaaaactccagttacaaatactaacacaagctgcgagtccacaattaaacaaccttggctggactgttctgtgtcagttaaacaatgcaacttctaaatgagtaaaacattttacatgctttttatattttactgatttcccttgaccacagtccacaatttgttttacatctctttccttcatatgtattggagccatgctcctcttgatggtttttgttatttcattttcaataaaattgttttgatcgactttttgctataactgttatatatattttttctttttgagattctgttgaaaacttattgttgttcttttttatttttggacagagcaagtattcctttgaaagtttggttttatacattccttctacattgaggcatatatcaatgtcttttctcattacagttactatactggcttgttacttatatttgagtgcatcatttcttttgtgccttattcttttttatataatattgccatttttcattatgattcttacctttcttctactttatccttattatacttgggggagacatccttgattgaaaactgcaaattttaatacgtgaagttgatacggcttttagtggttgttatttttgaatcatataggtatggacgttatcgcccttgcggcaacctattatcaacaaggccagaaggctggcaaatattgtggtggcattatgcacaagaatctgttctctcagatgttcgtaagagattaaagagaacatcgtggagatactttggacagagattgtaagtcttaatatgtttatttttaccaaaatgggtacccaagtcttaatagtgaacttcaactttatacgagtttaaagaccaaaacatgctctggcttaaaattgaaaaggaaaaaacaaatagttgtcttttgactttcagatttacacctcatttactctctctctctctctntctctctctctctctctcttacagttttctaacttgttggcaatgaaaaataaggaatattttctccacggggatggggctccacggggacccgcccttaatggggcggtgattctcggtctaaatggggaacagggtagggacaggaattatcttttgtcccccaatgttaaacgggaaggagaataggatcacactccctgccccaacatggactcgtttaatattttattttatatttctaataatatttttataatttatatttgtattttttttaagtttattagtatccttttatgacttttaagttgtgttttaggataataattagtttattgaataataactaatatgtaattattatacccgaaatttgactatgtaccaaaagctgacaagtgttttacaaaaggaatataaataagctcaaagaatatagtaattaaattatattattaaatgtgatttaaaattactcgtttcaattacattataagttgatagaagcattcaactcgctgactacatgagcatgaatgagaaaagaataaacaactattaacatatttaatagaggagataatacgtctgtctcgagataaatagagtatacaataaaagtgtgcaagacgagaaatcaaggagtttacagctcgctaaccctcatacttaaaaataaaagcttgcaactcatcgattcacgcaatcgtacatggagaagaacatatctatctatctcgctcttaataccacctcgcaaataactttacaatatgaagagcaatgtgaggagaagaatgtctacacttaatattttttcctttaaaagacaaaaaagaaggataactcatttttagcaaagaagcaaccttcttagtcagcataactgctttaaggataaagacaatgagtagttgggtagttgtcagatattatcccatatgtaaataaataaaacgtggggaatgtccaccttttattagcagttgtagatgaatggatcctaataaaaataactgccaacctatcacctataaataggggcaaaattcatagaaaagacgacaaaaaatagggagaaaattctatttttattgctgataagaaactcgtggagtatgtaaattttaactacaatattacgtaaaatatctggtatttattattattaaattctgtagtaaatttattacgaaaaaaatattatatatttagttaacaaaaatctgcgttaacaataatattttaatttttatgtattttaatatttttatatatttaaattttattataaactttattttttcttaggagattccttgccccatccccgctcccattaggagattccccaccccatccctaataaagaataagcggggatggggattaaaattcttaatggagatatgggatgagtactctttgtccatttctcgtcccgcgtgcattcttactatccgggactcttttttaggagggaacaactaaccatccagaacttccttctggaggaagcgtagctatcttgaagactccttccagatggacatgttagactttcgggaacgctctttcgggtgacatctaactttcgataaccagaataaattttggagatcttttcatttggaagaactataccacaaattatggtcggattggatgttatttttaaatattctattggattggatcacctgttaaagagggtgtaacgtccccgcttcaagccttcattgggtccttacacccacggaataatgactcttatacacgnnnnnnncactctggctacttcatggactgatg

SEQ ID NO: 16633 - DNA, 4808 bp, Cannabis sativa
  modified_base (201)..(205): a, c, t, g, unknown or other
  modified_base (253)..(256): a, c, t, g, unknown or other
tgtataaatgtttaatgggccggcccatagtatttttgtaactttttttccctttttgtatttttctgtccattattattcttagatgatatttattttttattttactacgtataataatattatataattttgctaccataatacaaatattttaatatatgtatattatattgacatgctacatatatttaattattnnnnntatatattttaattgtatgatattttatttattttaaataatatttannnngtttctattttattatatacaatgatagtacataattttattgttatgatatttatattttaattattttatataatttaattactatagtatacatatattgagaaattttattgtaggaacaccatttttgtccttatgctagagatatttttctgtcccttgatttataatcttgtggtatggagagtgtagggagtattttaacactagtgggggttaatacattattattttttccaaaatatttaaaaaggacaaatttattatttaaaaaaaaattatacctcaattaataaacataaatataaaaaaaaaccattattgtctctgttttcctttctttactaaccagcgaatgtttaaaaaaataaaaataaaaataccagtaaaagtcttgcaaatttggaattatacccaagcatatgagaaacagagtatagcagagaaaaatgtatttgttttacttgttattgaactgaagcttagaatacaagagtaaggtctatatatagaccaggtgagtcggtgaagactctaacagaaaaggatacagctaactaacttcctaacagaaaattaactaagtcttaatagcctccctcaagttagagtgtaaatgttaatgacacccaatttggatacaattttattgaactgagatggaagaagagatttggtgaagatgtcagctagattgttgttagaagaaacatatagtagatggagtgaaccttgttggaccttttctcgaatgaagtgcaatcaatttccacatgtttggtgcgtttatgatagacgggattctcgctgatgtgcatggcaacattgttgtcataatatagcttttgaggtgaagagaggtgaaccccaaagtctttgagaatggcaaggatccaagtgagttcgggtgtggcattggccatggcacggtattcagcttctaaagaggaacgagatacaacttgttgtttttttgatttccaggatatgagagatttgccaaggaagatgcagtatcctgagatggatctccttgtatcttgacaactgccccagtcagcgtcggcaaaaaaagatagctgaacattggtaggagataggctagtttctgcaaaagtagtgatgttggggcaggaatttgtagggaaaaaaataccctggcctggtgtctttttctgatattataaaagtctatgagcagcttggaggtgaggaactcgaggacatgataagaactgactgaggtgattgactgcataagtgatatccgacctagtaatagttaggtagattaattttccaataagacttctatatgcaatcgggtcagtgagtagagttcctttttctttgctgagttttaaatttgtctccataggtgtggaagcgagtttggttcccatgtaacctgtgccatggagtaattgaatagggaagggtctttgagaaattgagatgccttctttggtgcgaccgatttcaaggccaaggaaaaaacgaagtttaccaaggtcttttagtttgcatttttggtcaagagaattagtaaaatgaatgatgttagttgtgttatttcttgccacgattatgtcattcacatatatcagaatggcaatgaagtctggctgtgagtgtttgatgaataatgagttgttagaatgtgattgtttaaagccatcgttatagtgagtgtggtactgagtttagagtaccattgtcgagaagcttatttaaggccatatatgttcttgtttagtttacaaacagagttaggaggggctttatatcccgggggatttgcatgtaaacttcttcatagaaatccccatgaaggaaagcattatttatgtctaattgatggatatgccaattgtggattgttgcaagagccaagaagattttgaaagtattgaacctggcaactggagcataagtttgagagaaattaatgccttgcctttggttgaaacctttggcgacaagacgagatttaaatctgtcaacatcaccatgttggttatatttgactttataaatccatttgcacccaatggcctttcggccagggggagtttggcgatgacctaagttttttttttttttcgagagcttgggtttcattatccatagcctgaagccagtgctgaaagagtgatgcctcagcatacgtttttggctcaacttgtgagtatgctgctaagactgtagctaaaaactgagggtgtaacttgatgtaggatagaaatggttcaataggatgtgttgtagacgttgtgtgacatattaagtcttttaagtattttggttttttattagtgcagcaagaaatggatttagcaggttgaggctgctgttgctgaatattggcagtaggaagttgctagttttggggtaaggcaccagtcatctgctgggcatgaggtgcaacagcagggacctattcatgctgatgatgtacaacaggctgcagcaggtcattagatttagcagcaggtcatgagatttagcagcagggggctgcggatctggggagattgcagcaggaagctgctgatttggagcagcaggaagttgctgattttgtgaatttgcagcaagaagctgctggtttggggaagatgcagtagaaaactgctggtgttgagggattgcagcaggaagctgctgtgcaggatgtttatagtgatcttgggatgatgaaacatgagaaaaatcttgttgaggagccattgaaccatgatgaacaggtttggctgctgatttttgttggatagttgagacagtagggagtacaagttggggaaatatagtgtcgatctcagatggggatgtggatgagaaaaaaggaaaaatgtgttcataaaacacaacatcccgtgagatgtaaatttgtttagtctcaatgtcaagaagcatataagccttcatgccatgtggataactaatgaagatagaggctctacttcttggtgtgaacttgtgtcttttggagagaagaatggagccattagctaggcacccgaaacttctcaaatgatcatagttaggagctgtgttatataacagttcatgagaggttaagcctttgaataaggtggaaggggtcttattgagaaggtatgtagcagtttgcactatgaatggccaaaaaaccagaggtgagttggactgaaatcctagtgctcgagctacatttaaaatgtgttgatgttctcgttcaacgacagaattttgttgtggtctttccacacaagaatggtaatgcgtaatacctttagaggcataaaaggcatgtaaatttaattctttagcgttgtcggatctaatggctttaatattggtagaaaattgagtgcaaaccatattaaaaaaaattggggataatattttgaacattagatttatttttcaacatgtatatccaagtgaaacggcttttgtcgtctactatggttaacaagttcttatatccttctatgcttatgatatgaaagggactccaaatgtccatatgaactaagtcaaagatgttttttgcaaaattgttattggaaataaatggtaatctttttttttttagctaattgaaaaatgtgacaatgctgattagtaaaaaaaaaatagagttatctctctttttattaaaggaatttgaaatgtacatagatgggtgaccaagacgattgtgccaatgataaacaatattatttgtgtactgaaaaaaaaagaagcattagcagcaaccgactcttattgcaatagaaacaatttttcacatcttttaacagtcccagtcaccacattccaataaagatcctgaataacacaagatttttgacgaaaagtgatagaattagagctgttttgggtaagatcataaatggaaaagaggttaatttggaaacttggaacatatagcatattgtgaagtgtgatgtgaggattaattttgactgtgccagaattatgaactaacacttagtgtccatgtggtaatgtaacatgttgaggaaaagtgtgatgagaaaaggaagtaaagcatgtaatattagaacacatatggtgggtagctctactatctaaaatccaagtaagatggggtggattgttacttgcgaaattggaggcaataggtgccatagaagccatatgaacatgagaattgttggtgagctgctggctgagaaggctgatcagctgttggcactgttgagacaaatccaaaggaatggattggccatcagcatcatttttggaggtgctggcataatttgcatttgctttgcctttctcttgtcattttttatccccataatcaagggggaatcatgtagaaagtagcatttttcaaccaaatgccctggtttcccataatttgagcatgagggtctgggtttcttggtacggggaggattagtaggtgctgaaccagtggcagcagctaatggaaatgtattagttgatccaagagaacgttggcgttcttcttgtatgatcatagcaaagacacgagaaagattgggaatgggttcattgaacaagatttgag

SEQ ID NO: 16634 - DNA, 3995 bp, Cannabis sativa
  modified_base (3380)..(3392): a, c, t, g, unknown or other
ttacgattggtaatattttgatttatttatctatttatttttctgggttgttgctctaatctgaatcaatagaatgattcaagtgatctgtttcagtcaaaatgtagtaaatttggtcaagaaactgttgatcggtaaaaatgggttcagtgttaattttagccaagagccaaggcggggatcatagattttgaaaattgattagtgggtaattaatcaattacttgattgctaattctagaacactgtgaaactgaaaaaagggactattttgctttaactttgtacaacttagataaagaatcttgttccatcactagtcatgaaaattctacttttagacaagagaaaaaggaaagttagtggtaatggcttaaagtatttttgttcccttttctcttattcttgagaaccaaatggagctctacaagttttgttattttcattttgactactttttttgaaaattttgaaactcctctcatgaataattggataaaactttcatgaatatctgcataaagcataatgtcttcttttaaaattttgtttcttttcatacacttttagacaatcctagaaaagaacatagtgacacactaagaaatcatttgaattattggctcctgttaaatgattattacctttgtactttctttcatattaggtgagctgttatttctttatctatagtcatggttaatcaaatggggacgtaaactgtccctatcttttttatgtctttctactgtagtaaagttagtaattaatcacaagtctatccattcaataccacttaaactctatcaactcaacgttaaccaatgagttaagagattcagtacaaaataatatgattttgcccatatatttgtttattttatggctttgtatttacaatgaatctctatattcaggcttcttacaccacctggtaccccacttttgccttctttggatttgggatcacaaagaagtgcaacaagtcaggttgagaatccttcgtctcgtcccactgccttgcggtcgagggtgagagtttctagttcatttgagttgcaagcttatatatagtttttagtatcattggaattttgtctacattgttgtccctggctgttcttgtactttaattgttttaagagtaattgtttttgtacttaaaagctaaaatattctgatttggtagtatttatttctatgatgtggggtgcagccagcaaatattcaagtggagcctgcttcaaggagaaatatatcatctaaaaatctaaacttgccatctgaaaaaaattcttcctctactggaaacagaaggccatcttcatctgagggaccgaaaacagtgactcggagatctgcaactccaactgcacggcctacattaccattaacaaccaaaccctcgagatcatctacaccaagttcacgggcctcatttccttcatctaaaaatgtggctcctcaagctaggtcttcaactccaactatgtcctctgctcggtcttcaactccaactaggcccttctctcgggcttcaactccatctaggtccactgctcgggcttcaacaccaactgccagacctgcgttgccagcttccaagtcgacagcacggtcagcaacaccaacacgtcagccatcaacctcactaaatgcacctggtgtatctgctccaacaggtcgagcttcttcagcatccaagttacgtcccacaatctcaaaaagttcagcgacttcacgtggcccttcacctacagtaaaatcaaggccttggaaaccctctgagatgcctggttcctctgttagtgctccccataatttaaagacatcgttgccagaaagaccagcctctgcttctagggtacggccagtagtacctgttgttaaatcgatttctactgtgtcgggtgctaatggtagacagcaatcatgttctccatctaggggacggtcttcacatagtactgtcgctactagtaataagaacttcaataaacatatgagcaaatcaagctgtggtgacaatgatgaagttagtcctgttgttattggcacacaaatggttgaaagagttgtaaacatgaggaaactggcacccccaaagcgagataacgatcattcttcccatagttattcttctgggaagtctcagtctgctgacagcttaggctttggaagatcactttcaaagaaatccttggatatggctctaagacacatggtatgcacatctttgtttttgtccttgttgaaatcctgcttttccattgcagcataatttatagcaggccagccccgagttttgttaggccttaggaaaaatagaatttttgggtccttattaaacgaatatgtgtttttaaaatgaattttttcttttgagcctgcggctgggtgagtcctaggcacagaccttgatttaaagggtaaatcatataagaccctatgcatggttcattgcaaactacaacttatgtaaagtgcttcatttataatttggttgtgaaatttcttactcaggatataaggcgaagcatgcaaggtggtagtctacgaccactcgtgacgactattccagcttcatccatgtacagtatccgatcaggaccaacaaaaagcaggacaataagcaattcagaatctcctcatgctacaagcagcaacgcgagctctgaaccaagtgtgaacaatgcttcttccggttgtttagatgggagcgacgacattgaaggcaacgatgttggaagtgatcaaggaaactcttattcagcaagccgccattggtaggtaacataacaacatatgggactattattattagcctcttacgaggtcttataatgcttattatatcactactgctaagtcaagttaatttagtttatgatttttcagaaagctttgctgtttcattgttattaaaatatataatttaaagcatctttctgttggtagtgagacaagagtgacttgtttgatgatgatgaacttttttatttatggggttcatcgttaaactgctctttagtcaagcttttgacctgtaatgctgttcattatcaagctgaagagctccttcagtttttgattttctgggatctggaatatatgtttagatcaatatttaaagcacatatttaagttaagatgttcaaattcaaattttgcatcatgacaagttgacaaccttctttttcttcttgttctatcattatatttaagaaatgattacataaagcacaatctttttgtaaaaaagttacatttttacgtttaaagaattttttttacattttacgattttccataaaaacaacacggaaactatatacaagtaacatgaacataacatttaaataacatcaaaacaacaacannnnnnnnnnnnnaaataataaaaaattaacaataatttaacaagagtaaaacataaaaaaactgtattttttataaataaaattaaaaaaattataagaatatttaaaatttcgtgaaattgtatttttgtaattttttgttatttttgtgtatttgtgaaataatccctaatggcaaacatgaaagaaaattgtgcagtaattttcaggcccaagatgaatctgatgcgtatgtattgggtcattttaggcccaacatttttagtttcccgataaggggtggttctggcccatgaatttagtagcaacctctcttttcttttatttgaggattttgtttttcaaaataccttatttttagtattttttttttacggtttgtgactctttttttctttaaaaaatacaaagctattgagatttttttgttttttttgtttttttttttgaatacaatgaccacaaagctagttattgctagatgtaaactgctcaatcctactacacatcgtcccaagtgccggctgaaagatgaaaatatttccaataaataataataataaacagagatcaaatcagtttttttatataataaataaagatgaaaataaacta

SEQ ID NO: 16635 - DNA, 6147 bp, Cannabis sativa
  modified_base (34)..(35): a, c, t, g, unknown or other
tatataatgcaattcaatataatacaatacaatnnaatacaatacgacctaatacagcgttccaaacgagccctttaagtaaacatatatgttacatttttgttgtagctgttacaacaaattccattaagtgttaatttcgctaaatgaaatgcaatatgtcaatatacataagcggtctaaattatttttattttaaaaaaattgttaaataatattaaaataaataacaatagaagttaaaatatcaagaaaagaacaatagaaatgtatattttttatttatttatttagtttttataattaaataataattatttagtttttttctttcagttttgataaaaaaattattaaaagtgaacaattaatcaattgatatatgttagtataggtagatttagtaaaatttaatgaaagtggatttaaaagcagcaacaaaaacgtaacacataatatttaattggtaaaaaaaatgtattatataaatatgtgaaattaaaaaattaatgtatttatgttacaatgaagagttttatttgcacctcataaaattattagtacatcttattttaataatttttattttatataaaatatattttttatttatattattttttaaatttttttcttcgtaaaaatatatttataaaataaaaaataaaatatattttaaatattaagacaaaaaaattaaaattaaaataaaaaataaaaaattatacaaaatttaattaaaaaataaataaaataaaaactcatacataattttaaaagaaaaattgcaaataaaatataactaatgatattaaaaaaatattgtgtaaaagagaaattttaaaaaatattaaaagtattttttaaaaattaatttaatttaattatttttttttaatattggggtgaaatatcaaatatcattatcattatcatgatcatgctcggccgttcttatgcaaatatctttactatcatttatcatcaatggaagattaattgaaagtgcagtgtttagtagtgtatgtatggaatgtattgcagcactattctgggattttctcacaatccagccactgttttcttcaacaaatcaataccctacgcttcaaagacatctaccactaaaaatggcagcttcagagcaaaacccaacgatgaaaatgacccattactccaagccgccattaacgcagcttctcttcgcttacaagagacccttcaaccaggcaaatccatttccctatgtattgcttcaaatcgctccatgtttcattcagacaattcctcgaatagttagtcagctaagtttttttcttccgtatctcttttatggctaaaaatgggtttactttttccttgcaaatgcagagcctctttttcatgatccatacgcgggttgctttatttctccccagtttcgttttgatgataagaagcagcgttcttcttctctccattatttactcactactaaattcattgatgataaattggttggctttatgaaccaaactgatggactaaagcaggtgattagccatgactaacagtaaatagacaaagaatgattacttgtttccatatctctttgaagctcaactcaagtgttgtgttcttgagcttgtaggttgttctgttaactgatggaatggacactcggccttatcgacttaggtggccaaccttaactaggatattcgatatatccccagatagaatattcaaagaagctactgaaaagcttcaaggtatgctttctttaacaattttttgttcatatactattccactttgctaatgtgtcgatataagatgaatgagttattcttctcattttcaattggttttgaaatgaacctcatatatcttacaattctaacacatactattgctggcatttgaacattgctgatgttgattacataatcatagttagcaaattatctcccacttgttcttagcatgtctttttgaacttatttcggaaaaatttacaccaaaattctctatttttcttgaatgtagtcttgtcattagtgaactttgacaattaagagtgtttttttttcacttataagctctagaactatgctgtgtagcatgttccgatatagttgtttttcaaaatgcatcagggaatggagctaaacttccaaaaggttgtttgttacgtcatattccattggagtcctcgaacattcagcagactctgtgcgctgatggttttaatggaaaccggtctagtatctgggccatacaggttctttagattttcactttttcaaaatccatatttcattttgtttatcataaggatttcttgatgagatcattttggtttatttactgtagggactgcctgtgatgactttgtccagttttgaggagattttgatcactgtaagtggtttggctacaaagggatgttcgttcttgggcgtattgcctgctcaggttgtagaaaccaatattggagatgaggttacatgtctagattctcaaatgtaactccttttctttgtcagcaacaacaaagacagcatttgagtacttttcttttgtgcagtctagtataagagaaaggatggaaaaactgttcttgagtaatggctttcgggtggagatgattaagcatgaggatgttgctagaagttttggaaagttagtagcgccgggaaactacaagactgtactgtttgttgctgaacagttgcggttttctgatgatcaagtaagagtacctctctttgtcttttcttttgttaaacagttttttgttttgtcaatatttttctttgtttgctgtttgtagtttctaacatgctagcatgttgggcagatggaaacatggagaagtgagttccagagactcgatgaagaaggagatgaagaaggtttcgaggagctctagatgtaacaagtagtttttattagtcaacaacaagactaagaaaacatccaggtgaactaatttgatggctagtttgatttttgtaatgggcgtggccatgatggatgtcttttaggcaaattgtgataatattcaaaggttccaacgaaaactaaggcattgtttggttggaagtaacgaaatggtaaataaataatgttcatttcatttttttgtttggttgcattttaaaagaattagaatgtttgaatgatgtttcaaacatttcggtggaatgactaaaaggaaaaactattgagaaaaaaattaataatttttatatcaattttttttatgcattttaaatttgattttcttattccccatttgtcacttaagatatatgctgtcctcacctagtatctttgtattcagaaaaaaagaaaaagaaaaaagaaacctagtaccatgtgactgtaagtaaaaatcaattaaaaaaaaaatgatatattactactgaaaatagtataatttaaatatattaatagttggaaaaaaaaactttgttatacattgtttttggttgttaaaattgtgactgcaaaatataaacttagttttttttaatacactagacgtttggttaatgttttctagatatgaaaagataaaggcaaacacttcaaaactcttgaccttgaccttggagcccatattttttcgtgttgaatcatgctcatgcctttcgagcttatactggtgttttatcgtgtcaaaaagtctagcccatatttacaacactaacctcatgtattctaaaagattgtaattagaatctaaaatagatgtcaaaatagtttcaaatatcattaaaatatttttagtcagagcatgtatgataaagttttattgatataatgttatatattaacattttaataaaaaagaaagtagtatgttaaatcttgtgccaaattcatcataaaataaaatttagtttaaattttaatacaataaatacttctggaaaattctataatagatccttccttttgtttttttcgacatccaaatagttttaatttcaaattttttataagatagtgtacatgttagttatttaaaacatcttacaagttttgagaaattcagaaaaatttaatgtgtcaaaataataaattttaaatagcatgttgtatgtgtgcctcttttattttgtatatgtgtaaaatagatagactaaaccctattttttatatcgtaagttatttctaatttcttaaaacttttggtgatatcttaattattaatgtaagttataattttttgaggtgcattagtggggtgcaccatagaagcacctaatacttttttttagttataattttcattaattattaatgtaagttataacactcatttttgaactacaatgttgtcatcaattattttttaaagagttatttttaaaatcttataattagaatttttggacctatgttttacccttcattttttcttaaaaagtattctttcaattaaggaagttttgtttttcaacatatttcgcatttcaaggttctctatcatctgttaggatttctcgttcctaaatctttagccaccaatagttgtcttttttctttggtcaggcctgtcatccctcttcgggcttagacattaattagctgaggtttgaccggtgcagcaggtgtagcatgatgcctctctatgtgtcatattacttttctctatgggttgttctatgttgtcgataatttcttccaagttttgggcttcatccagtgtatttgggaggtttgtttgatcgagatctaagtaggattgttggtggtcgcatggtggtctaaggaggaccttgctttcatattgggcaaggactcaatttgggtttcaatccatggtgttgtgatgaggggtcggtggttccaattcgaaactagtgattaggttttgcttagtgtggttaggcttcgatgttactatctcctagtacattggattaggagatgtgaacctaatctacctacatatgagtcttacctttgtgtcatatgtttgagtaatttttgatttattttgtttcgttgttaattcactttctttattcttcagtagctcaacatctagtcgttgttagtagtttggaataataagttttctacagttgaataaaatttgtacttttgtatcttctaagcgagaaaagatagctgtaatactgcattctttttcatttgatgttatttaagttttttttgtcaagcaatctaaaaattagacactcaaatggttgttgtgtttctatcaaaggagacgtccagagattgaattgcaagatattattttagctgattgcaattaataaaattgcatgatttctaaaaaaaaaaaaaaaaaaacaaattgcattcatgaatatggtaggaatattctgtcgtttttctccttaacatttcacacatcaaaaagcaaaacagtaccttgtataaatatataacacaaattgcctacaaaacataatgacgaaaaaacttctaagatacattttcttcaaagcagtggtaaaagaaattttaccagcaatcttccgagtacaagatgccttgaaaactcctctctctctccgaagaaaaaagaaagatggcttgaagactcgcgtgggatccggtcacaaaccaacctacgccaccaaccgaaatatgcatgggaatactaacaacgagaacaaacaaatatagaatgactacctcacctttatcaagttagctacgaaaaatgctccatcaaccttgtaccacccaactttcgtatggacaagtacgaaatcgatttcatagagcacaaacaaatcaagtagtctttcctaacttcttcagtaactctactctatttacatggcacggtgttgcaatatattaaggcatgaaatgatgctactgctgattcaaaaccgaaacaggacgaggtctgacaacattcagtacacctctggcagttgcctggtaagagtagatatgaagatgagctctgttaaaaaagtacacggaagaaaggttttgagtattacagtaatgctcctttttcctcgcattacctcaaagaatgaattgaagttcaaacgcataagaaaacgtcgcagaaatggggctctctgactcccaacaagcctgctactccgcaatattgtgtacaacgagtttgatttcttgttaaattcctgaaatcagagt

SEQ ID NO: 16636 - DNA, 2754 bp, Cannabis sativa
aatgtagatggtaactcgaactcttggagacttgctttattatcctgagtctgaatgcttgacagaattcccttcaccagaatccttgaagaatagaataattatatcaactaaacccccaaaagagtttctagaattgaaggataagggaattgtcttggctaatgaaagagaatcatctggagaagaaacctcaggaaaggacactgtagatggaggccttggagttgaattcgatgccgatgatagggtgagtaggaagtaatggaatgaaacttaataccttgcatttcgtatctgttttattctgtttattatctattttcaaataatgtagagtgaaagtgatcaagatgatgaggacaacaatgcctgtggcgataataaatcatgtcaaccagcaccaccacctgagtataaacgtcttattacaatccatgctggaaagccaaagggtggtctaagggaagctttaagagtagcaagcgacaaagttcgacgccttagtttgaatgaacaagcacttgaaagggctgctgcctcttacccaactgaccttgtaaggtaaattttcaaactcagtgcaataactttttgtcctcttaatattaggtctaaatctttcttttagtgaattggttttgatacaagctgttgtactgtctagtttcactcagagaaatgttttaagagtgtaccccaaagggactcgattcaattcctcaaattacaagcccattattggatggatgcatggagctcaaatggttgcttttaatatgcaggtgagcattcaagattttagtcaatctgagttgtttctatatacataatgaattatatctgtacatgttacataatgaactcgataaaacaaatttcaatcatcatctgatgagggcttaaattttcttaagactttaatcatgcaatagagggttcttgccattgctgttacttttataagcctaattctatgagcatgttgtataacatctcctggtttataccacctgtaagtctactagcacattttaaattagttttcaataataacagggatatggaaaatcactttggctgatgcatgggatgtttagagccaatggaggctgcggttatgtgaaaaaacctgattttctgatgcaaaatggtccaagaaatgaggtgtttgatcctaaaaaaactaggcctgtgaaaatgacattaaaggtgaacctttatctttgtttactttagaagagaaattatttgatagattcgttcgtgcatgtaattaatgaagtttacaattactttatcttaaataaacaggttaaagtatatatgggggatggatggcaccttgactttagtcgaacacactttgatacttactcaccacctgacttttacacaaaggttactttactactaacataacatttactctttcttccaaatgacattaaccacacagtattaaagcgattcttggagtgcacttattttcttgatgggattagtttaatttaatctctcttaaaaagaaagaaggtttatttgtttatttacttttggtcaggtttacatagttggtgtaccagctgattgttcaaaaaagaagacagagataattagtgatgattgggcacctgtttggaacgaggaattcacatttcctttgacagtacctgagttggccttgcttaggatagaggtacgagaatatgacaaatccgagaaagatgattttggtggccaaacatgtctaccggtctctgatattaaacaaggcatcagagcagtcccacttcacaacagaaagggagaaaaatacaaatctgtcaagctcttaatgggatttcaattccaataaaattcattatccccctctttctcccttcttattatatcatccctttcatcactaaaattaataaaattcaagggtgtcattgtaaatactattatttgacaagggtggtggtgaaagatactagaattttataagggactacttgttttatttattttttattattatttgtttatttttagatgtccagatttttgcaacataaaatctcctttcattgtggatcattgtggagcccctaggtggcataagcactatttgtatttgagatacagtggtccagaccttattcatctcaaaaataaaaataaaaataaaacaattggtcattttctaacatctaaatttagaaaacataatagatcactaacgtatattatacttaaaaatagtcctagattgcgatcaatctaggatctagttcaccataatttttatttactgctcaaataatttataatcaatttaaaaaagagtaagagaagtagaatatcaaaattcacttttattttatgtattgaaatacattaaaactcaaaacttatgcatacatattatatataataatatcaatttggacattggtctgaatagccaggaccaccatagaagaaatgagttccttgaccagcagtattgtcatttactactttgatatcgtaacacaaaggcttggtaacataagtggtgaggttatcggcatctttgaaggttttggaatcatctttgtacattacattagtaaaacaacttgatttagtgtagccttcgtcaggaaaatgaccactccccatctgagtttcagagtgatgaccattgggctcgtcgttaacaatttctccaccccaacagaggctgttggcaccattactaagcctcgtgaatatggaatttgg

SEQ ID NO: 16637 - DNA, 7719 bp, Cannabis sativa
aacataatgtgtaggatatatgcagtggtgcctgttgtgtgacagctgtgattgaagaaggggatgaggttatagtttcaaacgtgggagattgcagggctgttctttgtaggggtggagtagctgaagctcttacaaaagatcacacagtggaaaaagaagaagaacgaaatagaatagaagccaaggtacttctcagttctcacaacattaactttatttgattagttgtcaagtttacttgaaaagctaagattagtgacatctttgattcagggaggatatgtggagattcatagaggagcatggagagttcatggggtacttactgtttctagaagcattggagatgctcatctcaaggattgggtgctagctgagcctgaaaccaagattctgaagctcacaccagacatggactttcttattttggcctccgatgggttgtgggaaaaggtgagtggtactagtagtagtggaagttaagaccatgtttgatctctattttgttttcaaatgtgttataaaattttttaacaaaaaacaatttttcgaagtttttaaaacacaagttgcgtttaactaatattttctaaaaacaatttttacttttattttatttattaaaaacacttcaatactttgagatcctgatatgaacaagacctaatcaggatttggacctggatcttagactaggacttgaacccgacctcagacccatatccagacaaaaaaaaaaaaaacgggctcttgacctgaactcagaccttgatgagagagaaaatgagaagagaaaaaatagtatgagaaaataataagagaaagtgacaagaaaaaaaataatgagagagaaagtgaagatagaataaggagagagaaataatgtgaaaaaatagtgggagagaaagtgtgagaaaattatgagtgagaaagagatgagagagaaagaagatagagtgatgagagagaagataatatgagaaaatgatgagagataagataatatgagaaaataatgaatataataatgtgaaataaagtggagaagaaatattaaccaaaagttaattatttttgttttacaaaaaacaatatttcgttgttctcaaaattttgtttttttgtaactttgttttttgaaatctgttttcaaaaaacacaaggtcaagcacgcgtgattattattttttttttttaaaaaatctgtttttaaaaacaaaaaaaaatattttttgttacagaaaattatgagtccctgaaaagtaaccttatgcagaaaagtcctcaacttgaaaaatttgcgataataatttctaaggtcacattttttataagtctattaatcttcttttctaacagatccatttatagattcaaaatgcaatgtgttcacaaattattagtccaaatcatttaaaacaatttaaaataataaaaaaaaaattaacattaatatatatttttttatttcttcttgctccctgaaaccactcccaaaaacccatcacccaccaaccccttggtccatctttttcatcatgacacaagctctgattgtttacatcctttcagttccgtcccaagtggtcgtcgccaagtcaaactctcactgcaccaccggcgtccttgctccgtttaataccccaaacctgtcgtgacccctctccctcctcattagaacccaagctcgtttccacgttacctaaaaactctggttgcgttacctgtttttacttgtttgaaaacccaaaaacttgctctgcctctttgattacgagctactcaagtaacatgctctgaacctagcgcttgaccggactcagacccggcttaaataaaaaaaataaaattaaagtgacttttaccgaacatacttttgttttctgtttttaaacctttaaaataaaagtggttatagagcacatttttattttcaagaacaaaatttttaaaaacaaaaattctattttttttttttgtgattaaaaaattaaaaaacaaaaatattaccaaacaacacctaaattttttatttatataaattatttttaatcaaaattaatatttggagcaataaaccttcaacatgtgacattattgtcagtacttacaaaaaaacgtgacttgatgtctattactgtcaatttttaaatgtgagaacttatcggcatcaaagttaatgttttagagatttacaccgtaattttcctttttagttatgatgatgcaaaaatgcactatgtttctttttgtaatttgaattttatcatggtgtctcactatatcttatatttattgcatttttcctaagaaaaagcatatgacccagaaggttaacgatattaggctactcatttttaggggtgtttgttgtacgaacggtttgagcttttatatatttgagttatttttctttctagctagaactgtattatgtggtgcaattttggtgttttgtctttatttttatgctttacaattcatacaaaatttaaaggtgaaatcaatacaaagtttaaacttcaaaaaaaatataagctctttataacaaccatgaaacaatactgattaacaactctaactaaacataaatattataaccaaacttagaaaagattcattctcagctattgtatagtatttttccatgaaaactaagatatccaatcttcattgcataaatcctaacattccattgattgtttttttcttcctaggttggcaaccaagaagccatagatacagttaaacaatcattatgttcagttgagaaaaaattaggaccctcttccggagattatcttaaagagaatgactatagtgaatatggccttgttaatgtgagcccttcatcaaagttacgtagggtctctcttgttaagcaagcaaagaaggggttgatgataaccaagtctccaagctataagaagacaagtaataacaatggcttgaacttgaagaatcaaagtgaacatgattttattgtcaatgaaagcgaaagccctccatcaaaatcgcgaagaatatctctggctaagcgagtaaacacgaagatggactctcccacaaagcttagtagtaaggagcttgtggctgcatgtaaggagcttgtgaacttggctgtaaacaagggtagtttggatgatattactgtgatgataattgatctaaatcaattcagactcaacaacaacaaccgctcttatgaactggcctaagaaaaggaattggaatagtgtacagaagaagtgttttctgagatatattctttactagtattatttttccctcacttttaatatactgtgtgtttagtagaaatataagctctatgattggtgtgaccacttacatatatctgattctaattatacagtctggactggaccacaaattatgttcattattttgaatatatatgattctgtatctcaacaattatatacacattatagtaggaggatagatcaaacaagaagatgttaacaaaacatttgactactaattttcttaatgtgttgggattgggagactagtcacatgaaaagtgaaacagaaacaaaatgccaccagcaaaacacctttgcatattaacaaccattatttgattaggcagctttttcatgcatgtagcttgggttcaatcatctcaaaatcaccacttttcatttgtaaatttcagtgttagaaatgctgtttaattacatgtttcactttaatatccaaaagccttaagatttttatttttgtggttgctattaagttttgattattgatatattattcactagggaccttttcacccctctctattgttaaccccatgtgggtccttttttctcctagggaggtggagatacacaccatctcacatgaacttcaaataaagaagtttgtttgctttttacaatgcatgataaaaaaaaattggtattgggatacaactttcattgaatagaaactactttgaactaaggaaaaagtgtatgttagttattaaagaaaaaaaaaaaaaaacagaaaagctaatctggttgaaaaagcttacacatcttacttacaggtgtttgcatgaaacacatatataaaaccaccccactttataaatttctcaatactcatttgctaaaacaaaaccactttggcttcatctcttttactacttttgatcttgtaagcctggctaaaactttgcatatccttagaaactaatcgataccctttaggctttatctatcactatgcatgattcaatagtaatcccagcttgtttttcatctggtgagaggccacaggctgatgatccagctgctgtgataaggtcaggccagagtgtcttcatgtcagtgtacagaacaaagatagctggtcagtgtcgtttgattaccatcacttggtgtaagaatttgcttctgagaggcctttcggtttcaatccagggagtacaagaagaagaagatgaacagtaccaatgcaaggttgagctgaagccatggtacttttggagaaaaaatggtgacaaacagtttgttcttgatgggacaattgttaatgtggcttgggacttgaaagctgcaaagttcaatggcgaaaccgagcctcaatcagattactatgtggccattgtttgtgaagaagaagtggttttactagttggtgatatgaagaaagatgcctttagaaaaactggctgtcgtccttctttgattgatcccatcttggtgtctagaaaagagcatttgtttgggaagaggaagttttcaactagagttaagtttcatgagaaggcaaactctcatgaaatcttgattgagtgtaacaacagcatcataccaagttatgataacacaacagggatgattagtacagggtcagatcctgagttggaagtccaagtagatgggaagcaagttcttcatgtcaaacatcttcaatggaagttcagaggtaatgagtcagtttttgttagtaaaactaaggttgaagtttattgggatgttcatgattggctatttagctctggtactagacatggtatgtttatatttagtcccatatcatcatcatcaacatcatcattagtagcatcatcatcatcttcttcttcatcaaattcgagcatcgatcatcatcatgatcaatcaggagagtgtgatgactacgttggtgggtcatctagattttctttgtttgtctatgcttggaaagtggaataatgttggtaagttcatgtaataagattatctttgaccaaaaattttctaacttcaccatggaaatgaagagaagtaagtgaatatatatgatcatgtcaagaaaattaaaaagagaggagcatggaagaaagatgatgaggaaggaaggagatggacctactcagagggacataagagtattatatgctttacaattatataatatggacatgattggactatagccagataggatcacattactacataacaaatgatccttctgtacccatttccataattgctctatcatgtttgtggttgttgtggataatgtcatttgacattacttatctactcttctttctatatgttattatgacccttagtttgactttgggtgtttgtatttcaagtttgaatatgccatttgtatatgtaaagatgtttcttttcttcttctatgtatgcatagctcaagagctagtgataataaactctttattattgctgttattatgtttgttctattctaatgcttagtgctaagcactccaatgaagagtgaaaatgttgtattgctatattttaggacacttaagaaaaatattattttaatggtgttttaaaaagtgtgtcaaatttaatacaaaatatagcattatatcaaatttagtttacaataaaattttaaatgatgatcaataataattaattgattatatttattttacatcttgtatattaagttacttattgaatgcacttaagattgtgatggactcctagtgatatttcaaagcattgggatcttccatattgttttgtttagtattttatatgctatgataagatcaagcttcaagtcatctcttgaaagaagttaatatctttttttttttctctctttttcttttttcaatgtgacttaaatattaacttggccttgctatttgggtagcaaagatgagaatttggaatttgtgcttgaacatgttatagacccttttaagtgctctttgggattgtaaattgtaatccacctttattattccaactgatgagaataaccataaataaaagaatatatgtttcaaaggggcaaatctaagcacattaaattcattcattacttgatagtttttatgtttttatgtctaataatccttagtggattgccatttgtgacattagttggaaagatagaaaaggcattagagaacttgaatggctcatcacaacatgcctgtaacatccttgtaacctaaagttgggtaagaatagaatacttttacattttgggcctagtggtgggccatccttctaaaaaatagtatacatcttttgccaaaataaagcccattaatacttttcatagaagcaatatagtacaatcccacaaaaatgttagttcacttgtcacctttaggaagatagaaaagggtttttgagaaaataaaataacattggagggggcactcattgatggcaagacatttccaatggaattagtgggtcagaatatgaaccatttacaatgtggttgaatatcaacttgttagcagcctcagtgaaatgggtcccatcccaaatgatcttgaccgttggatcggcacatgattttgcagtcacaatctctttacctttgataattttcttgctcccacacttgttgaacctattataattatactttccaccatgaccacaacaagccacaagtgggttctcaaatccttcaaataccataaaatgaaaattaagataaatccataatgaaaacaaatgaagaaaagaaaagttggttatttatgaaatagagctttaccaaattcctttgcttgacttatgagggtgtacttaactgagtagacatccacataggttatggcagccaatgggagatctttcctaagttgggccacagttgattttagtttactattgaaaaattgggccacatcattgaatggagtagcacaaccatatttatcgatttgggctgccgtgacaaagaaccggtccaaaatataaggtagacagcccactgggcctgtgttgtgtatccaaaatgatcttccacctagaccataaacaccctacaaataccataatttatattaaaaagaatcaaaatacgttttaaagattttttgtttttataaatgtgattttgtgaacatatatcaaatatatacaccgtaaatactatattcagagtaaatgctattttcaaatttgtatttttataaaagttaccgatcaattttgtaaaataagaaattaaattatatatttttaaaatagtataaaataatatcatatgactttaatttttaatatatcattttaacacaacaaagtgtaactaacttgatcatagcagttcaagattaaattattattatgttatattttgacaagaaattaaactgaagataatatttttgtactaatttaaaccactcccatttacaatttagattcttagaaggtccaaatggtaatattaataaaacac

SEQ ID NO: 16638 - DNA, 5351 bp, Cannabis sativa
tcaggagtagtaataatggatatgagtaacacccaaaatggtattatgtggttctttagggataaaggttttgatgataagagtataaatgaaatgttcagaaaatgtaagcgtcttgaaggagcagaaagtgagagagcttctgagaattgggcttacttgaaaagtgtaggaattcaagaaagaaagataccttctgttatttcaaagtgtcctaaaatccttacacttggtcttcatgagaagcttattccaactgttgaatgtctcaacacacttggtactaaacccagagaagttgcttcagccattgccaagttccctaatttactctcccatagtgttgaagagaagttatgtccacttttagccttttttcaggctctgggtattcctgaaaaacaacttggaaagatgattttgcaaaatccaaggcttgttagttacagtattgagacaaagctgactgaaattgttgaatttcttgctggtcttggccttgctagagatggggttattgggaaggtacttgttaagaacccttttattatgggttacagtgtagataaaagattgcgtcctactgcagaatttttgagagcaataggtctcactgagtcaggtcttcagtcagtggcaatgaattatcctgaagttttgtgtagagatgtggacaagattttgaggccaaatttcacttatcttcagagttgtggatttggagatggacaaatagcaactttggtaactggctatccacctattctgataaagagtattcagaattctttacagcctagaatcaagtttttggttgaggaaatgggaagacagattgatgaagtcactgattttcccgatttctttcggtatggcttgaagaaaagattggagtcgcggcacaaagctttgaaacagaggaaactggattgcagcttgaatgatatgctggactgtaatcaaaagaagtttcaaatgaagtttggtttggtttaaaagaaggtactagataacattatcaaatttcatttttgctgtagtgtagtgtcgcttggagttgaacttgtagattgaatttatgctcatcggtttgtacttgtagttatgccaatcttgtttatgattctgggtttagagagacaaagctgatttaagcagctgtttaggcataagcccccttgatttaaatttatgtgaagttatcaatatgttgtctaagttctttttacctttccatttttacttccttttaatgtgtagtatataatcatagaagatgcagatattgtcatagcttacttcagtttatgagattatagtgcagattgtagcttgaattgtgtgagaaagcatcaagataaagtattgttctgttcaaaagaaagggggaaaaaatggaaacttttctttataattacatgtcatttttgcctatgttgaaactttcaaaaaccaagcaatagtagtacatttagtatggtgccataaaatacaggattgcaaggagcacaagtagagttaaggttagaatctcccattgaaaattctcaaggactccaaaccatgtgatattgtcaagaaaccagaccaatctcaggaactgaaagacagactattatctgaggatgagaagtgctgagctgagctgaaccctttccaattaacattatatcctactagaagatgtggtgttggaaaatgcactatcaagggagttataggtaaaaactcctaaagatggccatgtaaagacaggcttgaaaggcgggacatgaggtggtggtagagtctcagcgataatctgacatatggtttgagtttgtggcctctcaccatcgaccacgttcgagcaagccaacccaagaagaagaagtctcttggcttcctctacctcgtagtcatcgttaagcctctcgtccacagcttcttgaatacgtccttcacgatgcagcatccaaacccaatcaaccaatgtaagcaaattatccccgagctgaattttcactccggggcttttaccacacacaacttcaagcacaactgcaccaaagccgaacacatcagattctggagtggcttttccagtgtggaagcattctggagccacataacccatggttccaggaacaccagctactccaagctcacaatacgagttcctctcatcttctatggctctggctagcccgaaatctcccaaacgagcattgaagccggagtctagcaagatattactagctttgaggtcgcggtgaaccaccttttggtcaaaatcattgtggaggtaatgcaatgccgaggctacaccggcgagtatcttgtatcggtgtctccaattaagggtatttgaagattcatataggtgtttttctaagcttccatttggcatgtagtcatacaccaaaagaagcttccctttttcgtagcaccaacctaaacaagtaacaacttttcaaaaagagaattttggcaataacaacgtatttacatcaaagactttgaatgaaaatttgtttatttacttcattattcaaaagcaagtggagtctagaaataaagaaatagctagttggatcaatagagagacaaaaatatcattgtatacaaccaaattatcttaagttcaatgtatttatctaaaagtttggttaatgtcattttacagttgactagtaattgttttatgttattttcctctcactttccaaaaggatgggatatatcttttatttgtttttatatattttataattatttaagatgtctttacaatacagaaagtagtgttcaaacaatcacgtataacatattgtttgaactctatttttggcctattaaatttttccgaattttttaaaattttacaaaaaatcttaaataactataaggtacatacactatatcgagataagttgaggaatacttttttttatccattaattaaaaatacccttatatcatatttcactaaaatgtacctacttttgtaagtaggttacccaatataccctcaccatctatttaagtctagcacctaatttttattaacttaaaggtataatgaagacatcatctataaaaataggtatatatcaaacaatataagttaagcgggtatacaatatctattttaaggaattggtagaattttccctaattaacatcaatcaacattgccaacttcatcattatcattatccaaatgtaaaaagttaaaaggaaaaagagttaaagaaaagttaccaactaaacgaacaagatgcttatgacgaagtcgatgaataatggtgagttcagcccagaaatcatctttccctttgatgttatctcttaagaatttcttaacagctacttcagtaatggtagctgaacccccaatactttcaatcttttcacgaagaacacctctataaacaactccaaatccaccttgaccaagaaccatactctcatcaaaatcatcagtggcttttttcagatccttatatctaaactctctagacataccaggcaatcttttcaaagcaccaagcacattagactcctcatcttgctctttcctcttctttctcaaatacccaattcccaatttcaatccaaacaatgccaaaacagccattcccacaactccaatcccaatcccaatcacaacccattttctatcttttttcactgataaatcctcaatctgcatttcccattccaaaacacaattgtactgaatcccagggtttccagtagaagctgaaaaaccaaagtaagagtcttttttaacatagtctttcaagttaataatctcactaagaaaagggttcttaggccttaaactgcttcgattcgccacataaacttccataacttttgatttaccattatactggatccaaactctgtagtccgtactgttctctggggataataaaaatccaaacttttttaaagacacagtcttttttgatctaactgagttgatatttaacccaatgtgattatcatctgggtcgaactcttcttgcttttctgtatcgaattcgatggcaaccatgtaattctgtctcagaccatctgtactcgagttggtcagacccaaccaccttccatggctttgtaatgggacttcaaaatctggagctataacaaaggctaaaccttcacctggattccaaattttgtttctgtaaatgttcataacaaaagtggtgttgaaagaagcaatatttttatcagtatcagataaccaaagcttctgggttttgtggaacatgattcgaccagacttgttgtagtaacccaagtactgattctcattatctggtgtgagttgaagggctccaccatcaatggaggaaaagtttgagaatgtgaagaagggtctttccctttcttctttaaactcagtaaagctgaagtttttagttttagcagaagaagctatggtggttgtggagactgagtattggaacagagcaatacagagaagtaaaaaaaaccccatttttgtttttgtttctgagtttggtttgtttattaatggtgtgaaggagagaaagaaaggaaggaaggtggaaaccaatcgaaaatggagaagctaagacagagaaacaacaatggatcagagcttttctttcttaatgtaaataaatataaacattgtcagctttggatgagtaaaaggaaagcatacatataataaaggaaatattatttaataatataattataataagttggctataatttcataaattttttttggacttttaagcacaaattgcaaaatttcccccttaaattactgcacttgttgtcttcttttatttttgcaaaaatttctcttatttgtagtattaatatccaaattttatttttgagttaatggtgacctgataattcttgattagtaagttttatttttatttaaaatttaattaaaatatatcattaagaaaatgacttgtgataatataatttaactttttaacgatcaggtacgaagttacaaaaatataacttaagtattattattgtcaaaaattaaatttaaatatttaataataatcgagagttaaacttaaatatttacgttaaaaattaatcttatatatttgtttttttttttttttttgaaaagtcttatatatttgttatagttgttatattgtgaattttatttttcacaaaaatacatagtgttgtttttgaaaaaaaaaaaaaaattctattttaatgttgttgatacataaaataacatgatttattttttctaataatataaagtattatttttctgttattttagaatactattattttgacattatagctataaaaaaacaatactatataaaaat

SEQ ID NO: 16639 - DNA, 3306 bp, Cannabis sativa
aaaaaaaaaaaaaattatttcaagccaacaatgtcttgtgattcggtgtggtttgagtagatatcataatttatttgttttacaaagttggacatccttgttgtaaggtgtatcttgtttgtaataattcaatacaattatgtgcatgctttgattttacagagttcgatttggagaaagaaagatatgtgttggatgagcaaggtgttaaaatcgctgacaatcaggaaaatagccaaaaaaacaggcggaagcttgcagaaagctataaaggtatatggttgatctatactcgaacatcctgagtgacatctctgaattttctaagtgattgaaggaataaaagacaatagaatttactttagaattttctaacttcctttttcattgaggtaatggtgataactcagttgtttctggtggacgcactttgttaagcactttttatcatatgttactttcgtcataaatatatttatattattaccattatgattctgtgcagagtttaaaaaagcttcagccgatgaaaagtctagtttgtttaattctttactcaagggttttcaagacgaagttgacaatctcacgaaacgagcgaagtttgcggagaatgcatttcttaacatctatcaaaaaatttatgaggctccagatccatatccatctcttgcttcaatttcggtaatcagcaaaggtttatttatttatgatggcatcatcttaactcctatcatagctttctgcaacttgactgttttgtgagcatgaaagtttggtaagacgagcactggaggaatcaagcatagatatggtggaatcggtgtataattagagatcaacttgcagtcttatttgagctaccagaaaatttctatagttgttttgtacaaatggatgaaatgtgaacttgtgatcgtctacttgtcattttatgttggtgctgtgtcgtttcagaaatgcttctgtgtgcaggccgtgctttgtatgttagtactttatgcaatgtcacatttgcctcaaatcatgtgcaggagcaagatatgaagttgtctgacctagaattggagaacaggaaaatgaaagttgagcttgaagaattcaggaccgaagcaactcatttgaagaatcagcaggcaacaatacgaagacttgaggagcgtaaccgccagttagaacaacaggtgagctatttggagtagtgctgcaaatatatgattttatgccattttccaatctgtatttttgatattctcgtgtaacaagaattgctatgtgagttctactcatgattttgttgaagaattgctatttttgcctcaaatactgtgcaggaagcaaaataatagatttctttattatttaaattggaaaactttcattggaaagtttagaaacaacactaataaacaaattatgatgacacaaagacaatttatagagcctttcattttaatacagaaatgtgggtacattttctcagatggaagaaaaagtgaaagagattgtggagattaagcagagaagcttggcagaggagaatcaaaaaacacttgaggtcctgaaagataggtaattaacgatatgtttttgagtatccaacaaaattgaagtaaactggattgttttattcatattaaatactaaaatttcgtcgtttaatgattgagggttgccatgtctttacgtagatttctcatacctttgatgtctgtattaatttctaaattctagcttttgtgtaccatgatttatcaacctttattcagagagcagctgttgcaagatcaattacgacaagctaaagagagtgtttccaatatgcagaagttgcacgaacttgcacaaagccaaatgtttgagcttcgtgctcaatcaggttatatgctagtcatcttttgtctttaatgattttgtgaaatatttgtggttcaaagttaaaacttttgcctcatctataaacatttgagcttcgtgcacaaagccaaatatttgagcttcgtgctcaatcagattatatgctagtcatcttttgtctttaatgattttgtgaagtatttgtggttcaaagttcaaacttttgccttatctaactgcataataaagagaaaaaagaaagaatctgctttcatctcacattttcatctataaattcagatgaagatagggcagcaaagcagtcagaggtcaatcttctgatggatgaagttgaacgggctcaaactcggcttcttagtcttgagagggaaaaggtgtgttttgcaacttaattggttaagataatttacttggaaattaattttgtattatactctataatgcaagactagtatactattttatttatttacaattctaattagccacactagcatgatgcgtttaattgatgaaacttagtttttgcttctaaattagttttctgttttctgttttctttgtctctttttctgtttttattttttttttaactaaaagcattggtgaaaacttctttcacataactattttatcctgatcagtttggcatttatgttgattttgcttctcattttgactttgtgaattatgtcttttgatatttgatgccccattatgaattcaaattgcagggaattctacgcacccagttgcagtcagccaatgaagacactgataaaaagaggtgggcttactattattcatttatcaagtactgtgtctgaaatcataatcttagtctctgacatttgtatcataagtattgtgtttgagttatggtttttgacttatgttcggttcttatgcttttagtgatgatatagattcaaataccatccttgagaattcattgatagcaaaagagaagatcatttctgagctcaacatggaacttcacaatattgaaactaccttgtcaaatgagcgagaagaacacattaatgatatcaaaaaattgaattccctgcttcatgaaaaggtatacttctttgctttcacttagcaaatgaaatcaaaataactcttcagtacttgcatcatgatattcatggtacctgggttcacttccttaggtctaggatactttacatttgagttacgtggtttgggtacaatcctctgtgatgttagcatgatttcataaatggttcagctcctacatagaattatattatgaaacatgttgtgtaaaaggatcagctgcctggttctcaagctctccacttaactagtttattatgtgttgcttgcttttactatgataagctggctgataagttagttttactaagaaaaattgtttattatttttttttctaaattata

SEQ ID NO: 16640 - DNA, 6094 bp, Cannabis sativa
aaaaaaaaaaaaagagaaaaagtattgctgcacacccatttatggcgtatattcagttaatttaaattcattatttggactattaggtaaatgtgaatccatttatgctgtacttttagtacttgcttttgatttttctgttacttgtcagaaggcatttgcagattttatactgttcttttgcataaattatagtatcgtactatcatgcaatatcagaaacacatgcacaccattcaatcacttgtgggtttgtctccttgaacttgattatcatttgtcacctgctgttatattgagtagtctttttgtcgaagctgctgaatgaatttatgtatttttttgttttgctttaactttcagattcaatttattcttgttagaaaatgttttattttgatgcaaaataatattgttaaaatgttgattaggatagctgctgttattaaacgacataaattttttctctagtttatattctaattatgttcttattttgataatatgaattatgacaaaattatgttgctagcttgtagcttcaaatttatcaattagttgctagcaagctaaggctatttatttttttcatttctaagcatccgagttgatgtttttttatttcatcttattgctggtgtttaaagggatgcttatttattacatccgagttggtatttatttatttatttctgcattgtcttctttattttctacagaatcttgatttcttagtttgattatggggttttggagaagaacgttgttttaggtttatatcaaaacatgtttctttgttggaatttattaaagtgtactgtaaaatctcccagtgaagtttttatctatttatttttatttttcctgaaaatgatgaagtttttatctattagtcagtcatggtcgctcctattttagctgcagttagttttgttttttggggaacctaggcagtaatatgggaggacctactatcaagctttttaaaaaatgtgaaaaagaaacttatattacttgtcgaaaaaggaaattacaattgagtacaatttatctttggctgaagcataagtacaaactaaagcaaagaggaggaacaaatagaaacacaacacaaagagaatatttacagaatagggaaaatacctaattttttttcaccattgaagcccaaatagaatctagcagattaatttttcctgcaccaaagacatgtccaacggttctcttaaaatacagatacagctagttcttttcaagaagatgactatacagttgctattagcacatagttccagatggcagatttgccaagaccagtagtattcttagttgctagtttactgggtgagtttgctagatttgtggcataagaataggggaaaaaaaccactaatctgtctaatcttcaatttttgaaacaaaattccagcttgttaatgtaaaataatctttatatcttcttgtagttgggctttcacaagtttgctttgattttaactgactgacttgttaaaagttattataagtcttgcaataagttatattaacatgtatcttttatgtagagcattctgcaaccctgctgatgttgaggcatttactgaggagaagaaacaaactcttttggtcaaacgtcatggaaagggtgctgattttgttcgtgcagtgcaggagatcgttgatagttatgataagttgaagaaacaagaccaatctgatgatgtcaactctgaaggagttactcatatgaatggtgggaactcgattgactcatcagcaaatcctgggttgaaagatcagcatgaagctcctgaagcgactcttgattctaggtttaattcttcttgtatagctgatggaagtgatccgagccttctagttgaggattcgtctgctactgcacctgtaggtgctgtgtgtgaaaaagaagatcctactgatactgcaagagttacagaaacacctttgcgtaccataagttcttcgaggaaaagatctagagatttgtctttgcaaagtggtgtttcacagacagagcctacagttagaaggtcaagaacttcatcaaggctagagtctcgcaaattgcggggctctaatgtgcaatgtaatgataatagcaaaattgctgcgaatatatcagcttctgttgttcgggaagggttgctaagaagaaattcacaaaggagaaaatcaactgatgcctctgaatgtgatgatgttgatttatctacttttgtttcaagtggtagcattgaagataatggttcggaaattgtcacagtggagtctgatacctttagtttcaatgaaggcagtactattgattctggatgtaaaattgagcagtcagagacacttgttgggtgcttggagggtgatgttgagttgatcaaagggtttgatctccaaataaaggctgttgtagtaaaaaagaaaagaaaaccaagcagaaagcgggtgtgtagtgatgcattagaacctacttttacagtggataaggaggctggtgtacaaagtactagtgaaagctcccacaatgtttgtgagaagatgaatggaatctgtcccaaggaagatggagatgagcacttgccactggtaaaacgagcaagggttcggatgggtgaaccatcttccttgagagagcctaatagcctttcaacctcggaggagaacacccagaaagaagctgttaaccaaatattaggagcagttggaaaatctttgaattgtgatgatcctattgagagggactcgccaatgacaaattcagcatctgttgcatcaccttcacataatttttctcagttccatggaagtaagcctcatacatggaaagctaacaaagaccaatcatttggctgctcggctgatggtgaatcggctttgccgccatctaaacggctacaccgtgctctggaagccatgtctgctaatgctgccgaggaagttcaatcatgtaaggatgctttaatggtcatgaatactcttcctaatggaaatattatttctttgacgattggatctcccgataagactattgaaagcaaaacagtaagtgacttggtactcccaaatgtggattccattggttgtaatgctgaagaggttggtgtttctgatatagacgctacctttaaccctagctcaggtgaaaatactgaattatctctggaaatggagttaaataatgtaagagttgagagtcatgatattcaaaatagtaattctggcgaagaagtttatctgaattctgggaaccatgctgatggaaatgatatttgtgatggatctaaaggtggtgagattgctgtgactccagttcaatctcaaagtccaaggcttttgctgtctattcctgacagcaaggaatctgatgtcagatctgctcgaggatctgaagatcagctgttgcttcctgagaacaaaggcaatactaaaagtattgaatcaattaataatgaattggagaagtcacaaaatgaatatgaaatttgcaaacctactgtgatgagtatggatcctgtatcaggtacccatgatggtattactgagaatggcaataccaaaagtattgagtccattaattgtaaatcagacaagtcacaaaatgaatatgaaatttgcgaacctactgtgatgaatgtggatcctgtatcacgtactcatgatggtattgttgaaatttcacctcagagttgtgttggtgtacttaaattaaatgcagagagcatcagtgatgaggataccagatcgttggagcctccacctgatgacaacagagaagagaatgacatgtgagcctttttttttttttttttgaatatataattcctgcttcacaagccttcactgttctgtgataattctagcgtttatacattggaggttcagtatatattttatacgcttattttcttttccccaagtatttagtttctatcattttcctttctgtaagtagtagttttttttttttttttcattatcattttttgtttccagaattattaggtttcttattatcctttggaatgtatttatcttttactcctctttctttctccatctcgctttatgtgttatattttatttatcgcagatgcttaatttaaaaatctagtttgtactattttgtgaattcttatcgtttctcttttcctgttctatttcatataattgattaatgaaactcgttcctgttttattataaattaggtctgaggtagtaatggatgctgttaatccaaaagacttgagttctatgtcttttccaaacaatgatttagatgatggcttagtcaaccaattaaatccatccccaacagatggggttgattctatttcccaggcatctccacccaatgcttcacttggccatgtatctacatctgatcatagttgttttcttcaaaataatagctctcttccccaggcatcttcacccaatgcttcgcttggccatgtatccacatcagatcatagttgttttcttcaaaataatagcagctgtagtccagatgtacatttacgccataagataacttcgcatcctccaattgttgatggagaagaaaagtacgactcaatggtgactcagagaccaaaatctgttggcaagtatgctgagtcaaatgctgctctgtcatcctttgagggaatgcttggaacgctgacacgaacaaaggagagcattggtcgagcgacacgtgtcgctatggactgtgctaaacttggtgtctcttccaaggtacagacatgttctagtctttttttcattatgtttaattcaaaatataatcaacaacaatgatcttatcgacaatacattgagggctgatgcttataaatattaaatagtaggggtttctctctcgtaataaacacgtttaccataaaatttaatgtgtctaaattttatgaatcaggttgttgacatacttttacgttgtttggaaactgagtcaagcttacaccgtcgggtcgacttgttcttccttgtggattctattgcacagtgctctcgatgcatgaaaggtattatttgctttcttgaatgttggattttgactttatttacacaatataaaacttatttgtattgtgcatggtatgtttgaataggggatgttggtggcttgtacccttctgcatttcaagcaatgcttccacgtttattagtagctgctgcccctcctggaaactctgcacatgaaaatcgtaggcagtgtcttaaggcaagagaagggtgttttttatttcttttttctctgacaactgatttaagatatcttatcctcatttgcttcatcctttggttttgatcacatgtggtgtacttcaaagttatatggttttgattctggtctgtttctgtctttgttataggttctgcggctttggttggaaagaaaaattcttcctgattcagtaattcgtcgtcatatgcgagaactggattaccatggtcctggttctacgtctggtccattctctaggcgctcaatgagaacagagaggtctttggatgatcctcttagagaaatggaggggatgcttgttgatgaatatggaaggtttgtattactttgatgttagtgtttctgcgttgtttgtatgattgtagattttgatacaggtctacagaaattcattttttcattctctttgttgcattgctgcagcaattcaagttttcagcttccaggattttgtatgcctagcatgctgaaagatgaaggtgaaggaagtgattctgatgggggaagttttgaggctgtcacgcccgagcgtagtcctgaagcatgtagtgaccatgagacgacatctgccttggagaagcatcggcatattttggaagatgttgacggggagcttgaaatggaggatgtggctccttgtgaaacagaattgaattcatcttcttgtgctactggagtagttgccacacagaattcacaagaccagtttgaacagcatttttcactgacatttgctcctccactacctcaggacgtgccaccttcatctcctccacttccatcatcacctcctcctcctcctcctcctcctccgcccccacccccacccc

SEQ ID NO: 16641 - DNA, 5459 bp, Cannabis sativa
cccaaataaattgagagccttcacacatggaggaggaagaccgtggttacaaaaaaaagacatcactataaccccacaagtgacactgagaactactcattattactcgtaaccataacccaatatctagtcaaacttcttaccaaaaaggccatattcaatcagaaagggattgaaagaaggaaagtaacgtgtaaacaactaaacactattctttctgattactttaatgtttaaagggaaacgagaatttaaaataataataaaaacttattaaataaaaatatttttaaaaataataatagtaaattatgtaacaataaattattaactttttttaaaaaaaatttaaataaaaatatcagcgtggtagataatactattcacacatagaacgcaagcactgactattttcgtactttcctctcttttcccagctatataaactattttaatggaggtagtagagataatgcagcactcatacacatttgtaccaacatattttaagtaaatccaagactgcccgcacctaaacttgactgctgaatgtggggtaaaacttaaatctgactgctaaatgtttaactaaccaaagagaacaaaagacagaagataaagatgttaactaacctgaaaatttgaagagtcgagaaacttcatgcttccagtatcatagagaaaacatttatgtaacgatgacaaaattgttgctctaaggtgccagtttccaattgatatactggtatcttctgtacttttcgcttctagaattctggccttcttcttccgtgttaaaccagaagtctttgcatccccagatactgtgagaagacggacacagccctcaagcaagtatttgaagtatggaataaacagagacctgcaatatttatgacaactgatttactaaaggaaacgaacaatataaatgtcggtaggttaacaataaaacctagaacttaaagcaataaatagtatcatgtagcaacagaatttcactactactctttccttcaagagccttgtatggttgggaaaaaacattttctcaggagtgttacaagaatgtatgcagcagagatatgcacaagatatatacttgctttagaacttatatttttatattcatgtgcaattaattattttacattaattcttaatatcaagggttgcattgcatcaacaaaaagacattcagatttcatgcggttcatgaagtcaaaactggctaccctagttttcattatgtagtaaacaaaatcaacaaataaaagtgcaataaaggataactgactcacctatggttctcagcaagcttatttaccataccatagaatgatactgctctatccacattagtgttccccacaacaccatcttcaacatcagactctgcccattcaatactccttatgaaaaggggcttaaacatagtctccgtcagtttcattgtcagagaaattattgtattggtaacacttttttctacagaatcaatatcctggagggaagctggcctttgacggcgtagatccagagcaagcaagcaaaggtcaaaaatctttgcatggtaaccactaacagatggtctatccattgaaccgatcaagtttgccaacattccaaaataggctgtcaaacttgaatccccagatgaaacagcattttcataaattttcagcaaaggtggcaaagcaagtcgaacctggaaaaattgatacaagtccaagtaaccaaatgagaaaaaagaaaaaaaaaaaaaagtacaagtcaaggtgtactagtttaacagggcttacaggaattttttccgctattagtctccgtactgtgtcagcctgaaatttgactttttgataagatcctgttgcaaagtcgtgattcagcactataactgttatgatatctccaaggtacggatttagaaaagccccaagctttccaacaacagcctccagaaccagaagaatggacaaaataatattctctttagaagttgatgatgcagtaggtgtgtcatcattactttttatgcacttaacatctgaacgtaaagagatctcgcgagatatcttaattacattctccactatgcatggaagctcaactaacgcccttggcccaagaacattgacaaaagcaccagttgtccgaaggcagccagaagaaacagcaaaattttctggagtaatatttttggtaacagatggcaaacaatcaccaaagatggaataatcaaaaggaaacctattggcaagaacttctaaagctgaaacagctgtcagcttcagagaatctgaaacatcgacagaatcaactatcttcactatttctagacacagtctgcggaaagattcaagagcggtctcttccatatgtttccattgagcatacaaatttctctccttatgccttgattttgttgtatcgctttctctcaacatttcacacaaaaatccaagagcctgcattaaaaattcaggtttattaagttaaacatgccttcaattacatatgacttaaacaaggagcctgacaaacatacaaaaacgaggtaacaaatactccaccaatatgaacaagtaacagttattaagtacctttttccccacatttttatctccgtggtgaagcaatctaatgatgccgttaaaatatgctgatggaatcatgagtgtggtaacagtcctcaagacagctcgaatgcaatcctttagttctttccttataacaggagggacagtcatttgcttcttctttgtgtcaacaagttgagataataagcctatctgctccatgagatcttcaagcaacacctgtgaagttatatcaagcaaacatttacactcacactcagaaaaataacagcacaaacacttgttttgaaattctcaacctgaacattttctgattccaacgttaatgcaaactcaggatcatgcaacttgtgctgagtgaattggattacaaaaagcaattccacgaacatctcctggcgcagactaccagtacctacttgttgaagtagcataacaacggagggaagccaaatcaagcatgaatattgctcacatatttgcagtgcaaatacatactcccattctttctttgttgtagaaatggagcaatctgaagcactcatattatcagagaagagtgacccatttcttgaaactaatgaccggaatagaaggacaagcaatgaagtcaagctattagactcccccaatatcctgcacacaagcatatcgaaatcaactacaagtctagtaataatatagaaattaaaaacacacctctaacggttacacatgagtgaacagtgtacctcaatagatatactacggttgacagtcttctatgctcagccatttcaggcaatacacccataaaaatctagagaacaagaaaagaaaaaggaaaaacagatcagtgctttacttgactagcaagtactcccaggtgatattctcatgacaatatcaaataatgactagattacctgcaaaagtttgtccatgttttttgttctttccaaccaacacggaacaattgttgatataagatcctcaaacacatgctgtgaatagttgtctatctacaaaagatgataatcacaataataagcatacaactaacatcaaagaaagaggatgttaaggatattttcattttcaaaaaaataaataaataaatctttcatgcaacatcatattcaaatttcaaaatatagatagaaatttaaagaatcccaaagtttcacagctctaatttatataactcacaaataaagcactacaaacagaaccaataaggcaattacatatttgttattacagtgactcataacagcttagtcaaggcaaatgaatatatcatcaaacctgtgtgactgccgattctccaataacagtaaaaatgtcttctatgtgctctaaaactttctctggtgtgatctttgtaagagtggttatcagtgaaaatacatggttccgagttaccccgtccttcgcagtgcaggcacactcaactagaactttgatgtttatctcatttcttacattttcctgcaatgaaaggacagaaaaattaaacaaaacaacatcctaaaaaacaaatgtgcagtacattcataactccacaagatgagaaactacctttagtggcagactgttgataagcgaagtactaatatcttccaggattattagtaatgtctgttgtatgtaacgcactgtggctgcagtggttttgtaaccatccgaagaaggttgaaccatgtttttatcaaggacaacaaaatggagaacccattcatctggaaaagtcttgccaatcaggttgaataaaggccccagcagcaaatctctacatgatccaaattgaagctaattaagataagaaagcacttatagaaactcccacaacacaggactgatgagaagtttatgtgctcatgaagtataagattataataaaaatagcatcatcaaacctgttaactatgtctttcttcagtagcaaaacatcaagaaaggagctgagaaaagaaagtgcattttctcctttataaatttcatcaacaggcagagtggacttctgatctccaactagtttccttttcttcttcccatatgctgaactaatcacacgacctttattctttaaaacatgatcaagcatctgaacaatagtggaccaagtaatctgatacaaccaaaggtgttcaatcagtctccaatgcttcagttgaactgagagcaataaatatgaaattcaccattatgtatactgtaatttaataattatgatgtccagctagttacatacattacattccttgaagcattttatgaaaattagatagcaattaaaggaatttctagacaacttttaagtatctagtggctcttgaagttcaattaagaaatgattagcggcgtagcaaattaaagtatattcctgcaaacagaatagtatgtagaacttgtcaggttaagatttgtttggacaatcagttgcttaaaatggcattactaatctagaagtttttttgttggtctctgcagttgtatgattgtatcttgtctatatggtgtctagcactctttatcgtacttgatcggcctagtttatgtaattttactgtaagttcaaatcccataagcctccatgtcaaaatgggaagagaaagaggaataagacaataagttagtatattttagtatacacatggcatacaaccatgttctactttaagatcaactgtaccaatataaaaaaataaaagatagaagaaaagagagtacattcaagcgcaacaaggcttctctggcagcattttgtatatcgccactagaattccgaaacaaaatgacaagttcacgaaacagaagctcctgcatacacaaaaattaaaactccttttaacccatcagtaaaaatcttttctgtca

SEQ ID NO: 16642 - DNA, 7361 bp, Cannabis sativa
aaaaaaaaaacaaatggagaacaaaaaatgaacaatagaaattgtcatattcaaagaattaaaataaaccaaatataaacagagattctttgtccactttatgaaaaattactcgactcctgtccaaaaatttcttgctattcaacattttctggtctttcgtaggtagacaagcagcaaaagaacaagctagttacacagacaagtaaagaaggtaagatatgaggattctttttttccttcaaagggcactaattattaacttcttgacacagattataatttttctttaatcactagtgcaatacaactggtaatggtaataaataatcaagtagctgacaaaatcttgccattaaatacacgcataaatctaatgcaagggcagaccaaacaccgtacctcttggtcaccatatcaatattagagaatctctcaagcatttctttgtcaacataatgctgggttgaaggactactagcatttagtggcatactcatattactaacactggcaggggaagcaaccccgctcattgcaggggtcttgggaagggaatttgatctccgtttagcagcaagttgggcttggtgttgcctttgcagggaatcatttgcactggaagttaaagattgtgttccgccaactgcatgcatcgtggatattgctgacttctccttctgggatgcagtagtagttgttggagctgttgcaaactggggtccagaaccactagaaagctcacctgattttgacgataatggagattgcgccaaagttcctgcagataaccgggggctttgagctgattttcttttctggaactgttcctcctttctgccatctttctcagtgtgctgaccaagattattccatgatgtttgaggaaaatttgatctcatgaaactattctgcagtaatcttgcttggttccttgattgctgtggatcaagatggctcatttcgttttccaccatctgtgtatcatttctacctccattgagctctgatccatccagcttagctgtctcaaactgctcttccttagcagtgaatctcatgccctgctgtcctgcagaaaatggtgccgtcacatcctgatttaaaaccccttcaaacacctgctgggaaaacttctgattgccagtatttgcatactgcattcctctgcctgtagcttgctgctgcaacaatgcattcttccagttgtccatgtgtggcccagcttgctgttgttgttgttgcaatccctcaagacctaccggcataggccttcctcttttattaatattggctaagggagacaactgtccatcctgattctccctctttctgtgaagagaggtgctagagttcacattatcaccatatgtaatcattacatcctgcccaacaggagatgccccagatgaatttacaacaaatcctgatccatgatcctgggtacttctttgggtaccaacccccatttgatagcccatttgattagataccaaatgtggcgttgttacagaagcatcagacacaaagttattgcctctaatggccaacatgttgctactcagattttcatgaacattctcggtaactaaactgcctgaatctcccagtctgcagttagaactctctggaactctatcaatgcatattttctttccatgtgttttgctgttagatgtgacagtaacttctggcatctgtcttaatctctttcttcgcaaactacagatagccaaattcagctgcaataaatccagcaaaactaaaatttaaatgcccgtgagttttcttggtagaaaactaaaaatcagccttaaaattaattacctttgttggaactggattcttacaaagcctatccaactttggagtggggtctaaatgaagttgaggttgcagtgcttttaatatacgagactccacctcctgcaattaaaagcatcactatgcgaataattgataggctttatacgtaaatagcttgataagagaaaatgcatgcataccatcagatcaccataagtccaagaattatctgaaatcaatggaatgtccttcacaacattctctaatgacattttaaggcatactttactcacgacagggcatccatcagttagcacagaaccagatcctgctggttccggagcacatttacggtaatctcgtacctgcaaaagtattaccattttttaacagcattaactaaaatatgaattaaaagtgaaatactgtcacaatcttttaacttcactttctacaatactagaagattcatagacctgagacccgtcattattgtttccaatgtatgagcataaatagtgatgaaacaagagaagcacaaaatattggagtgagtgatgcagtataagtatgctaaaaaggtatggttcgtatggaataaattacacacacttatatgacaaatagtttcgaccaactgtattctttgaagatgcgtgtcacttgttaaaggtgacttgtcatataagtgttatgtcaagtttctgtgtaatttatgtgtgcacatattattaatcattttatcatttaaaaatgattattgtttataataaaatggttaatgaataataaaaagttaaccatctttttaattttgacaaaattgagataaatggcagagcaaactcacctcacaaacgagtgttccatcaacatacttgcaaggtatatcgtccagaatatctcccggcaaccgaccagattcaattgcctccaaaaaaaaaatcacaaagcaatgggaaagaaattattttttaatagaaaggcttataacagactttttttttggaataataaaacggggcaaaaagaggcaatatgtattttatttgaataaaaaaatttaaagaatccaatattgcagtcctcgaaaaataaacttcagtgctacagagatgctccaaatgatacagtgactaccttaaaattatatttctgtgttacatcaactgtcaatttattttggtttcttccaagtgtgcagacatggcaataattcagaacggatgtggttgaaaagaaatacaatgatttatgaagaattcaacttgtatactacctgtttcagaaatggtgaattatctaaccactttggggaatatactcctagataattcaatgaccaccttatatttggtattttgggatggaaaagcattatacaactttctaactatgttgtattttctttctattgaggatccttcttatttctttgtatccaaatataaaattatccttcactctattatttcaggatggagtggctattgagcagtcaaccaataatacttttcacatagtgtcctttttcagaaagaataaaatttatgaccctttgggagttgatcactactaaagaattcaataactgcgttctctttggcccttttagctggaaagcattctgcaattttataatctgtgttgtattttatgtttattaaagatcaactattcttttctttcttgtaattctcaaaatataaagttatatccttcactctcttattaaaagaacaaaagaaaatggagatgaaacttctcataggaacaaataactgggtacttactgagaagagagtttcggatgtcctatcatatggatgtaacagcttctgtgcatcttggagagctaattgactcgtagactcattctgaaaattcatcaagaaagttaaaagcaccatacaagacggtaacacagatttcctaaatcttagaaccaacattcaaataattttttgcagtaaaatttctgttcaacaaacctccgagggtttcccaatagaatatccatctaaaaagaggttcaaagtaaaggacacttctctatctgtcaaaacagcaacaacaaaaagtgattcaaaacattcaagtctacattataccaaaataaccaacaaaagtatctttaataaaggttagagagacttgagtcttaaacatcaatactggaggcaatggttagcaatctgttcagtctattaccaactatgactaacctttaactccaagttgctcttcagaagacacggatgacccagacacccgtgcaactttctcacctccctcaacagcagcaccctgcaacataagttgatccaaataatcttttcataagaaagcaatgaaatacagaagggataaaatagaactgtacaatgaaaacagacccttcattctattcgtgccacagtagcgagcaaactataaataacagatcttttactttgcaatatacaagggaaaagaaagctttcttttttgagagtagaatacaattaattgcagcggaaataataatatagatttctctaacaagtaggctcattttcaagcagcgaaaacttcagatttctctctctgtctatttgagaaaacatacaggagatagtacagaaagtggtggggggaagattgagtgcgggtgctaggacttaaaatgaatgaatagcttatcatcccatttgcccatggtagaaaagggtttcgttttcacaaacaagaaactaagatactataattgtagctttataataaatgttaattcagcaatcaaatgaaacaaaaaggaatacattaccctaaattttaccatgctcttcgacttccaggcagactaattattttttgatgatagtgccactaaaaataatcaaatgaaacaatatttgttggactcactcaaccacatggaaaaaaaaaatcataaaaaactatggcaaaacatcaaaaggaaaaaatccctcaaacaacctcgaaatcaattgacaagcattaaaatttccaagtgtcactttttctagagccccaaataccaaaaatctgtagaattcactttttcctaataacagccaatgagcaaatcaatatgactacacgtccaccatttgcaaacttcaatcacgtcccacaattttttcaggtgatttcgtagacccaaatcaagtaagtaccgaaaatcagtattctcaaaactttacctcgattttccgagcaattgggtcgtccctgtgtagaattcgtgagctatctctagaattctcgggcacatcttcgacaccaacgttggtctcggattgaagagaagagttggggcggaacctggtacctgtcttcgacaatttgaatgacacaaccataatggggtttttctgaaatcttgggaatctaaattctaaagcgtttctttctacggcacctacatgaatgtttggatcaggaaatggagatgagaaagggtcaaatacatattcaaatgaagaaaatgaaactaaaaccctttagcacaaagaacagattgaggttttgatgctcaagattaagaacaaaaattgcccacatataccaagagtttctttttctgtatttctttttttgttgcaagaaatagaaaaatgttaaacatttcctcacacatcaatagagtattagcaatttatctcttcaatatttcatagaaaattatttatattaacttatttatttaataatatatgttctcaaaaaaaaattatttatttaataatatcacacggaagtcatagaatatcgagcgggttgaccgggttttaagtttgcccggacccgacccgtgaaatcaaattcctactaaactaacatacatttaataatgtgggtattattttgtttattttattactaactatttttatttttattttaaaatgggagacttaaatagtggaggcctaaaccggtggcatatagtaatactaaattagaaaacaatatttgagacttatgacttcgttgttggtttttaatatattaactctataataaataacacaaatatgttatccatttattttttaaaatttatttctttatttatttttaatatattatatatgtaagaaaaatataaaaaaaataaataaataaatcgggttggcgggcgggttcgggttcaacccgaaactcgatggccataaaaaaaccaacccgcgaacccgcccgatgggataccaggttgaacccgacccagccgaacaaaatcggttttttaaaatttgcatgttgagcgggttggtcgggttcgggtcaaacccggtcaaaatgttcagtcctaactgaagattaaattaaacggtagatactattttggaccatgtgttttgtaaaagttaccaatgggatcctctgttttattaaatgacaaaatagaccatgtattttctaaaattgtacaaataagactccgaactaattttttgtcaaaataaaatttaataataattcgatctagagatgttaagacaaaattagttacattttctgtatctattcatgttagaaattatcttaaagttgattatatattaaaaaataaattttttaaaattgagctcaatgtcctatttttactattttaaaaaatataagatctattttgtcatttaacaaaacagaaggtccaattgataacttttgtaaaatacaaaatctaaaatggtatttaacctaaattaaaactacttgtgctctttggcacttataattatactaaaagggaaaattaatttttcatacatatattaataagactgtttggaatgggttaatataggggtgtacatcagtcggtttggtcagattataatgtatttttactaacacagtataaatgtcgggttgcaaatatctaattgtaactagttcaatgaaaaaataaaaaaaaaaaatgtaacctgcctaataatttttgtcgatttggtcgggttaaatcgatttttattttttattttttttcattgttgttaattttttgtgttcaaataattgatttgaaaagaaataaatgtatagtatatgccttttaaaatcaaagtagttatagtttaaattgatgttaaaaaataaatatgaattgaataaacattaaagtattaaataatatttttcaaaaaatagaataaaaaaaatatactcatatgtaaattttaaatttcaaaataaacactataaaatacaaactttaaatgtaaaatatttaactattaaacgtaatttatatattatgttataaataattttagtaaaaaaaatatgtaaatcggtttattcgagttatttgggcgggttagaataatattcaacccgcccaatatattcattgggcggtttgaatttttcgtaaagttattcaagttgtattttttgtcgttttattcagtttggtttgaacagtttgttaattttttttaacaaccctagttaatactagttaagaaatgtttatgtaaaatataattttgtttgttatctgcataaaatttaggggtcttttcaatattatacctaaaatt

SEQ ID NO: 16643 - DNA, 10776 bp, Cannabis sativa
aaatcgaagataaataggctccgagacctataaattgaagcgaatggatggttccataatgccccgagcataaaatgctgatcatctctggaaatactattaatagttcagaattcagtagttggtttcacctttatactttgtaccttaacctgtgacgaacaaaggatatgtattatcccgtgtgaaatctaagataagtgacctaaaaagcccctttttaaatcacttagggggtactaaggcataaacacacgcagacgggcaaaaatcaaaaacaaaaaagaggcgacaaataagtaaatataagcacttaaaatataagttttccaaaacagaataataataggcctggggaaaggccataaagatgtttcccataacaaaaaataaagataatataaactaaaaattaaaatattgtcttagggggagagaaataagagaaaaaaagagaaggggtttaatcaatcagctctcggaggaagacgaggacccacccgctcaacaaaggcttgtactaacttcttattcttttcccagaagcgtaccacggtgactttgggatcaggcatgaagtggaggcgaggttcaaacttgttcgatttccagcacataaaaactccatccttgaagcgcctcacgcagtgcttacaggtccccggagtaaataaagctccctcgtagcctttgtagccaccttttgggtccgctcccaaaactcacgtaattctttgagctcaatagacataatggcggtagtttccaagttggtctggtgtagctcctcaaaggtcttgagtttcgtagaaagcccccgaatctcctctcaagcgttcaagaagtccttctagtttgaagcaatgatgtcatcttttgtcttcaatgcctcctgatcctgctctctgagagccttctctgctagagcatcattgcgaagagtctccatcctgtcctccgactccctgagcttcctcatgactccgttcatgccacccaactctgagacagcaaacccctggtcgatcaatgttttagaaagacgaccagcctctgcaataatctgacgaccagtaaaataaggtcaggcctccaaaaagtaataatagaagaaagaaaaatgaaaagtaaatactcacggaggtgagggcaacactcatgtcctagatttggtaaacagaattggaggaggcacaagctgcgtacctctttgttgggagttgggttaagtcagcagcaaaatggctcaccagctcagaggcgaacgatgccaggtttgggcccaagaagcgcttaaaccagtcggtcatagggtcaagattcaagtgctagatctccccagtgtactcacctcggaagggcccgtcatgggcctcccttaaccatttctttagagtctcggcctcaacatcacctttggacagctcgtccactgcatagttatatttggcaatgcggagttgtatatatagatatataaagagacatgattcattcaaataatttgaatttaaagagtttaattgaaaattatgatagaaaatattatatgtcgagaacacaaaaagattaaaaataattaagtgaatctaattcaattaatgaagatctcaataaatggtacttgatatttgttcgatgatgtgtgtttgatttatacattttgtagatattttttgtggtatttattttactttattttaaattaatagggtcaactctatttagctatttgatgtacaatggtatttgggagcacgagggaagagattggattttaatggcgcataaaataaaatattcaagttggagtcagacttagtttttgtgccattaaaaaaaaatctcttccctctctaaatattgcaagatatcgcaaaaaaattgaaaaataaaaataaataaataaataaataacgagcaatgagttgagaactccgacaattttttagggtttcgaagtggttgagctcgtaaattttaggacttcagggtgaagacaacgagacttaaagtgaaagagttagagaaagacatattaaaagtataagtaccatatttctaattgaatggtatattaaaagattatgctttacaattaaacatattaagccaaattgtagcaaattttagcaaattttccttccaaaattaccgttcaaataatttccctccctcttcataaaagttgataagacaattattattattattattatttattttgtaaatacttgtaattcttttaaattttgtaaaattatatttcactcaagttttattttttctaaaaataaaatgtacgggttaagtcagaaatatttgctataattaaaatatttgagaggaacaaactttacagtcccaaacttggagtcattgcattataatgataaactacatgaataagtcaataaacatagaaagtgtgatactcaaatgtgcttgcccaagtacataacagcagcatggtacattcatcaatcataatttaatacaaggtaaaggaaagtgtgaagtgaacaccaccctttatataacaagggtactgtcatgaatttcacactacatatcatcatcctattgtttcgattctcaaacatataaggccgaatcagaaacatggaggatgatcatatgaaataagcagtatcctaaaaaaaactaatacaaataagaaaaaggaaaaagaaataaggggaaaaaaagtttctttgatttaactcaaactacaagctatgccaaaataaaaacttctgttgctagttggttaggttatgctccttgagagcagcatgaaacagggcaaccaatgtctagtgaccgccgtgcttttctatttgacctgtttgtcgggtgtcattgttcaaatgttgctcgctcctgccagatcttaggtcatcttgtccaggaacttccccgagcttctcctgaattataaactttcagaaaacttgaaggaagcacaaatattaaatgaatttttttaacaacaagacacataatgttgctttccctttggtacattcagaactaatgttcctataaatctttgaattgaaaccatttaaggcatgtagaattttatttgagttttcagagatgaaatctttatacactgtcatagtcattcccagtgccataaccacagaccaagtgaattattatggtaaagccatacaaaggaactagaaataaacatagtaaatggacaacctatagcttaccccgcatttccactataaatgacgacaagccgttaaaattatcttaaaggccagttatacaagtaattaaggaaaatagagccttttttttttaattgtcacttcgtaaaaatttcttcctataatttatacactagttttactggggcataaggcttttggcagctatcaacaacatacgttactttgattttgatccatatgctttggccaattcacattgcaaacaagatcagtcagtttataatatttttcagcgaagaacgaactcattcatgctctagggtgtacaagtgggtgcattggttgattatcgaaggctaaccaagcaaaggattatcataaatctttacttgtgaaattaaatagtgtatccttagaaattgtggtgatttgttcagtttgttgaataagtcgttgaaagttgagtttctaacttttcttactctggaatagcacaatattagtctactgaccacttattcgattatttggctggaaaaaggactagaagatagggcaaggatttctcttcagtctactacatttagacatttttaattttttgcaaaattgtaaggaattcctgtctgagttgaaaaagacctctgcaattggattcatttttgtatttgtggttttggaaaccgcttgttctccttattcttcattaatttttaaatttaaatttactttattatccatcaaatgaaaattagagcatcaccttgagagaagtattctctgaaagaagctggtcgtactcactcctgattcggttaacctctgatctaagattagcattttcttcttttaatgcatctgctcgctgagccagctcatcacattcagcctttatgcaaatgcatgagtacaacccgtgagttcatatgtaggctaagagttgcaaaacaaatgaaaagaattagacataacagttacctgtttacgcaatctagagcgacgagcagattctctatttgactgtttccttttctgccttttaagctctctttcatcctaaatccagataaacaattggtgcaactttcagatagaagaaaaaaatataacatacagcaaaaatcctgaacagaagaaacactagcggattccaaaggaatttgaagactaaaatgaaaatgtcagaatgatatattaaaaattatagcaaagttgcaaattaacagagtcataaacaaatcatcagttcctaattgctaacatcacagataagttaaggcatttgtataaactattgcttaactttataggtcatgaacagtaatgaaacacatatacttatttgtatagttatcagttagttgtggttgaatgctcatatgcagagtccagtagagagaaatattatgataacactaaaataaaaccctaattacagctagatatcagttgtaactggagtgacagtgagaaacaaaagagacaatttgagagagataggacaaaaacaacaggaaaagaaaaagagcatgatttagttgctcaccacctaagaatctaagatgactaaggatggccattataaggaagcaaaatcacacagctttcaactaatgttatgaagcaacatctcagatgatgaaatcagagggtggaagtacaaatgcatctctctgcccattgcataagaaaatcacaatacagtaatacaaggaaactaaaggaacaacgattctgcagcaaactaataaagtgtaactgtgcaagacaataagaagaactgaatgagaagaagcactgaaccaaaataatacaagaattttgaccaaaaaaaaaaactgaaccaattaatctggttaatatccagagtgccccaataattgttcaatgttcatttgtgtgtgcatgtgcacgtgcatgtctaaaccaaaacttgaccttcaattaatgctagttatatgtttctattcaaagatttgtgcctcttagtacatttgttatgctcctttagatcctaaagttttcaatttaccagcttaaataggagtatttatgggaacaatgatgttttaattcacacagataagaaaatgcaacagcttaaagtgccaattaacctgtaaccaaagctgagactgaacactatcacgagagccagcagtgacaattcctcctgcaactggagtagaaggaaccttcccacgtaatgcaggaatggcagatgcagctggagccccccaatagtccattcctatatttaagtttgttgcaggaccaggaacagcaccaggagcaccaccaccagcagctgttattggcataatgttcattgtttgattaaccattgaatgaggtgtgtttggtcctccattctgaggaccgtgcatagaatttccattctgagatgcatcacctgcaacaaggccatataatttaacatctatctcactatctacgcggattcaaggtatagtcaaaggggataatacaatcaaaccttctaaagaatcttgtctaccccctgacttgagttgtgagtcctataaaagtgaatgaagatagaaggtcatgaatagtaaagcttcattattttaaaaatatttcacaaaaccaacaaaagagggtagaagataacccgttagttttctattaattatcagaaaatacttcacacattaatccaaaccaaaaaaggggtaaaaaaaaaaaaaagaagaagcctacatttactaaatagcaaaacctatagggtttttccattgtaatttatggataagttacaatttattataattgctaaaatagaagtataaggcaaatgagcaacatttgcaacaaactaattcatagaaaacatgtctctcactaactcatttacctcaatgctttaaatagaagtgcaaatgtgtctacaggtaaggtaattagtattcaacaacacataattactcaaaacccaacaaggaaaaagggaagcaagggagaattaaaaaaataaactatacaagagaggaaggagacaaaagcgtagcatttttcttccataaaagtaagtaaataaataaccaaaaaaaaaaagaaattagaagtgtactgacaattatcgagctttggaatcataaataactgatattaaattagaagaggaaaccacactgcaagaataacaactgacaaacaaaacaaaaaaaccaaaatagtagacaacaacacttccaagaaagcaaattacacttcaaaggtgggaacttatatatatatagaaacagcatcaagacaatactagacaagcaagaaagtacataaggagctagaaaacaatcaaccatagtagaaatagtacttacatcctgtgagtttacatcactcccctcacttgagccttcactagcactctcagcactgcatttcaaggttctttcaggtattagctaaagtagcctcagcaatgaaaatcaacttaaatttgggaaaataaaagaccccctatacttatatacaactgtttacccaggcagtaaacaattaaccagataaacatgatcacacaagaagtgagtctaaagccttaacatttagccaaaatgtattaagtccaaaaataatttttctttgcaaaaaaaaaaagccatcttgttcatattttcgacaatattttcgatgtaattatttcagatagtcatatcaattaacaagaagccatgacctttcaattgctaactgtcttgaactaataataatatcagaaaggaaaaataaatcaggaacaaaaactttcatttattattcacatgaacaaaatcagtgcatgaaataagatctactgaatacactggcatttacgttaaacaacgaggtgtctttgtgcacaattataggataagaaacagtgataagcacaattcaagccatgaggccttttttttattattttgaattctttaacttttggccctggcagttcgacagagaagacctcctagtggtcccaaggcttttgagtctgtggggattcaaaccttggaacaaatgcctaccaacactttccaacactcctccttaccactacaccgccccttggggttaagccatgagacaaaatcctttagtccctctttttcttccaaatttcattatgctcacgattaatgtattaagagtttctttgtatcaaatcaacctatacacaatgtatattgtacttatttaagataatatatgaagtattctgtatatgatatatctttcttttcttttcttttttttttttttttgaagaagaaaaagaagaagagacaaaggccacttgtcttagattgacctaccccattcaagtttattgaaaagcctcacaagtatatgatatatctatttgttacttactccttcattcattcttcatttcctttttgttttgatagtaaaacaaagaacatttcttaatgaattaacacaaacatatttgcctacattttcaaaacaagaaagaagctacacaattttctaacctacaaaagtatgacggaaaataagcaattttagctattgtcttcataagcaaagatggattgtgcaaaaaaaatacatgaataccaatccttataacagtctgcacagctataggctatagctccaattataaactgccaaagcagtctacatattcagcataccttttggagtaacctccattagcggagccccctgaagttttaccaagctcactatttttccctgtaatcatatttaaactgcccaagcttcctttcgatcttttaataggcaacttttccttcacttcagatggcctaccatctgcttctatgctgccaggagtattaccctacatgggattttataagcaaggtcactaagtgcctacaaattgcaaaggaaacaaatcataagacagtacttgcactcacagaagcctcagcagcaatgccattcggaggagggatagcaaaagggctaaaaggataagacccctgtttcagaatggtagaaaaggtcactgacatctagaaaatgacaacacaaagaaacaagcacaaccaggcaataaagaacaacatacttaccggaggcatagatggatgagcatataacccaccatgaggatacattgcaacgtatggatgtggagaggtaccatatggaggcataatatgctgcaattacatattaaaaataaatctttaagaattagcaacagttgatgcacttaattctgtttagaaagctgtcactagaaacagctatcacacaaatctataggccattgttctaaacaggcacaaacacagaggtatggaaggcaaattaatactttttttttttctttcgtgactttaaaacaaaaattaaataaccaatcaacaatcagcacaatacaaaagtattaacaattagttgaaaggaacgaaaaaaaaaaaaagttatttacctggacaccccacatatatgggtgaggttggggacttgatgccaagaacccatgtggaggcattggagaatatgcctgtttacaataataagcagcataagcacgactaaggagaaaaatgaaagaatataaaagagaaaaacttcagaatatcactacaaaacctgaaaccccgaccaatcaggattaactgcaccagtacttgtagtcgaagactgctcctgaatgacacataaaaataaagaggaaaaagaaaataagaaagaaagagttttagcaaaaacaaaacaaaagtacctcaaaacttatgaacatagactcaacgagaaacacacaagtagacctgtgtactaggaggaggcggggtctttgaatccttctctctatctttagctggtttatccatctcgctgctacccattattcgaccacctttagaaacccctcaaatcatcctaaacaccaaccctgttgcatcatgcaggtacaatattagattcaccaaagaaacgcctacaatattccacagtaaattaggaaaaataaataaataaataagagaagcaataattataataacttccttgtaatataaaaatactgggaataaaaaaaattctataattcactcaagttgcggcactaggcactagttccccattaagctaaaaaaaattttcccattttgcacgaccaaataatgaaaacccaattactgaaaaaactaagctttaacattccctaaagttcaaaggcagccaaatatattatacattattatataaataaatctataaaattatacgtggaaaataggggcaaaactgatcaaagcaagagggagtttaaaccaagagaacctataaaaaaatcaaaatcacagaaaaattaccaattaaaatcaaatctcaatctgatcaaacaacagaatccgatacttggaatggcaacaccagagctgtcccagcaagaaaaaaatttaacgagtaaattggggaaaacagtagcagagaattgcgcatacactatcttagcatttcacgcaaggaaaattggggaagatcaacaattggaaattgggaattagggtttgtgaggggttgcacggagccgattctgtgggtcgtcgtacggtgtcgctgtcctaaggatttttcatggaattattaaaaaaaaatggaaattaattttctggtttactcgtgagacattcagtccctccctgatgctccagctcgactcggtcttgggcccagttgagctccaaatcattgggcctacttaaacaaggtccaattacattcttcctttataccacttttcttttaaaaaaaaaaaaaagaaaaaaaagaggaaaatttgcacatcaaagtttttactttcttacattttagtgtcattttttttttcataaaaaaaaatagtaaaaggatcaaaacattattttttatattcggtaccaatcattaagtttgacttttgacattgttgtgccatatgttttgattagggttgagcatgggttgggttggattggattggtcgggttgaggttatattaatgactcaatccaataacatcagcctataaattcttaacccattgacatcttgaaatttaaaatgggttgggttataacccttatatcatataaaaaaattagatatacatacaagttcaaacataaacataaacatccaaaagttaaagatattacaatcatccaaagtcttaaaacattaaaattacaatcatctaaagtcttaaaacgttaaaattatccataacaaatttgaacaaaataaaataagttatgtcgatctcaatcaataatgttaataatctttggttttggtgatgaagccttgaggtcaagttcattttctacaataataaaaaataaaatcagtcaaattattataaatatacaaatataacaaaacaaagaccatattcaattttattaagaaaattaccttgttcaagaaaatcataagcttaaacttcatccaaatactccctcatttgattccctcgtgatttcctttcaaccaattttgagtgtttactaatgcctgttgggttttatgccctaaataaaacttcaattcaatgtaatccattttattcaacatcaa

SEQ ID NO: 16644 - DNA, 3160 bp, Cannabis sativa
  modified_base (1404)..(1404): a, c, t, g, unknown or other
  modified_base (2711)..(2711): a, c, t, g, unknown or other
agatctcgatcgatgagtactactaattaatgtagtaaaagtgtgttaatagatgataatgaagaccaaaattataaaagtaaccagatgttacaaatccaatttccaattgataaaataacaacggtttcgaaattaaaacaaactactagagttattaattagctcaaaaaacaaacttgcatgttcgatcaaacagtaccacgatgactactagctagctagcttaattagggttgatcactagagaggagggcaaatgaaaccaggaggaggagtctttccacaggtgattaaagcttgaagagcaagaggaatgaatatgtttagattaagaagcttaatccttatggcagtgcaaagacaaattgccgcttcaagctcaagaagtccaccgagtacaggacaacaagtattctcaactgggtcccccaaaccaatatgcaccaacccaccaagcacatccacacaaagtccaagctttagggcatctattggacaagtctgtgaggtaggcggtgaaggattacttccaccgccaccaccgccacctccaccgccaccaggtgatgatggaggattgtatggcgggttaccgggagatgaaggtggtggcattatcactggaggatttatgattggtggtgatattataactggtggcgggatcaccggtgagggttttgtatgaggtggtgatttcggatgaccgccacctcctcctccactacctcctttccctccttttcctccttcacctcctttccctccctttcctccttcacctcctttacctccgcctcctcctccacctccgccacctccaccttttccaccgccgccccctcctccaccgcctccaccatggtgcggtgggtttttcggttggcctgggcggtggtaaggtggttgaggatgatgtggatcttgacaaggaacacaagcttgaattggtggtaatgatatcaccataaagatcaagaaaatgaaaaagatggcagggagctgcttttaatggaacccattgattttttttcttttttctttttagggtttatatttgtagcactagttaatcgattgagaagatcgatctagtgattggggtagggttttggatggggttttataagttgagtgtaggggttgaatggtttatatatagctagctataaggttataaaaatagcaacccgtgattagtactctgcctagtaattaatagcagtatgtaagatatgtattgttccattgcgaaattaaatagagattttggattgttgttggtcatttgcatacttcaatatgcaaatccgtgactactgcttctgtaagaaaatctcttcgatgatatataaataaatatatacattgtaaatctccatataaatatatatatatatntatatatatatatttacatatttccgtgcgaaacaaaccctttcaatatgtgatccgtgagtgattcagtttcacatatttccatgccaaaaatgtgacagtcatactttataatgaacttgatacatacagacaaaattcatcacttatagtacacagtatgtaaatttatataaaagggttgttgaatggcgtggtcatcagcacagtacaataattatttttatcatgatataggtaattaaattgtagaaatgcattgtagctaaactaaacaatatcatgagatcgatgatttgaagaacactacgtactgagaacgtgcgccattatttctaagctcattattttcttatcatactctctctctctctctctcttcactattgaggagaaataagggctccatttcacgaagcaaacatgtgaactcctgcttcttcttttattgtacgtggccactagctggattgtgatactgaagtacttgattttttttttatttgatgcatgtccagtttttattttcaacgttttattactattcgcttacagtagctattaaaataacctagttataattacattagaatccaatataatattggggactaatttcttcatttcctttcaaaattagattacacataacagtataaccaactagcctatatataaagatatatattaatgatgatagtgaacaaagtgtctaatatataagtactagagtatagttgtcacttctttgcgaaaaagaaaaaaaactgtccagtgccaactcatatattctattaacatatatatatggacaggaagtaatggagtgttactttcaaaataacatcttattattggcagagacccccataaaccttttttttccttaattatgaatattgcattttcttctctctggattctagctagcacgtataattttctagcgatatagtgtgtggacttcatgtaggccatgaccatggggcaccatgtatatgtgaccctgttgcttcaacattatctgcaaaaactttttagtcattgtcgtacctaggtagtgtgatagatactactactttatttgatccttatacatatttatataaatataggtagtacccagcctttttcagtggcctccatcttttttctaatttataatactgtaatttaggacaattacattagatgatataattatatctatataaccagttgaggctagctcaagtggcctagtagctgtgtgtgttttggaagttttgggttcgagtcccaaataaaatatggttgtaatatataancgcttaaataaaaaaaaatataattatatctatatattctgtatatatattacttgataatatatagaacagttgaaacgttcggaattacacatccaccacctatgtttatatttatgtgtataaaattattaatatgtccgactgatatatgatatcgtcatatggtactgatcattttcatttatgtatattaattataagtgacttttatatatacaaaaatacatgagtgtcgtaacttgtagtaaaattgatattatatatctctggttgtggaaatattggaagtttagcaatgaacgttgatcgaggcatgtaaaatatggcccttgatctataggtcccacgggagctgctactcatgttctatgcatatcagttgttttttattgggcactactacaaaacaagcctttagagtcgtttttttcagcataataattaat

SEQ ID NO: 16645 - DNA, 6543 bp, Cannabis sativa
gatctaagagaattactcagaaatttcattataagagctttgagagaaaacactttgttctttgttctcgagttaatacaatctaaggggagtaagttattaccacactaatggggtcgaacctcttcaaaatttggtgttctttattacttattggcttttgctctattttaattatattctaatcgcttaataattgactcactgtcattgactaaaagcgagatcaacataatatatattatatgatcatatttttatgtattgaaagttaaaatatatacaaatatttgattgaatatgttagataattaggtgtgtagaaaaaaaaaaagattgatcgagtgaatccgttgacccgtccaacccgaatccgccaactcaaaatctaccaactcgtaacacgtgaacgagcaaattcgggttcatttttttcttcacccgaaaccgccaatcaaaacccgcctaatattcagctataaatttgagggtatattaagaaagccggttaccaataaacacatttttagaaattagatcatcatattcgatatattctctgtatattaataaaaatatgtgtggtataaatacacatatctcaatttaatacaattttgtcgttataaccccttcatatatattacccatttggcataatttccttccacacacaacacatacataaattgcgtctaatcctcgaaagaaattttaatggaaatctttgtacgttttacattatatgcatgacatggcacaaagtgacaacagtatttaattgtgaacaataagtaagagaaaaggacaggaagatgaaggcattgaaaatggcaaggtacaacaaataaagaattagtaatattgccacccaattccctctgttagatgagtcataaagactgcatgttaatttctcttacacataaatccatcatattatatcctcacactcactacttctaccactcctaaactctttattcattctctaaatacccttttgcctatattacaaacccttctattcactttttcttcataatataataaagtgttattgttacatctactctctttccaaaaccctaccaaataacaatgaacatgaaaggcatgaccaagaagaaaatggggggatttatgtgccactctcctgccgcaaccgccgtctgtatgactcccgattcgcgctcagctatcgtgcccggccggagacttgttccggccgaccgttatgttatcaaccctactactaataataatagtagtagggatcatcacaatgggagattattcaccactgccaagtactctagacttgttcatcatcaacaggatcatcattctcatagaaatttgatgaacaacaagataagtagtactactactacatgtactaattcggctgttaataataaaaaatcagtcgttttgcctaattattccttgatcaagggctcatcacaaaaagctttgaggattaatattaataataatggtgatcatcatcatcatcatcaacaaagacctcccaaaccaccacaacttattatcaattcagttcctgataatgtattccaggtaatattgccgttatagttcttttttctttttattttttattatcacacacaatgtatgtcatatttatgaagataagaaaccaaaaatcatatttatttgacacatacacacttggttctgtttttcctttacttttttttggtactccatttatataaattaattccatccgttaaaaacattgatgataatatcgtgtatatatatcttacatttaactttgtacattatgtcagcagttttgaagtggtgatgccttgcaagcttaaacttagttttgcttttttcactttaatttggtcacttaattattgtttgctcaaaccaattaatatgtttgctatgtgagcgttactgtgtagctattaatcggcaaaattttaattatttttaataataaattttggctactgcatatatatatttacattgaaagaagcatatatttttatttaccaacattattgattaatagtgtgcagttctaacttctcctcgtcttctaaaaaaataattttaataataaataaatttaattatatgaatgtactatttattttaattataggctaatgattagttagtcatatattgtatgtcataataagataattatgtatatatattgtaccatgctatatagtatatatacctatattcaataaaataattagtatttttattttcaactttttacattattaaattgtgttctttatagtatataactcactaaaaatattcttcaaaaaataaattttatagtaatgtatttcaatttgtattcatttattaatattattatttactaatttattcattttacaataaaatttaacagaatataataaaagaattatattattataaaaattatatttcaaaaaatattattaataaaccgtatactataaaaagtttatacaataatactaattattctatacaataatatacatatggtatgataatgtggggccaaaaatgaacgtggcatgagtactatatattatatgtgacaacatgaaataattacttgaaatgtgatatctctctagtcccttcattttgtttaaaaagtatatatatgtcattgatatttatgattatgactattatgatttatatagatgcatacccataaaataattaattattactcattaattatacatatgcagacgacaatatatggttcttaaagacaataacaatgaaaaactatagtactaaacgtctacatttggtcatattaattaatcaattgattatgagttaatagtatttatttaatttttttaacacagatttatttatttatttatttatttttgctacaatcaatacgaaagtagtcattaaatacttatattgttcacagttgagcacgatgagaagtcattttcattgatttaatgctaaattttgtacattatatttttatggtctgttgtaatgggtgtagctaatttttaataattaacattgcattaaaaaaaattactatttggtataggatcagtatattaatatatttatatatgataacggttgaagcttggtttattttgcaggtggttgtaatgcgagtttctcttcactgtcaaggatgcgctggtaaactcaagaaacatctttctaaaatggaaggtataactttattttcaaaatactcgatcactaattatttttaaatatatggatttagaaatattgaattaatactcatttaaaaataaaataaaatcaaataatgaattaattctaaatcatgaattctgtgacgaataaatttagtttttaccatttggtctgatttaattaattttagtcatttattaatgttagattagatcggttttatcaattaaatatatttcatgtatattttattttaagtataataacgtgaagtttaattatttaatatttaaaattaactgttaatttgatctaatcaaattaaatatttaatatttaggatcaattattaatcaatttaagcacaaacacacacaaaacaacactataacggaaaccctaaaagtaatgcatgattttgttgtatatataaataaattattattattatttgctggtgtggaaattatttcaggagtgacgtcgtttagcatagagctggaaacgaaaagggtaactgtgatgggacacgtgtcacccgttggagtattggagagcatttctaaggttagaagagcagaattctggccctctgcatgttctgctgccgaatagttattttaactctagtacttctttattaattaaggtttttcaaacttacccccaaaaatatggaacccattattattattatatatttatattttataggagagttctgaactcgaagttatataaatatgttatatctagatctgatcatcatctcatcaactgactcagaaggaattttaatatttatatatctatatatttataaatattttgaagctttgcatgcattctcctttatttgtagggtaactatcagtccccaattgagtttaatgttaggcaaaatggtcctatctcaaaataaaagctaggtagaataaaaaaatgggtaggtgatgtgagaaactttgatcatcatgtgtgatgaccagcttgaagctgtattgatagtgaaatatattatgctaaatatttttcttttttaattttgtaatcatatttttagtaattaattaattaaagtatctatataaaggtaattggacacctttggttaatattaccatttgagaatgatcattcttatactaattgagaagattttcttattttcacatatgttcatgggattgttgtaaattgtgtaagtttgaaaagatgcattggttaaattgtgtttttttggctatgaagaatatggcttgtgcgaatgagtgtctatatatttatagatgattatgtttagtgatagagactttaatttattaaagttaattaactttttaattggatatatgctgtcaaaatacaaaaatttaatataaacataacaaaaataatagttaattatagtcaatttacaaattatagtaaggtgtatatatgtcaccacttgagtcttagaccgtggtaaatatgtaatatttataatatttgtgattaaaggtcacactttaacccttgtaagataatccttataaaaaatcttttaatttatatcacaaaatacttatttaaaaatattagattaactctaataccgataagaaaatactagtaacaaattgaggatcattcattaatatataaaaaaaaacaataatattctcacaattatgtagtcaccaaatagatagatttaataagtcaataaaataccaaaataatatctcacatccatcattcttcatttctaactagtacataattaatttaagtcatccagaccatccatttcaacttaaatacaaaatcaatttcattagaagtttaataggtagagtaagattgaattaataacggctttctttctcaacggtaccatcccgatctactagcatcaaattgagtttttagaatggaaaaaaatagagaatgagcttataaagcttagtaggaaaaaaagggacatttttattaatgcacatataaaatatttttattcatttttacggttttttaagaatcatttcattaatacacaatttataatttctcttataaaaaatgtggttcatacacaataaatacattataaaagaacgctaaccgagcaatatattataaaataacttattatcaatcatttttaattcatatgagtattataattaatattatatttatatatagtcatgtatatattttatgtgatgattatctgtactcaatatttatatatgcttatttacataaataaatatacaacactgattgttacgtatactcaataattatataaataatgactattttaaaaaaaaaaagtgtttaggtgaattttggaagctgacgttgataccgccacaagatttcaaacaggataagttaaaaagtactacttttattaattaattaattaaatttacctctaattttatatttaattgaaatattgtactcaaaatactctgatatgagagagttacatggaaagtatcttgaagtgacaggggcgaaattggtacaaaaagtaaaaataatagactttagaaaagagagtaaaaataaaaaagaataatataaaaaaaatatagagtgtaatttcttcatttcaaacaatgtacaatatataattagtatcatcaataatattacatatatgtagactaatgacttagccaatgaaaaataagaaccagatcaatggcttctaaagtaaaaacaatcaaacttgaatcacaaggccttgaggtctccgttcgaggcctaggctatatgggcatgtcagctttctatagtccaccaaagcctgaaccaaacatgatcaaccgcatccaccatgccattaattctgacataaccttcttgacacctttgacatttatgagccatttagaaatgaactcctaatacgaaagttcctagttatacagtatacaatacggagtatcaaacacattaaacttgttagcataagagttgttgatatagttattgtatgaggttgagttagtgtaaagattgttatcatagtttttatatcggattgaattgttatgagggttgttaacatgattgttacaatgagattgagttgctgtaagggttgctaacataatttttgtatgagattgagttgctaacatggttgatttattagaatgggttgttgtatgtgttgctaaaaaaatattgtatgagattgggttaatataggggttgctaacatagtttttgtatgagattgagttattttaatggtttctataacataatttattgtgtaagattgagttataataagggttgctaaaa

SEQ ID NO: 16646 - DNA, 14282 bp, Cannabis sativa
  modified_base (356)..(379): a, c, t, g, unknown or other
taattggacgatttagaataatttataaatctctcaatatatttattaggcggtttggattttctttatattatttagagttgtattttttattagtttattcggtttggtttggacgatttattcgagttgggcagtttataaattcttttgaacacccctagtttcttataaaagtttttagcagctaagccctcctaactatagtttcacttgcatttaatcttcttagcttaaattttgacgataaaaccttccaaactactgaactgttagcaaatttaaggtgtcatccggttaactgccaccatagactgcttatatgtacactgacacatttatattggtacacctannnnnnnnnnnnnnnnnnnnnnnntaaaattaaataaaattataaaagtaaaaataaaatatttaaaaatatatattataaattttgaaataattttttttatgatttttaaataataattttagatatactattataaacgtggcacatgtacaagagtgtacacctaaacaatctatgctggtagtaactgtgaaaaataaatggcattttaaatttgctaacaatttagtagtttgaagggttttaccactaaaatttgagtttggagggttgtcaacattcatgttattctgtggagcagtcttttttttgtaggctctctcatgacacatttttgtttgtcccttgtaggatcacaaattccaaggtcttttgggtttattttcttcgtagcattgttttcatgaggagcaagattattgggtatattttcatcatgagccactcctcttagttcaattatggcctccaatcttgatagagtttctcgtatttgcggggagaatgcttcctaatctgccagcttcattttagttttgacgagttttttagccattcgaatgacttcaggatttggctcatagtaatactcgtcttctttttctttaatacttttaggatcttcatccttaggatcatcttctgaattttttggatcatcttcaatgatgtgattttcatcaacatatttttcagtatgttgagtcttcttagcaggacgactggtcgcttctttcgggtctccatcgactcctactttcgcctgagtattagaattcacatcgtccatgagagtatctccatcacgaagaccaaatttgccgacggtggtttgggtggctaccatggttgcaatatacaactttgttggtatcacttctttcttcaactcttaatgaaagcaccataatatttaccgagattttcaaaaacttataaaatatgataaagttaaggaaatataacaaacgaataatgaaaccaaattttttacgtggttgaggcgttaaatagccttaacccacgagtcaatattattgtgttaagattggaaaagccttatgatttacacaagtgtttgaacccaagaatttgcctgagcactcagggaatgagattctaactttttgcatgaatgagttttcttatatttatagtgctcgggttcttgtatgtacaccttgtccactaatggggatagataaaataatataataatatttgggccaatttggtgaggcccaacccatgaggaattgatattctgatgacgtggatgccatatcatgttgatagttgtcaaatcgtgtcttacttttgtggataataaagacacattaatgcttgattgacaattactttatttccttattcacaagatactaatcgtggaaataaagccttgatattgtgggattcggtaataaattgttgtgatacgaagctggatatctaaatatccattaatcactcatccagacgatttgttcgatgccatccggagatacgctatgtcggaggtgtatatctaatctggacaagtcatttgtccagcttccggaaggcttgacttcgctaaatggatccaatccattatcttggttgggattgcgattgggcatggaagcaacttaactgaaattatgttggaattatacgtgtcctccattcgaaaacacagattacacatacactaatatactacatgttttttttgacggattaatatgtctcaattgattaatttatccactttcaataatttttttattaactcaaaaaaaatctaaataaattattatttttaaaattattataaaaaaaactactaaataaataaaaatatattctaattttttggatatttcaatttgtattgttatttattttaagattatttaataattttttaaaagtaaacaatgagttggacctctaatatattgacacgtggcattttacttaatcaaatcaacacttaatgaaatttattgtatgatatagtattatttttttgaaaacaacatatagtatttaatcattcaaaaaaaattatataatatataattgtataaaattaaaaatataagatatttatgttacaaattttagcggatagaaagagttgatttaattaatttagttaataatatgatcataaattagagcttaaatttaaaagaaagtgatttttgtaggacagatatttaattattacatttttttattattattatttatttattttatttttatctgagaagagtaatttggatagggtaggagaaatgtgaaccacttatttaatcttagccaagaaaaaaaataaagacactccttttaaatgtggtaacaaattccatttccaaccatgaaaaaatggattatctgaaattggatcatatactaatattatttttgttgcaatggatgatgatgatgaagccaccaaaccaaaccaaatcacaagatcaaaatcaacacaaccagttgtagcagcagccatagtcatggtgtaatgtcatgtcaatcatgctctcatgcctttcccacattcaccatcatcatcatcatcatcatcatcatcatcaacaacaacaccttggtcttaaccccataagaaattcacaacaagctttcactttaatccaaaactgcaccaatttcaaacaccttaaacaaatccatgccaccattatcaaagctggtctttccaatgaccaactcctcattaccaaattgattcacctctgttgttcttcttcctttaaccaaattgattatgcttctactttgttttataatcacattcctaaacctctcaccattacttggaattttgttattagaacttttaattctaatggctattcccaccaagctttgttactctttaagctaatgatatcaagaggttttcctcctgataaattcacctttccttttgttatcagagcttgtgtttcttcttcctattttcgccttgcccgagttgtccacgggttagctatcaagactggtttttctaatgatgtgtttctgcagaataatttgattgatttttactttagttttggtcataaattttgtgcctgcaaagtgtttgataaaatgtctgttagaaatgttgtttcttggactactatggttagtgggttggtcgattcaggcgagttagataccgctagagcgattttcgagcaaatgccaaccaaaaatgttgtgtcttggacagcaatgattgatggttatgctaagaatcaacaaccagagcaagcatttcaactctttagaagaatgcaatctgaaaatgttatgcctaatgaattcacattggtgagtttgttgaaagcttgtaccgaattggggagcttgaatttgggtaaatgggttcatgattttgctctcaagaatgggtttagattagaagtttatcttggtacagctttgattgacatgtacagcaaatgtggtagcttagaggatgcaaagaaagtgtttgataaaatgcgaaagaagagcttagctacttggaacgcgatgatcactagcttaggcgtgtacgggtttggggaagaagctcttgctctttttacaacaatggagacgatgaatggtgcaccaaagccagatgctattacatttgtaggtgtgttgtgtgcttgtgttcaagctaatgatctcactcaaggttgtaagtactttgaatatatgacccaacattatggtatttctcccatttcggaacactattcttgtatgattgaactgtatagccgtgctggtatgttggatgaagtagaaagattatcgaaagccattcgatgaaaaaccgaaacacagtactttcaccaagctctacaatggtcattatgttgcagatgaaatctgaatccattagttcttgttgttctttgttttgttttggtaaatttttggtgagttatacaaagacttagctgtgaaaatctagagtgagtgacccaattcttatatatatgtatgcaccagttgaacaaattaggaataaaaaaacacacacaagcacagagggacaccccttatttttcaaatatttatcaaaactgtataaacattaccactttaatgataataatgaagtgtcactatacatgagattccatagaggctaaagctctttttcataatttaaggtgctgcagttggcaatcacctatattgatactgatgctctatgggtttcaagtgcttttaattctacatctacagatttatctgatttaatttcaaatgttctttgtctgttatagttttttcttggagattttgtttctcatgttaagatatattaataggaattttcttgaagattttgtttctcatgttatgatatattaatgcattagcaattttctagtacctcagacccatatacggaccctttttaataatctaatgcattttgtaggtagatttgcaaaacatgctctaaagttaaataaatacatttattacaggtgaaattttctattttatttttaatttataataacagttttatttattgttattttgtacgtcgattttgtagagggctttaaattcagagattttaccgataaatttaattttaaatgtaatttgttgatttttgattttcaatttttttaattagtggggtgctagtaagttattactaattaaaggacatatctttggctagtgtagtaatacgagttgtgtgttaaactctaagtttgtatattaatatttattttaaaaattgtcattataatataattctattttcagtgttgggatattttattttttcatattcgctagctctggtgactctgttaataataagaagggtaattcaatgtactgagtgtactgtttgaagacgttataattttattgtttaaattctgagagcaattttgttccatgtggatcgcgttaagaatttagcagcccataatttgacaaaacatgcttttcggttaaacgataaactattttggttcgaaaagggttttgtactaattacgaatatatacattgtaaattcataactaattctaatcattatattagttcaaacataagaatacacaagaattctaaataagataatattattaacatttaaatgcaataagatatttacaaatgaaaaatgtccagatttggccaagaatccatgtaactaactgctctgtttgctgatactacagtctacagcttccttccttgtttaagcatggttatgctgactcactcacccttttattttatctatttatctacgttacacttcactttttccttttcaagtcagtaacttttttcatttacaaaaataccaattaattaattaattaatacccacattaaatgccttattattccacctagtacacataatacaaattatatttacttaaaatagataaaaaaaaaacacaacccaatgaaaagaaacgtccaaatccaaaccttcttctcaaaagtaaaaaaatatcttctctctttccaaaatcctaatataaaaagtgaagaagacactgaaaactggtctcaccacaaaaacaaacacaaactttgatagaaaaaaaaaaaaaaaaacaccatagccaaaattaagctctaccattttcccttccatgcataccgtaagtaagtcttgaaatttgatcttattgaattgttgatttcatttacgattatgaatttaagcttacttcaactttcaactacttgaagttgaagacatgaatcaatgaatgaatgaatgttaatatattatcttatctaatctgtattgaagaagaaaaaaagatatggttggttgatatttaattcttagtttttgtcgccagagtcaactatgaatgatgctgatttgtttattttaattaattaattaatgttgatttttgcagggtttgagatgaagatatgagtgtttgtatctatggaatctctgtagattagagataaaaaaagttagagtggtagagataagtcacatgaacagtagcgaataattaggagaatattaattaattaattataattaatattttttttttggttagataattaatttaatattaatattaagaaagttgatgaataatggcattggaattacctcatcttcttccctataaattggtcaaaggtcaaactctggtggcacaggcggccagggctgaactagcttcttcagtaattctaaaatcaaatttcatcaacaataattatacaaattactgtaataataataataataacgagaggagacttgttgtgaggagggattgggaaaccatggcttcttcgccttctcatagtcgtaacaataacgatatcagaacaattaatcatcttcgtcatgttgattccatggccactatgccttccggcgccggaaaaatccctcgtttgaatgctgttattctcggcgaggcattagctactgaggaaaacgatctagtctttccaacggatgagttctcccaacaggctcatgttccttctccgcagaaggtacatacacatttgatttgatttgatttgatttagattgagttgactgtgtactattttttttttgaatagtatcttgagatgtataaaagatcgatcgaggatccggctgggttttggtcggagattgcttcccaattctactggaaacagaaatgggatgactctgtttattctgagaatctcgatgtcagcaaaggaagagtcaacattgaggtgattaatacttttttgtttctttctctttttgctttggtttgaaatctcttggttttcattgtcatggtgttcaatgttgtacagtggttcaagggaggtattaccaacatttgttacaattgtttggataaaaatgttgaagctggacttggtgacaaaattgctttgtattgggaaggcaatgacactggatttgatgactctttaacttactctcaacttctccacaaagtttgccaggtttgtctcttctaacttacttctattgctctattttttcttgacattgtcattgtattagaaaatatggatgtaatgtctttgaattttgctgctttagcttgcaaattatttgaaagatatgggagttcaaaagggtgatgctgttgtcatttacttacccatgttattggaacttccaatcacaatgctcgcgtgtgctcgcattggtgctgttcattcggtattctttttttgctctctctcattcatcagctccattattcactaaagcttgttttctttttagtaccattaatttcttttctttcaggttgtttttgctggattttctgcagaatctctttctcagagaatcatagattgcaaaccaaaagttgttatcacttgtaatgctgttaaaaggggtcctaagatcattcacctcaaagatatagttgatgcagcccttgttgagtctgccaaaactggtgtccccataggtttgaattttactgctttgtaattcagttgcaattacctctaattgtcctaaaaaatccatataatgctaattatcaagtacgtatcatttttattttccccatctaaaatggcataagaatacttctttgagcagatacatgccttgtctacgaaaatcaattggctatgaagagggatattactaaatggcaagacggaagagatatatggtggcaggttagtatgcaatcagaaaacattaaatgagtttgttttgcacatgctgcatttgtataagatgctataaatatagtagttattatatcaaagaaacatgtcactgaatggccatgctattatctggacatatagtagttattaacattattaaaacaaagaaaaatgccactaagaatactaagagcatacttacatcaattcatacaatcatatatttagtgcaactatttacagagtattgatgggtattgattgtcttctaggatgtcattcctaaatatccaactgagtgtgcagtggagtgggttgatgctgaggatccactatttctgctatacactagtggtagtactggaaaacctaaggtacacactgcatataaaaccatggatttttcttatttacatttttcctcttagcaaataagcatttgctttcttcccaagtagctatagcccttttcaatattcgtttgttctttgaagggtgttctgcatacaactggaggatatatggtgtatactgcaacaacattcaaatacgcatttgattataaaccatctgatgtatactggtatctcttcgaaagctcagtgtgtctttggaactttattattgcaggacatcaatatcagacagtttgttcctccactttttagattaagacttgtctttttttttttttccttaggtgtacagctgactgtggttggattactgggcacagctatgtcacttatggaccactgctcaatggagcatcttgcatagtttttgaaggggtaattttagttataaagtctactatcaatattttactcgtaaatgaaaaagattatttatatgtgcaattctaccagacaatcttaaattgttgtgtttgggaaaggatgatacttattacttagtgggaccaaagtaatggctagaaagcaagaaggaagactcttaaaagaagtcaatattgttagatggaaacttttacattgaacttcatattctcaaattataaagttaaattgatgttcgtatgtaaatttttggacccgacttttcctatttttggaagggtaaatgtttttggctagaattgatttaaactgttgtcatgagtagccatttgagtatttatgttgaagttttaccttaatctaatgcattcaataaaaggaacaaaccagaccttaaaaactaatgaataagcaacatttattgaagtttgacatactactaccaggcattaaatattagatcaacaatcaaatttgtgaaattagtagagtccaatgtatcatacaggcactgctacctacttacttttactatcaaaaccgttctttaatgtcattaatgattattattattcaatgtataacttgcaggctcctaattatccagattcaggacgctgttgggacattgtagataaatacaaagtaacaatattttacactgcccctacattagtgcgatccctcatgcgtgatggtgatgaggcaagatatctttttttttttcatacttttaactcaaattgacatggagatcagtaggaagaatcatcacacaggctattcttgttttatgcataaataagattacttactaattctttaccattaatgaagttgcataataataccccattcccatatgaaaatattttatagtgtttgtttatttgtgctgatgaacttgttcttgctgtgctcgtattttcatcttattggtcctttagttgtttaattaggataacagaagtctattctggttgctatgaagtaaatttattgatattctaacagggaatctgtttccctggagttatgtaatttcataagtggttaactgatcaactattgttgattgtgcagtatgtaactcgctactcaagaaaatccttacggatccttggcagtgttggtgaacctatcaatccaagtgcatggaggtacagcataaactgaaaattactcatttcatcttcacttcatattttttttactattaactaacttctcagatatatcctgccattgcaggtggttttataatgtggttggagattcacggtgccctatttctgatacatggtggcaaactgaaactggtggcttcatggtacttttgctttgctctttattctattttagggattcatagcacctgatgattagcagaaaacatttgatttttttttatttactccaatcatgcatataagtgcacacttccttctctggctttcaaatctgttacatatttcctcattgtctattcctggcagatcacgccattaccaggtgcctggccacagaagcctggttctgcaacctttcctttctttggagttaaggtaattttgggttagctctttcttcttttttaatattattattcttttatcaaaaaaagagactttcttttggcttgcaaataattatttctgatgcttcatagttttctgtctatgttgtagcctgttatagtagacgagaaaggtgttgagattgaaggggagtgcagtggatatctgtgtgtgaagggctcttggcctggagcattccgaaccctctacggtgaccatgagcgatacgaaaccacttactttaagcctttcactggttattacttcactggtgatggctgcagcaggcaagttattatcattacagtctatcagttttacttgcctggatccccaatgccaactgcatcagcaatcttcatatcttgccttaaattttaaaaatatagtttgaaaacttgtaggatcatgttttaacatcaaatgctaagtttaataagtcattgtttcagggacaaggatggataccactggcttacaggaagagttgatgacgttataaatgtcaggtatttgatattttgagctttcaaaatctttagtttagacttcaaagtactctagaaaacttatacctaatccttgtcccctcacttgctctgaggccattaacccctctttttttctctatgtggaaatgtctatgcatttgtgattatgaaaatttctatgggtaaacggtggcatttagtcacctaattttgtttgtaaatttatgcagtggacatcgtattggtacggcagaagttgaatctgctctggtttcacatcccaaatgtgcagaagctgctgtagttggtattgagcatgaggtatttagtgtagaacttttatgttgtaaccaactacttctaaatgcctaatcatgatactttgttatgattcttgatgccgatttctcaccgaaatgtttttatggtacacaggtgaaagggcaggctatatatgcatttgttactctggttgaaggtgaaccttacagtgaagaattacgaaagagtctcatcctttccgtaagaaagcaggtatggatctacaaatttattgaatgttttataattctcttgttattctggatggaattgaactggctcctcgggatcaagtttcaatctttgtggttatcgatctatacttgtgtgtctttcaacaagtgaccatttcgtagcaccagaaactttttaatatgggagcttatgccagatgcttgcttagcatgaatgtagattctgatatttgtactcttgactcaagaaatgattttacatttcagattggagcatttgctgcaccagaaagaatccactgggcgcccgggcttccaaagacaaggagtggaaagattatgagaaggattctgagaaaaattgcttctggacagttagatgagcttggagacacaagcactcttgcagacccgaatgtagtcgaacagctcatttcactttccaattgctgaagacttttctggcccggaaggtaacctatccgaactccattcgtcacattctgatagcacaacaattgatcaaatataaattgtaaaagaaaagagcacttgtgtagtgtgatgagaatatctttttatatcaatttgattagaaaatagacaagaaattaaccaaaatctaatgttctaaattccttgcaggttcagttctacatagcaaagcacaaaaggagagggatttgttaagatcaagagatgttaatttttctatagaaaaaaataaattaaattaaaattgatttgcttttgtattatgtgcctatgtggtagtgttgagcaatttctttattccatatgttctgaagaataaggcattttaacaaagctggtttagcagcataattaataattcttgtatttcttgcaatttgtttataagaattattaagttaatcatttttataataattattaaattaaaatatgttattctttgttatatgagattttatatttaaatatattaataataataagaaagtcaagtctaacaccacgaatatcttttagtatttttttgtaataagaaaaatggtttaggatttacattgcttttagtttaagcatataaccttataattaaattttacttcatggttagtatttaaaatcccaaataaagatccataaaagaaaaataaaatgaaaagaggaaaaaattaacgattttgatattttgaaatttttaaaatcaatcaagggaagcaattcgagcacttttgtggtagccatttggtatttgacaatatattttagtaacaataaaagaacatagattattttcacacaagaggaaaataaagcaataaaaagcaattactacactttttttttaaaaaaaaaaaaaattgatagtaatcaccaataaaataataacatgcaactttattgagacatctccctttattggaaacatgaccataattaaaataagaaaaacgagccaaccaatcgactgtctgcttcccgaatcgtttgacaaaagaaactaaaataaaatcatattattgcaacatcacagttaatcttaaaaaccgcctatattcaattttttccaccgctcagaaaggcacaataattgaaactgttacaagttcattaaaccccttagcttgagcactcaagtattgtgcaaggtatgcaactgcaccactaacaacccatttaaaaaacttaatattcccatccactaacaacgatttgatggcgagtcattgaaaaacaaagaaaacgaaccaacaacgacacaaaataaaccaaaatcatgtcatctcctaacaagattagtcacaataacataaacaaaagacactcaaaacatgtaaagacaatactcattgcagtaacaagaacctaatcgcaagagcaaaacctaatcgtagtagcaaaactacatacctgaccaagctacgcctaagcctagggagggtagcgggcttggccaaagaatttagaaacaagaaaccccagctatttggagaaaaaaaacaatctctcattttttataaagcaattactgcacttttgtaacttaataataataaatgagcaaatcacgagaacaaaattttaacacactagaaaacagaggtaaacaaaaactaatactctcttcttacctgataaagggacgaaagttaacaaaacttgagtgagaaaaaaaaaaccaagacaaaacaataccccaaaacaaaaaaaaaatgtaaaatgttgtcgaaagactcaaatcgaagtttatcttcatgcttgcttcttcttgttcaagcaacccatgatgcaccaatcatgctctaaatcataaacatggtatgtatgaccatgctcatgtcatgcctaaagtaaatagatacatattatttaagcaaaactccaaaaatttccaataaccaatataactatttctagagcaaaagtgggattttttcttttcctttccactaatgaaacatcaggcatggcatttctcaaaacaaatcacacataaaggtctcaaaaccatgtaaactttatctctttgtttgatatcaaaaatcataggagggagggatattccaccatactctttcattacaaagaaaaaggtccatataatatagccttgaaagagcacaaaaacatagcaaataaaaaagatgaacagtttcatatgcaatcgatttagtggctaacttataagcggaatgtgaagcatcaaagatcgaaggtacataatagagaaagaaacctgcaagaggatctcacaccactatcctgcaatattgttaagcaaaatttgaaaagttgttccttaatcagaatcttcatacacttctccatcgtctgatagctcatcgaatgatctc

SEQ ID NO: 16647 - DNA, 5084 bp, Cannabis sativa
aaaagctttcattacaatatttttgtaaatatttaaataaaagttaatattatatattttttttaataaacatcttagaatgtaaaatttccattaaagaatttaaaaccttcaaatcaccatcgaggtctaccaatgcatgttgggacctatctaagtgtgtgtatgtaagcaaaaacagaaaaagttcatctaggctggtgaggtgtatcgagaggtttattaaggttggtcagtttcatcaagtgaacaaaaaaattttgaagaaaagaaaaaagactgagaatatctcaaatccgaataaatgaaaaagaaaagtaaaaacatcaaaacacacaaatgtgacttagataagttcaaaatataatacccattacaataatcaataaacaccttaactacttatccatgaagtttttcctccaagaactctaaaagggaatggtttgttgagtgagaacttcaaatttagactcacttaaataatagcgagcgatagacattcttaacaaaaataaggtgttgatggtaatcttggtgacttgagagctagagtcatgaaagagtgagagagtaaatagaaaattgaaggaaatagttctttgctttggtcctaaaatgaaagattaagttatatttcataggattttattatgtagaatatttttgctataggaccgcacactaataattttgaaactcaaacttagagcattactattacacattagtggtggccagccaacactttttatggataatgctctacgattggttagcgatattaccataaacctattttcttaagttatatggaatctgatacttaattacaccatcaaagaaagtgctaggcaccagtggtaccttctagcaattctccaaatttatcttgtttacctttttatctaagattaaaataatatataacataatatgtcacacaataaccaacaatccgttgtagtctagttggtcaggatactcggctctcacccgagagacccgggttcaagtcccggcaacggaatttttgaccttttaattcttcttatttatttcgatatatcttgctttaccatacacattttgggtaatgtttcaaattctaatgattaattattaaatacactatacaggaagggaatagaacttgtttttattttcattcaccaattatataatttttatttgaggtatgattttccactttctttctgttgctgctacaagataaaagaatgttcaaaacgcattaaaattaagtgcgtataaaatgggagtatggcattggattggctcacaaactatgcccaaacataaataatgggctatcaatgatccataagaaaagtaataggcacaaaattgaatatgaaaataacttattttaaaaagcacacataacatatgatatgaattgaatactcttctttcttttaggccgatcaaatcgaagagtgttttcttcttccttcattaaagaaaacaaccaacaaactagctgctgattcttaacatggggatatcacatggccaaaaagcccatcaatcctctgacttcaaaatccacatacagagaattttcaccatcttatttaagaacagcccctttctttgatctcttgctagcttggattttttggtaaaggtttttggttctaatagacaataaaatgtccaatccaaaaccaacaatgcaggcgactgccatgaccacaaacaccatcctgtaacaatgtccacccacacaagtgtttccaccgcccgccatcggcgtagcctccatgtcatagagaattccggctaggagaccggagaagaggaatgatccaagtggaaggttgagaatcagaatgttgtatatgagaccataatatttgaggccaaagagttcagatgcagttgggacagtaatagctaatcgtatgccatagcaaattcccacaacaattgagccaatgtaaagtgaaccaggcatagcaattgccataagtacatacccaccagccattagaatctgagaagctgcattccaaagtggccttggtgtgccagctttcctgtaatagaaaatacaatattaaaaacttgttatacactcacatatgtgtaacaaaatattgttgcgattctaaagggaaatagtagttgaaaagtccaaattggcataaactgcgtttcaactaaagcattattgtaccataaatgtactggtccagagttaggtagaagttaaagcagtacttaaatacagtatcttcataaagacttggctgaaaattagggactcaattacctaagggaaaattctaatccaactgatagagttactaccattgaacttggtgggtacaaaaggaaagagatcaaggtaaaaaaaaagggacagaaacaatatataactattttgaagtatgttatacatgtatacatatgtgtagtgtttttatatttcgcatatgtaataggacaaatcaaaaggcgtgtcctgtgtggccaaatgaatttgcaacgaaatttcaactggaccacagtacgacttctatgctatttcctcaaagatctagtgcccctaagatttttctagtttcatccactactaataaaattcaattaaatataatatatgcatacatatttcgttatttttatgcattgtcaatttactactccaaacactcgttcatacaaatatcattttaaacaactgaaaagatttccatgtcacgatcataacactctttttcacatagaaaataatacaattttttgtttgaaaaaatcctacacctttaaggtcaatatatatattattcgcagcatatcttgaaaatgagaatatatatataaatataaaaagatctacgtcaaaaaaaaaaaaatatttaaaaaaagatcaatttttaataaggaataattaaaaatgaaaaagcataaaatagaccgtacatacctaatgaaatattcggagaccatgccggagataattctaccgaaaaatccccatatgctagtgagagagacaaagatcgaaacgtcggcgtatccaagagccaatccaatctgacccatattgttcatcactgccaaaccagtcccaactccacacaaaaacgacacaaacattatccaaaaatccaagcactgcaacgcctcccaaatcgtgtgctcttcaccgatcaccggcttccgcttctcaactaccaccgtatcctgagaacgttcctccgccgtaatctccggcttcagcaacggctccgtcacacgggtttcgggatccgaaccctgctccgacgaagaggaggaggaccaggcggagatgaacgagtagacagggatggcaaggggcgaagcgagtaggaccaacagaatggaagcgaaaatctgagagaagagcttgccgggattagggataaattggtaagagaggaggtagatagcgacgacgaaagcgacgccgttaaagagccagaagtagctagactcttcttcatcatcggaggcggaatctgagggtggaatctcacggagaaagatcatggcggcgatgcaaacggcgagtggtgtaaccgatagcatgaggaggaaacgggccgggtcgtcgttgaatagggcagaacagaggacggtgaagattgctgtgctgagaccaacgtaaccttttagaatccctgctactgggcctctgtttttccgaaagttacgtatacaagttaccaaaatggcagtgttcatccatgtggaactgttccctcccatgcacaaaactatgcacatctgtacaccatttccagaacataacacataattaattaattattattacatttaccgatgaaacaaacaaacagtcattattaattattacctgccagtaagagattggcttaatccgttcgctaactacaagccactgagttccataaccgacgagaccttcaagtgaaccaataaggagaatggcccatgtcggtaatttgtcggaagcgaaacctgctaaaagaccaaaagctttgccgatgtctttagcgacggagagattgttaagctcgagttgggttaagttcattagagtcttgagtgcgtcggagtagttggagaatgtgtagttgttgccggaaatggattggacccagacggcagtgacgaagcccagccatttagtggccctcgtaacggaggctgaggaagtttgggaacccaaacccattatagacgacgaatgaagcagagttccttaggcactatttactgttttcttgtttaccagtaaccaccaagaacagagcgaaacttcttcttggttttttggaccagaggcaacctcctcactttctatttaaaaggattacttttgctttttgcttttctttttttcaaataaataaatgagaagaatttaatatttgattctactgtatgacctacttgtgatccaagcgcgtgcaatagatgtcgatgtgtagattttaatttcggaaaattttgatggaaaaaatctataatacatgctctaaagtctaaattaaaaaggtccccttgcttcttttttttttttttttttgagggtaaaacggtctatatctttttttatcttggcctttaagatttcttagtttaatctttttgtagtatagtttaattttttaataaataaaaaattaattgacgtgtcaaatatagattggtttaacataatatgagacactattttttaacagaaaattttaaaaggctatttacaaaaatataagaaaatgaagatatgtttttaatattaccctaaatatgatatttttttaaaaaaaaaaaaacttacaaatataggaaaaagtcacgaggaatgccataaaaaactttaaatttgtgttttttttttatttatttaaaaaataaaacactaaaataaataaaaaaaattgatctcaactgtagatgttgtttttttttttacagaaattaaacttgttttatttatttaaactaatgtttgtttgttttttttttttgttttttttttattaaaaactaattatttcattaaaagcagcagaaaaaaaaaaaacaagtttcatcaacat

SEQ ID NO: 16648 - DNA, 4086 bp, Cannabis sativa
aataagtgagatggggccatgccatatcctccacgtcattatgctaccaccttgttaaactatcccacttgatccctaacgtgcgcatactttataatttctccataaatattttattattcttttctttaactccgctttataccagttcagtgcgtttacgtcctctgcccatcacggcgttatttctcttttaaatgacaataatacccctacaattttcttagaagggaagattttactgtatttctccggggagaaaattgacctttaacacaactttatcatcgagtctcacctccacgaatctcaatcttcttcttccttcctcatcggtttcttcttaaccctaacgaatttcgttctcaccgcttcttttttgtgtttttttttttatttattatagttactaagtttttccgagaattgtcgagttttggatgttggatcgttgagacgtttggatcgcgatttttatggcggcggggacaatggctaccgccgccggagctgcggtgattctgtatttggttttgagtcggaggttatcgacgaaagttgaagaagatgatgataggagtggaaattttacgaaatcgacgagatcgtttaagaggaggctttcacggcgacctgcgcaggcgccggcgacgtggctcgagtccattacgacgttatcggagactctgaggtttacgtattccgagacattgggcaagtggccgatcggcgacttggctttcggcattaattatctcatgcggaggcaggtacacgatcgaaaagctttaggttttctaatatatttttgttcgaatttcgtgcattttctgaaattcgtttaattctgattattgttggtatttatataatttattttgatattgtgattgcagggtaatttacacgttgccagtgtgtatgctggtagtaattctgtacggcttaaaggtcctgaaattgtttcggagctgaattattacttgagattgttgaccctttgcatattcttttcgaaaaagccgttcccggtgtttttagagtccgccggttactctgaggaggatgttcttcttcagaagcccaaggctggggtatgctaatctctttgattcgttgtattatgctcattacgttagtacaaatatttatttgatttgttatgagacattttatcgtgggagcgagtagaagaatttaatgaaggagagatgtgattggttcttcattcatatcatatggagagttcatattttgaagagaaaaattatattagtttagtggtagtctaaaaggtatattatgtagaattggaattaaaatgctgaaatgtgagaatgccaactagaatttccagttctatgaaatatttttgttgcccataatcttccaatcagttctataatatattttgggcaatttcttatttgatgctttacaaatgaattaatttaatcaacgaaacaaatgcttgcagttgttgatgcctgctttcacaattattcgtgataaagattcgaaatgctttcttctattgattcgcggaactcatagtatcaaagatacgttaacagcagcaactggtgctgtagtccctttccaccactcggttttgcatgatggtgggattagcaacttggttcttggttatgctcactgcgggatggttgctgcagcccgctggattgctaagcttagcagtccttgcctgctcaaggctcttggtgaatatcctgactataaacttaaggtaatgtcatttcttagttttgactaattttgttgtattgccttttgcttaccggatttgctgtactttatatctcggattcccatgttaatagtcttgtaaggatttttctttggttgtctattagctaactctagtgtatactccacaataaattaattatacaacatatacatttatgagttgtctttattatagttgggattttgttcaactgccactttcaccataatctactatgttctgttaacgcgttacttttgatgtttgcattttcaggttgttggacattcacttggtggtggtacagctgcactacttacttacatttttcgagaacaaaaggagttctcctcaagcacttgcatcacatttgccccaggcatgtccaatatttaaatttgattatctttagttatgttgcatcataaatggcttgatcccctataggttgtacaatattataatttgattatcttttgttatgttacatcataaatggcttgatctcctagagcttgtacaacgagtgttgtgttgctttctaaacgtgctgcatttcaacttttttcaaatttatacaattttattcaattcaattttctcctctgtaacctttgcattgtaatttttcgttttgcagctgcctgtatgacatgggagttggcagaatctgggaaacacttcattacaagtatcatcaatggctctgatctggtgcccacattctcaacagcttctattgatgatcttcggtctgaggtgctttaattgtttctctggatatgaaattcatttaattgaagttaaatttgtgtcaataaagttctgttggaatccttatatgttgattaccattacttatcaggtaacagcatcatcttggctaaatgatttgagagaccagcttgagcacacgaggatactgaatgtcgtctatcgttctgcaactgctgtaggttctcgtctaccaaccatagctagtgcaaaagcgagggttgctggtgccggtgcacttctgagaccagtatccagcagaacacaggtgatgttttgtcaagatatttctttctttctttttgataaacccatgggtatccagtcgactaatccctcagggatacccccacatccaggtcccaggtgacataggggaattagtgtagtggctgggttccaaacttggtctgcctaagttgaaccttactcaaggcacccatgccactacaccaatgccctggaaatttgtcaagatatttctttaacaatcagattctattaatgatatgcccttgatattttgcatttttgcaaggttttgtacgagactataaatgttttatttatgaaatgttgcaataaaagtgggtggttctttactttttgtttggtctttttagttgctgcacagttctgtgctctaattttatatctgtctgctcgactagtttttctatctattccatttgttctaatccttgtgcttgatggttaataggttgtaatgaagcgtgcacagaatgttgccgaagctgttgttagaacccgctcatctttatcatcatggtcttgcatgggtgcacgccgtcgaaatgtgggcccgttattgaattcaaaagaagaggatttgcctgaagtttctctgatagccgaaaaggcagaatctttggatgttggagtcattaccagagacatagttctgaacaatgcagaatctagttcttcaagtggtggatcaggacacgacgatacggatgaagaggagcagcttattcctgcagagagagtcaccacttcatctgttgcagaggacattactgaaggtgagttgtggtatgaactggagaaggagcttcagagacaggagaataaaattgacagtgaggcagaggcagaagaagcagctgcagcaaaagaaataactgaagaggaaaataaattggtcgatgctgtggagagcactacatcaatttcgtcgacggatgcatcagagaatcaccatctctatccccctggcagaatcatgcacattgttgcggtccctcaatctgattctaacaatttagatgacgagggaccccatgaagaacatgtcggtatatacgagacacctagagaattgtacagtaaacttcgactctctagaactatgattaaggatcactttatgcctatgtataagaagatgatggaaatgttaattaaggaactggaaaatgatgatgaagttattagtgtaatttgaaaagaaaccaaattaaatagtgaaaggatatgaatcacaaatttatcatttttttagtcaattattgtctattctttacattctaatcttt

SEQ ID NO: 16649 - DNA, 5990 bp, Cannabis sativa
aataatctcaatagttcagagggaatttttaacggcaaaaaaagtggtcatgatttggtatatgtcaaaatttagggaaaaaaattgttaattagacacaaataaaattctcgccattttcctttaaccaaatatattttccaattaaaaagagtttagtggatagtttcgatagaaaaggattacaaatcgtaaatactaggtaatgagcgaccagctacccaaagctaaaactttggctttgcatacttctatggaaaagaaagaaaacattgcattgatcgctaaacacaaaaacaaagggaaaccctccaaaactctaactaaaatcaaaccaaacccaacctaaaagaacacaaactcaactaccacgtcatcacattcctcaaccggtaatttggttggaacttggaacctccgcctggtttcgatatattcgagaaacccaacaaatactaaataaaacaaaaactcaaaacccatcttctcttctctattcatttcatattacaataatcaaacaaatctacttcttcttttcaacactgctaggaactgaatcaaaatggctcaccttctcaacacttctttcgttccctcttcccaagcccttctccggaacccttatctgcctcctggagtctctatttccggtcgccggagcagggctcgagtccatgccaagatccgcgagatcttcatgcctgcattgagctccaccatgaccgagggtaagatcgtgtcttgggtcaagtccgagggtgacaagctggctaagggtgagagcgtagtcgtggtcgagtcggacaaggccgacatggatgtcgagaccttttatgatggttatttggctgcaattatggtcgaggaaggcggcgttgctactgttggttctgccattgcgcttttggcggagacagaggctgagatcgatgaggccaaggccaaagctaattcctcttcgtcggcggcttctgtggcgccgccagagccggaggcggaaaaaatctccgaaaatgtgggtccagtcacgaagacgccgtcgctggtttcggtagtggcttcttcagctcatccggcgtcggatggagggaagaggattgtggcgtcaccttatgcgaagaaactggcgaaggagcttaaggtggatttggggggagttgtcggaagcgggccattggggagaattgtggctaaggatgtggaggcagcggcttcagcagctgttgagtcgacggtgacggctgcagttggtccggcacctggcagtggagctgcagcatctcctgctattgagttgggaactgtggtgccttttactacaatgcagggtgcagtgagcaagaacatgattgagagtctgtcagttcccactttcagagttgggtacactatcaccactgatgcacttgatgctctttacaagaaggtaacatgcacattttgctgtatctgtgttttttttagttttaatgttagttttttaatgtgggttattgttataatcagcttaaacacagcatgaaggagcacaatgcgttttttttactactaaaattttcaaattgatagaggttatattagattgctttgttgcttcatatttttggtaagaaagatgttgacacttctatttttttttttaaaaaaaaaaaagaaattcttcaaatctcttaatgtatttcggatagtaaatgatgagagttttccctagttcttatagctgctcctttgaggattttcatgctttattgtgattttgatatgatcctagatttttttgttattttttattggatctactttttgtttagctaactttttatagtttttctttttgtgttttctatggggagcagcattctgtaagaaaaaggctacacaattttcagtagttcaagaaataatactttccaatttgatctgatgtagtttttgtttaacaggtgaagtcaaaaggagttactatgactgctttgcttgccaaggctacagcacttgcactggtccaacatcctgtagtaaattccagttgtagggatggtaacagctttacttataatagcagtatcaatattgctgttgctgttgctttggatggtggattgatcactccagtgcttcaggatgctgataaggtttgtatacctcattgtggttgggaatgtggagaggaattaaattacagataaaattgagactctttgttttgctgtgtgttttaggctgatatttactcattatcaagaaagtggaaagaattagttgataaggccagggccaagcagctccaacctcaggaatacaatacaggtaaactgacacatgtgaatgactattaacttttaagtgtgcttagatacttgactaaagttacaagtttatgggaattctttcaaattattctattaatctaataatctaaaatatgcgaaaatattgtggaaaatggggaaggatgtatgttcctatgatactgagtcagaaaaaaagatcagtgaatcaatatgttgaagtttgtattgcatgaaaggtctgaagttgtttatgctcaagtggtgcatattagcttgtcaaaattgtttcttctttggccataccataagtgacgaaagctgcaattgctaataaatttgtacagaccatatctttgtgtaagcttaacctctggcttaaggatttaagtggtttgaatttccctgcattgcattcacagtccaagaccagggacctgctccatttacacttcctagagatcatagtcttagttttatatgtagtttcctataaatgccatggtttctttcttgagatgtgttttctttttgacatttcttgtttaatgacctaggctgtatattgtctcccattaggaagatttatttttatcttgttgactgctaggtactttcactctttcaaaccttggaatgtttggggttgaccggtttgatgcaattcttccaccaggaactgtaagtttcttattcattcatgtacattcctcccagatgcattttgtaaaccaataatcttacaagccagtggccttgaatcatgcagggtgcaattatggctgttggggcatctcatcctaatgctgttgctaccaaggatggtaggattggcatgaaaagccaaatgcaggtgagtaaatccactattattattattattactaatgtaggatcacagtgattttttctgatgctaaaaattactttgtatacaggttaatatcacggctgatcatcgtgtaatctacggttccgatcttgcttcgttcttgaaaacattggcaagcattatagaagaccccaaagatcttactttctagtcctacagttaccaaaatgagcccttttagttttccgtcgttgtttgagatctttttgagtcatgagggttggactatttatcgtgatatgtagtgaagaagcttggttgaggaaaatacatagagttaagtagtatctgtctggaagaacagtagaagaattttggagatttattcttatagatttcattttcagtcatgtccagaggaaactcatattctctatcttctttttctttttcttttggaaaacgaacacattttgtttgtaacttgtatgttgtaacaaattctctttactgctggccagtcgcttgtaaggatgaccaaaaagttctttcactcactagtcacaatggctctttaaaggcagattcttaagttcctatacacacacatatgaaggatatgatgcttcaaaactaaaaaaacgtaatataaaaataagttgtaagatgtgctatttcatttttataaaacgttgatcagagaaatgattttaataaaatactatttttaaaagaatagttgagttcgaatgataatcttttagagcatttgtgttcatccaatcttttatatttaggctctaataagtatttgagaaagaaagataaaaatatctttatgcaatttatatttaggctctaataagtatttgagaaagaaagataaaaatatctttatgcagaattgcgagtattcagctagaatggtgaatatttaaggaataataagcaagtatgtgaataaaaataggataaacacaaatgagatagtgaattatagtggttctattagagttcggtcttcttagtttattttacaagagtttgtgattagtcttattcagttcagattacctctttatatagaaattatgtgtacttttagattacataacctgtcaaacaagacattttttacattaattacatttaattaagaaagaaaacatttaaagaataaatgaaagagcaattttgaccgttcttgattaattatctgaacgtatgcaacttatgaagtcacacattgaccgttcatcttccaaacacacgaacttgcaggcttgttggtgtttatttgcgtataaggtctttggagcaaaaataacctcggggttattttataaggtagaatgcatgtgaccgtttggtcgcgtactggacatttatgtactaacatagaacttgtgaattctaggtgagttgtcgtacacattagtcacttggaccagatgtttgttaagatgcggtttgtacattagtcgcaggagagatgcccttgggcatcacacataatcgatatatgcacgaccagtgctaacttctcttgatcttgcttttactttgactatgctaggaatagtgtgcgactagatcctgtcttagtcacactgaaagtgctacttgtcaattttcaagactcaaattaccgagttgtttatcttgaattgattgatttcaacacttgcattcaagactcaagttaagaataaagcagtaaagcacacattgatttacaagcttcatctgcactgagaacacatctcagccgactagtgcttgggttccccgaaccagggtaatctcatctactaaatctcaaaagagttgtattacaatatccagttcactcttaggaatttaatacaatctttacagcaattagtaatgaattaccaacaacaatcaagaatcttgatcgcaagtacacaatcccttgtgcagcaactacgttcgtcttcgtcacttcttcaatctgaaatcccttcagatctgatgacgaggatgacactgaactcccttcagtctgaactcagtatcttcaggctctgatctttcagccatagatctccatcttcaagctatacaatcagacctgtaaaaacaacaacaagaaaagcaagacactacactaactctcccgaagaaactcaactaactgaaaatattaatttcaaagatgattagtttatagaacaacaaagactatttatatgtagtagattagtcgacctaaccacaactaactctaaccgttaagtcataacagacacaaccgaactttaacagaaggcaggtgtgcagatgtaactgactaaaaccgccagatacaactagacattctattaaaataatctgtcaaaaataacgacacttacacacaccttctcgtaagtttctgccatgcgaggttagctctactagtgacacatcatctttttctaatcgggaaccgggtccacatgtcagacatgtacgagactgtactcgtatttttaggccaaaattttgcactataacagatacccctagtttcgtgatgacaactgtttgtcaagtggcgcaactatcttgagggacaggcaaattgagttgtcacaatggcaggtgacgtttgaatgtcttactgggggttatgaaaagacagttggtaattattggttacctttacaaaatgccacatcatcaaaatccttcggggtctgtgcagatgtgtctcgtgacagtcgttcaatgaggcatcttttggtttccatatgccacgtgtcacgatcgtagcggtggattgtgattcctatttaaaccccaaatacaaaaaaaaaatgagacttctgttggaattaaattttaccaggatcttagat

SEQ ID NO: 16650 - DNA, 8269 bp, Cannabis sativa
aatacttctgtctctttattgttatttaaatgatagagattacattgaaaaagagttttatttagggcataaagcccaacaccaagccgctgtcaatgcaagattgtgtgaaaggaatgctaaacatgatatgacagatggtctcatcctctctactacacagtgggcataaactactcacattaacccatttagatggaagagaagcaagatttgggagacaatttgtaagaccccgccagagaaagttcactttctgaggcaacttcaagctccaaaacttcttccaaatatttgaattatcatgagagtaccatgtccgactactcacctacaaagctcgacatgcacttttgacagagtaagcaccataagcctcaagtgcccaaaaccaagtatcctcacctgaagttggagacagagggatactccaaattaaatcaatatccctatgtacaaacaggtcctccaacacttcatcatcccattcaaaacaattggcttttaacaagttattgactctacactcttggagagctacatgagaagaaatcacataagggttctccttacaagggatagaaaaccccagtacctaccctccatctagctcccattttaacagcagtatgggcctcaaagacactcctccaaacatagctcgggttagctccaagctcagcatcaaaaaacgaaccttggggataatatctagccttgaaaacccgagcaactagagatctaggattagtcaacaatctccaccattgcctgcctaacattaataaattaaaatcctaaagattacaaaaacccaaaccacctttatgtttgtggagacaaagcttatcccaacttttccaatgaataccttgaccttgtgaagacttagtatgccaccaaaactgccccataagcctatcagcatctttgcaaatttccaacgggatcaaaaaaacacgcatggcataagagggcaaagattggataaccgacttcaataacacttccttgcctgctctagataataatttgctatcccaattctggattctttttctcacctttctttcaaaaaaccgaaagtcacattcttgttccttcctagcacacttggcagaccaagatataaacgatgatcatcagctgctcacatgtgaagagttgacaaaattgtatgacgagtcccatcatcagtattagagctgaagaaaatcgatgacttgctcaggttcactttttgccccaacaatctttcaaacttattcagcaacttgaatacacgatgtgcctcctctctgtttgctttacagtaaagaaaactatcgtctgcaaacagcatatgagagacaaaacgtgccccatgggccacacgacaaccatgaattcacttcctctcctcatacaagcgaataggagtagagaaaccttccgcacaaataatgaatagatacggagaaagaggatctccctgttgaataccgcgagtaggaattataggacccagaatttccccgccctgcacaatgttataagaaatagtctgaagacactccctgatcatcttgacccatgcatctgcaaaacctatctgaagtaatattacttgtagaaaagaccattctattctatcatatgccttactcatgtctattttgagagccatgcagccatttttcccctgttgtttacgtcttagatagtgtaaaatctcaaacgagacaagaacattgtcagtaatgcactttaaaacttggaaatcacctttgacagtaaacttttaacccgattagcaattactttagagatgattttgtacaatacattacatagagcaatgggcctcaaatctcccatgacagaaggagatttctttcttagaataagcataagattagtgacattcaaattctgaggcattaccttcgaatggaaaaaatcttgaacaagcttgacaacatcttttccaatgatatgccaacacttctgatagaaagttgatgtcaaaccatcaggactaagcgacttgtccgggtgcatctaaaatcggcttgtcggacctcctcctccaaaacaagctttaacagagtaatattatcctcaaaatggatagaaggctgaataacatcaagaatgtcatcacactatgtccccatggaatggaagatatcagtaaaataatttaccataacttggggtaaccccgactcccattgaacccaagcaccgctatcatccttcaactgatgaatgaaattatttctccgcctagaactagcagcagtgtgaaattatttagtgttttggtctccttccttaagccaaaaattgcttcgatcttttcctccaaaaaatttctttttgatgataaatttaagcgagttattgtttcacctatttgtattgagaaatcgagttagcatctctgcgacctttaagaacaccaattctatttttacaactttgaatcctctccttaaaatttccagttaaattttttccccaaatgctaagaggaccctgaatagcagccactttatcaacaatattacgtgacaaacagtcatcccattgctcctgaattatagagaaacaattggactcccgcagccaagaattttcgaagtgaaaagccttcttagaagcagggtgaaactgaaactaggggtctaaaaataaaggcaatgatccgaagtagaaaaaaccaagttagccaaatgcgcattcgaaaacaaactcatccaagaagagttagctaaagccctgtccaaccgcaccttaatccagctatcagtacccttactttttcccaagtatattgatgacccgtaagctctaaatccaccaaatcacaatcaataatagcttgctaaaattcctcaataagaaaactaggataaggatttccacccttcttatcaccttggctaagaacattgttcaaatcccctgcaccaagggagatcatattcttctttcaaaagacgcataagattccaagtgtttcttcgcagagaacgattaggttctccgtacatccccgtgagtcgccattcatgcaaatttcgttgacgaaccaccatatcaatgtagttctgagaaaaacccagcacctcagcatcattcttatccttccacaacattgctaaacctcctccccttccctgagcatctaccgaaaagagaccttcataagccagttaagaagaaagcaactccagtcttggtttcaaacagagtgtcgcacaaaggaaaagaaaagtgagcttcttttgataaatcatatctttaaggaattgaatagtccctaggttctcaagcccatgacaattccaacttagtgtactcataatgactggcgagcccgatcggtcgagcctgccattgtgacattttttgaaagagtagtattagtatcgcccatattcacatcagaaccctccttaggcccaacaggcgcaatattaatatctttacctattcttttatgttttgagtccaaaaagagcatttcatcctctccaacatttgaattaattccctctgttgtcccatcaaaaatactgaaattctccctccctttactcccacggttatctcccatatgattactcatatatcccataataatataaggaattatttgattaccacgattctctccaagactcctggaaatcggattgacatctccattaaacacttgaaaatcagggattccattcgttctctctcacttgagaccaacccccaccggactgccatagcttctagtattggatgaactcgatcgtaaccatttagatcccatcgcatgttgtgttcttcttggcatcgccttcataaaagtgccatacggtttaacgatcgtagcaattggttgaataaacagctgagaaaaaaattgctcagtatggccaatgatcccataaataaagcaaaatgtaggcacgaactcatactggaaattaatccaaaaccagtctcctccaacatgttgcaacttcattctacatttaaatggtttttttatatcaagcccaacccgaagccacaagtagtctctctaaactgcattaaaattattctcattagacttaataaagctcccaatataatttctagcatcccgaaccactcgttccgttttgaaacctgatctgatatcatgtaattgcacctagatttcaagatgatgcaatcgtactgccctaggaacatctcctggtttcagcctctcaaaaataaggggagcatttttaatcgtccatgggctcctatcaatcactctttgaatgtctatgtcatgatagaactgaaaaatatacttatttcccccaaatccttcgcatacatacccatcccatgcttccaaagcaccgccattaagttttgcattgtcatgaaatttattggcgtatctgtcaagaaacgctcgactatattccatctggtattaacctcggcatcttcaattagtggcttctcatacctaactgtagactcctcttcctcttccaatggaacaatcgaaaatcgatccgcatcagtgtcaataaaactagaagacgtagacatcacaacaaaaccctatcggaacaaaccttaaaaactcaatacacaaaacaaactttcataccatgtcatagagataagacttatagcattttgttggttaaatcattggtcctattcatttttgtgaggatatccttaaatattagatggagcataaaatgatttctttaaaagtatttttagaattttcttaagtatccatgtgagacaagaaaggattttaccagacaaagatcttttatttaagcctgcgagaatattctttttcttctcttcttatgttcatatattatgtattatcattggagagtgttgtactcctttttctctacttctcatataatcatgatgttatacatttatacgtattttgtgttttgcttttattcctcctatttcttatttcttcaagtttaatgagaaaatatcctacacttacaatatcatattatcatctaataataaacaagtaaaaaaaaaaaaaaaacaccagtaaaaagagaaaaagagaacaagttgctcccctaaaaagaagaacatctcaaagttttcgttagattcagtatcctcccaaagaaaataataaaaaattacattaaaaaaagagagagagaatgggtgagtaacagtaacagaagtgaaaaaaaaaaaaaaaaagttgagaagaatgcaacacgtgcagaaacggccgttagcggtttcggtacctgtaggccgcaatcccaaacggcgacctggaagtagggtccacttctcttcgcctttgtgttaaaataatattaaccaaataataaatattataaaatttacgtgcccacccctctttttatgctatattatattttaataccacatttctctcttctcaacaccgaataatataaccagaaccaaaagagagaatctgaagtgagaagaaaaaaagaaagagagagagagaccacaaacaagaagaagaggaagaggagggagcttctctgcaaactcaccctcttcttatccaattcgtaaggttttctctttctgggtttctctctcttgtttgtttttgtttacttttgtttttggaaatttgttttgttcgggtttggttttgctctttctgggctgctatagtatttttccaatttcggttagtgaaaatggtgtagaaggttttttatgagacgggcattctaagatgggatctctttctttgtttcgctttgtttgaggtaaattttattactttgtggtctagatttgctggtgattgtattaaaatttggatttttagtctggttatgtggttgaatttgtcctaattttatttgcttctgtttttaaaagttttggtatacgttttctagtatgaactcagagatctgatttgcttttttttctttcttggggctagattggtttcgtgttgttttcttttcagttataattttgattggctttgttgatttaaacggggtttgttaattttggttatgaagttaggtttttgatctttttgcgttgttgcatgcagttttgaattcggattgaattcaggtggatcagggtattggctttgtgtgtgctgaacataaattaactcggtttagaacataaattagcatttgaacccttttgcatgtgaataatcgggagacgtatcttttgtttattagtttttgtccttaaccaacgaagggttttttattttgtttattttctttctttgtcatcagttgtcgaagcagagaattttaacatgttggagggtccatcatatcttgtttcaagagaattgcccagctcgtgcgagcaggaaagcaagtggatttacaatactttccggttgattgaactctcaagtaataagcgcaaactagaagatggagaagataacacattgaggaagttaagtaaggtatcagtagctcttaaagaagaggaagcatgtaaagatggtagtgattttgaccatcccctaaaggaccaatttgatggccagtatcaagctggggatccttcggatgttcataattttttggatgcccaaactgacctatcaaatggacagaatcaagctggggaatactctgatattaaagcttttcctaatcccccaactgaccaatcaagtgacaagcatctagtaggggatcattctggtattattggcgtgtctgacagacaaaatgaccaaccaggtgaccagcatcaggcacaagatcactctggcgttcatgatatttcccacgctctgattgaccaatcaaatgaccagcgagctagggatgactccgatatttttgattttacagatgcccaaattgaccaatcaaatgatcatcaccagggaggagaacactctgatcttagctcacttattcatcaacttggtagggacatttcaatcaactgtcttctacgatgtcccaggtctgagtatggctcaattgcttctttgaataggagtttccgttctatcattcgtggtggagagctctacaagctgaggaagcaaatgggtatagtggaacattgggtttacttctcctgtgccctccttgaatgggaagcttacgatccaaatcacaaccgctggatgcatttgcctaggatgacttcaaatgaatgcttcatgtgttcagataaggaatcgttggctgttggtacagaactacttgtttttgggaaggaaataacttcccatgttatttatagatatagtattttgacaaatacatggtcatcaggcatgaaaatgaatacgcctaggtgcttatttggttctgctagtctaggggaaattgccattttggctggtggttgtgatccacgtggcaatatattgagctctgcggagctttataattcagaaacaggaacttggaggactcttccatgcatgaataaaccaagaaaaatgtgctctggggtgtttatggacaggaagttttatgttattggtggaataggaactgggaatccaaggtctcttacatgtggggaagtatttgatcttgaaactgagacttggactgaaatacctgacatgttcccttcacggaatggagaggatgggattattggggcccctgctgcagcagaggcacctcctcttgtcgcagttgtaaagaatacattgtatgctgctgattacgctgaaaaggaggtaagaagatatgacaagaagaggaacgagtggataactattgggagattgcctgagcgagcagtctcaatgcatggatggggtttggcatttagagcttgtggagatcgattgatcgttattgggggaccaagggtccaagccggagggataattgagcttaatgcttgggttcccaatgaagacccacctcaatggaacctgcttgccagtaagcaatctggaagctttgtgtataactgcacagtgatgggatgttgaggtgtccaattttgtgatgttatccgtgtgctatgtggagtcctgtctgagtggaattgacaatcttcgcttttcaaggagatggggttccagctcatgggtaatctctgccctcctcttattggaaaatttcaggtttaatttagccatagaaacatttacaaaagggggcctggaggtttaattttctctcttcattttttttcacctttgttgtgttgcatctttcttttctagttaccatgagggcttttcaaaggttgggtattatgtagaaca

SEQ ID NO: 16651 - DNA, 1998 bp, Cannabis sativa
  modified_base (1004)..(1006): a, c, t, g, unknown or other
tttttttaattatataattataagtagtcatttttttaatataaatctatcttgaggctatttttgttctattattatttttagaagtattggagcttgtatgtttacaattacccgatctgatattattgagactttagtaagaaattgatgtaaggaccctcttgagaactgttttaataaaaatataggaagcatattttgctctagggtatacctcgcccctcataattagggaatattttatttaatggctgagctaattgaatagttattagttattttgaagtaaaagtacatccaataaaatttaacatggttaataaacacctcatgtaaatattttagggttggtttagtactctctattagaacatttgcaatagatagctataaatataagagtatatatatattttagttgatgtttgtaaaattaaattaaattccaatataatgtgatttgaatttggcacaaatgtattaaatttggcattataggaatgctactgtcaacctcttattacaatttttttaatcaattacctccacacacaaaatcatatactagaattttttttattttttttcatagcggtgttcgttatagttatctctctgtgtaattttttgaaaaattctaaatagtttatagtatcgaaatagagtttctcataatttattttaccacgtgtgttcagaaaaacctcaaacctattttcgacattgtaaactatttataaaaatttaaaattttataaggacgatgttgtaactataacgaacaccgaaaaaataaaaaaaaaatattacggcatgcgttttcaagcacggaggttgactaagagattgtaataggagattgacggtagcattccaagagcaatgctaattacaatctcttagtcaacctccacgcttaaaattatctgtcgaatatttttttttcatttttatagcagtatttgttataattacaatatcattcttgtaaatttttgaannnttctgaatagtttacagtactgaaattagagttcctgatattctagtttactatgcgtgttcaaaaacttcaaatatatttttcgcattgtaaattatttaaaaatttacagtgatgatgttgtaactataacgaacacctaagaaattttttgtggaaaataatattttggcatgtattttcagacacggaggttgactaagaggttgtaatagaaggttgacgctatggacattttaatgatcagatcaaaaataattaggaagaatcattaaaaaaattcattttggacaacccatgagaccttttgctgagtattattacaagaaaataggatagtttcccaatacactatgtctggttcacctaagtaaaatgacattgttgaaaggagaaattgcactctaatggacatggttagaagcaggatgagtagatcaaatctgccagagttcttatgaggtgaagcactcatgattgctacttgtattttgaatcgtattctaagtaaatctgctctaaaaatacctttttgagttgtggactagaagaaaacctagtttgaatcatcttcgtgtatgggttgttcagttaaagtaaggatttatgatcctaatttgcaagagttaaatccgagaacagcttgatatttttttattgattatccaatgcactcaaaatgctatcgcttttactatcctactcatggtatgagaattgttgaatctcagactgctaaatttctaaaatttgatgttgctaaaaatattctttcaacatctcttgaaacaggagagtcattctacgagatttttttattcatatgtcgttagataataataacggtcttattcctactccggttgataatgctctcattgctgatgaatatatattgcaaataataataataataataatagcacaaaggttaactaagaggttgtaatttgcattgctctttggcacaaactaacataagcctaatttta

SEQ ID NO: 16652 - DNA, 2381 bp, Cannabis sativa
ataaaagttatcatatcttacaaatattagttattatttgtttagaaatttttttccaaccaaatgtaagcataaaaaatcaaatttcccatacttaactacttacgatatctaatagctaattaatgaacaagtcatcatgctttatactctagtttttcactaagtcattgttggatataataatttaactatcaaaatttaaattattttttcaaatatcacaatcttttcaagaaataacgttcatgcttttattctttaaccctcaataaatttgtaaagtttatgtccaaaaattgtatgggttatttattttcaattctgtgtgcttccattttagatttgtaaaggttattaattgaagttttttactttttacgaaaaatataaaatttcaaaacagaaaataataaaaggcatgagcttgggttctctctctttcaatggcgaagaagaaaagaattctactagaagcatgttctcatatcatacccatcagatctcctttcaaacctaacagactttgatgccattaattattagagagataaagagaaaatatttctttattattctgaaaagtgtgttgaatatcacaataaatgtgttttcatatggggttagatatccaaccttagaatacacaccaaaccaaaataagaataacctaatccctataagtataaccaaacatgaaaaagaattatttaatacttaatatgccccctcaagatgatgtgtacaaatttgtgacattcattttggtaaataaacccttaaaattggatgtaaaaagaggcttggtaaggagattgacaagattgtgtttagtgttgacgtggagaagcttcaactgaccactttgaacctattcagggacgatgtggcaatcaatgaaagcctagcaaaaacacagtcaaaatttatgaatgcggtgaatggcaatctaccctctctcttggaggcatgcgaagaagctcagttggaacctcaatctagccaattctacatattgagaaaatcttgggctgatgaagctatcgttgtagagctccaatcaaaatcaaaggacatgtgggccaaattaatagagaaggttcccccaagtgctaagaatggtcaggtatatgctaaactagatcttgatgagattgaaagtgaaataaattattagaaaccgactatagtgtgtttttgtaatgggtgctaatcccccattaaaagtgtttaaaggttttactaaacttgtttggggcaatctaggtttggaaagaattgctaggatgaataatggtgttactttggttaaattttttgatgaggtttctcttgtgtggctcatttcgataacaagcctgtgattatgcgaccatggagtccggatttggatgttgccaaattgaataagtctgttcctgtttcggtgaaaattcatgggctaggtctaccttattggggtatgaattatctcatctctcttgtgagcacaatcagtactctaattgtggtggatcagattactaaagactgttctcaagctcaatttgcgcctgtcttggtggatatatagattaaatagaatatgccttttgtgattaattttgaaaaggaatgggggtgtcttgactcagcccctattgcttatgaatggctccttactaagtgctcgaattatggaggctttggtcattatggagatcaatgaaggtttgggcacataaggcaaactaagaaaacagtggtaattgatgagaggaagaaaactgtctctaaagaggagatctgtaacaccctaaaattaagaaatggattagcaaaaccctaattagataattatgaaaaactgaggaattatattattatagagttcgatatatgtgaattaatataaattttatcatgttaagaccccgttggtgagcgaggggcattttagtaattatgacccgagtagggtaaaatgatgaaattaatttgattacgtgcttaatagaactatattattatatagtatgcctatgttgtcttttttaggtgtgttttgacaggttggcgcagtatagtcatagtcgggtatttcgggccgaactgggttcgggcctgaaatgtaaattgaattaatttatttggctttataatttatgggtgataatctaaaattttatttgaaaattattgagtatgaatttactagaatgcccttgtatgtgtgaataggtggaaattagccataggggcaaaatggtcatttgacctttattttctatatttggtaaaagctcatttttgagggaggtaagtcaattgttgaataattgcttgaaattggttgttgattggagctttggagttgtgaattcttgagcttggagttgagg

SEQ ID NO: 16653 - DNA, 4896 bp, Cannabis sativa
atgtataatttgtaattttgcaagaacttatataatatggttaatatttagtttattaattaagaaatttgtgtaatatataatttaaaatttaagttttaattaatgaaatgtataattttattttatgtattttttggcaattaatttgttgtcaaaattatttagtaatttaagaattgagttacacacttacacttatataaaagagattaagtcaccttttataaattactaaaatcgaaaaaattggacttaattatttttttgtaaaaaaaagttattgtactttttttcaccataaattaaattttccttaaatttaatcacctatcaaaatagcttccaaactagtagggacaaaccctccgcgggaaatacggtcaggaatagaaccagaagaacgagctaaaaaattagttgcttggttcctagaccgtttaacaaaattgattgaaattgaaaacaaaacaaaggactgcataagagcaatgtcgtcctagataattaggcccacaggagacaaaaactgtttcttcttttgaacggctagcttgaaccagcagcagagaatctaactccaatatcacaccagcaggcacatcaccgtccacccacttgcttttcacccaactcagagcctcctttaaagacatagcttgtgccataaaaaaggtcaagttgaccgcaagttctaacaactgaagcttccatgaacacaacttcatgattccgagcaatctaacccaatccgagactattatcactataaaaaatagcagcatcgcaattaacctttatctcaccaatacaaggtttagtccagtgctcattaacagttgtattcagaccagaaattttcaatacaacaccttttcaagctgagcaatttttcaagaatcaaggtaagtaattgcagcattcaccaccctctccacggacataatcttgttactctgaaccaaatcattaagggcacccaaatgcctcagagtatcatagcaagcttatcaatatactccacgagatgagacttacaaaaattatcgaactagctacaaaaaatagcaccttcaccccctccaaaagaaactcccagacccctgtcgatgcaggcttttgtaaaagagcagctgaccataatatggaaaatggtctcatcctccctttggtcaaacaagtcctctaacactccctcgtccgattcaaaagaatcaatttttagtgaataattgttgaccctgcaatcatgaagagccacatgagtagagataacatacgagttctccttgcatgagttgaaaaaatagtgtgataggcccaacatcaatattagaattcaaaaaaaaaacggatgacttactcatgttcaccttttgccccgacgctctttcaaacttgttaagcaactccaagacatgttgtgcctcttccctatttgccttatagtaaagaaagctatcattggtaaacaacatatgagagacataaggagccgctcgagccacctgacaaccatgaatccacttcctctcctcatacagatgaataagagcagaaagaccttctgcacaaataatgaacagatacggagacagtgaatctccctgacagataccccgagacgggatattaggacccataatttctccaccatgaacaatgttataagaaatagttcgaagacactccatgatcatatcgacccaagcctctgcaaaacccgtctgaactaaaatagcttgtagaaaagaccatttcattctagcatatgccttactcatttctaattttagagccatacaactattttcacatgttgcttacgtctcagataatgtaagatctcaaacgagacaagaacattgtcaataatgagcctttcaggaataaacgcactctaaaactatgagattaccttcgacaataaacttttgagccgattagctatgactttcaaaataattttttataaaacattacaaagagaaattggtgtcaaatcacccatgacggaaggagatttctttttcaaaatgagaacaagattaatagcatttagatctcgaggcatgaccttggattggaaaaaatcctgaactagcttgacaatatccttgccaacaatatgcctacacttctgatagaatgcaggagtcaacccatcgggtccaggcgacttgtctgggtgcatttggaagatggcttgccggacctcctcctccagaaccgactgtaacaaggcaacattgtcctcctaatggaggaaggttgaataacatcaagaacttcagcacattgcgtccccattgagtgaaaaatatcagtgaagtaatttatcattatctggggtaaccccgactcccattggacccaagaaccggtttcatcctttaattcatggatgaaattattcctttgcctagagctagaagcagcatggaagtatcttgtttttcggtcaccttccctaagcaaaaattgctttgatctttgcgtccaaaaaatttttttttgatgataaatttcagcaagttgttttctcacctccttgtactcaataatagaagcaacatgatccaaccggcctttaagaactccaattctggttttgcagctttgaatcctctccttaaaatcatcagttaagctctttctccacacactaagaggaccctaaagagtagccactttatcaacaatatattacccgacaaacaagcttcctattgctactagataatagcataacaattagagtctctcaaccatgcattttcataccgaaacaccttagaagctgcctgaaaatgaaaataggggtctaaaaataaagggcactgatctgacgtggaaaaaactaggttagtcaagcttgcattaggaaacaaactcatccaagaagagttagataaagccctgtccaacctcacctcaatccaactatcagtacctctactctttttccaactaaacgggtgacccacaagctctaaattcactaaatcacaatgtgagatagcttcttcgaaaccctctataagccaactaggataaggattgcaaccctttttatcatcttgactaagaaaattgttcaaattcccaataatacaccaaggaagattattttcttctttcaacaagcgcataagattccaagtgtttctctacaaagaacgattaggttctccatacaaacccgtatgatgcaaagtttgagaattaccttctcacaccaccatattgatatggttttgagaacaactgagcacctaagcttcgtccttattcttccacaacattgctaaccctcctccccttccctgagcatcaacagaaaagagcccttccatagcctagctgagaagacagaagctccaatcttgctttcaaacagagtgtctcgcataggaaaataaacgtgggcttcttttgataaatcatatctttaaggaattgaatagtccccgggttcccaagcctgtgtcaattccaacttagtgtactcataatgactggcgagtgcgatcggtttagcctgccattataatgttttttgaaacagtagctttagtatcccccatgtacacatcaatactctccttaggccaaacaggcccaataaaatttccttgcctattcttttacgtatggagtccacaaaaactattccctcctcttccaaattttaattgacaacctctaccgcctcccaccctttactctcacaattttctcgcataatatcaggagataaatgaaagccacaattttctccttgacttgtgaaaatcgggttgatagccacattgtgtccctagaaatttgagatttcactcggccctgaccgactgagatcggccaccaccgtacctccatagttagttgtaccaaacgaaccaaaccgaagtcatttagcccccattacataatgtgttctttttggtttcgccttcataaaggtgccatacggtttaacaatcatggtaattggctaaataaacaaacgggaacaatactgctctgtatgcccaataacccacaaatggaatagaaagtcgacacaaactcatactggaaattaatccaaaaccaatcgccaccaacctgctacaacttcattctacgcttcaacggtttttcgatatcgagctgaactcgaacccagaaatagtctctccaaatactattaaaattattctcatcggccttaataaagctaccaatataattcccagcatctcgaagtactcgttccgctttgaaccctgatctaatatcatataattacacccatatatcaagatgatgcaaaggtacatcccgagggacatctcttggtttcaacctttcaaaaatgagttgagcattcttaaatgtccaaggactcctatcaatcaccctttgtatgtctatttcatgataaaattgaaaaatatatttgtttccccctaactccttcacatacacacccatactaggcttccaaagcaccgccattatgttttgcatcgccatgaaatcgattggcgtatcagttaaaaaatatcccacaatgctccatctggtatcgacttcagcatcctctattagtggcccttcataactgactgcaggttcctcttcctcttctagtgaaataatcaataaacgatccacattagtgtcaacgagagtagacgacgtagccataaaaaaccaaaagcaccaataagaagtacgcaaacacaaagcacaaaagaacaaaactttcacaccatgtcacaaagacaagactatgtataaatgtatgttaatttctcaatagataggtatatattttttgagagtgtgaattagccaaaaaaaatattaatgtaattagggttcgtttggaacgtcgtattaagtcgt

SEQ ID NO: 16654 - DNA, 7236 bp, Cannabis sativa
ttattattattattatgtatttaaatgtatatattgcaacataaggaaacttcctaagtcgtcccacgtgcttggtttgttgttatataaaaagatcaaattgcatactcgtcattgctcttattaaagtattaattcatgaatatttaatgcaaggaaagtacaagtcaatttcctcttggataaataatatattttatgtcgactgaaattaaacaatattatcatatcatattagtgctaatcctatacaaatcattttaaagccgcaaaattctttccctttgtagtcaactacactttttaaaccgtttctctttaaatatttacagattcgcaaagtgacacttattttagatgactaattatagacttaactattatttatacatttaacttcacattataatgtgatatttatatataaaattaaaattgatgtggcctttatttgaaaatattcatgattggtaggcatgatgtagtttgaatcacctcaataaaaaattcataattaaatttaattacacatcatgatatatactttaggtatgtaaattaagaatttatatatcattacttattttatatgcatagaagtatgtgaagtctacccaaatttatactcttttcatctacttgatatttctttttttcttatctgaaaatggaattaaaaacaaaattcttctcccctggttctgtgctgagataggagtgagaaaattctataaatgagttaggtttagtattaaataaaaggtccttatttgcgtgcaaaagttgatttctataattctattgtaaaatatcaattccaaaaaagtggggtccccatgtttttgagcagagataaggaagacattgattctttcctggtctatataagagagaaacaacccccacaaccaaaactagctctgtttattcacagttcacattctccaactccataatcccatacctacccaatattctctaccttacaaatatgacatcttcctactacttgagctcagactcatcgggaactcgccggaaaagtagccggaaaactggtctgagaaagcggtgtttgttaatggtgaagcaacagaagacccgattttacatccttggacgctgcgtttcgatgctactttgctggcacgatcactccatatcagattagcttaaatccttaattctaagcctatagctaaagctgactatattgtctcattggggattccatgggaggtaataggagtaggagatgagctttcttttgggatcaaagattagatttcttccggcatagaaaacagagaagcatataacgtttgtatatatatatattggatctttgttactctgtaatatagatgagtttctttttggtggttgagaaactattactagctagtatgtaattcagttcctttacaatatgatcaatccatgtacatacaaaatttctagttattcaatttaaagaaagagaaattgaaattcagacattcttggttcttgctatactttctctttgactatttttacttaatataatttgtttgtttattaatgtgatgcccgatttcatttaggataaaacaaagcaaggaagacaaaatttcttattatataatggggtctatccaatatccatattacccaagaatacccatgataaatatttgatctataatttttttcttttttctttttacaaaaacatgaagtgttaaaaaaaacatacaaatgtaaatttcttaaattataatgtatgattgatcaaatagtgaaaaagtactctaatacaaataagaggtattattgtcttattaaattatttaatatcattaaaataataaagactctaaatgagtgttcaagtaaaacacattaagataactctaatattagttttagttgtttggggttcgattaaaagataaggtaaggaaatgtaaagggccaagtaagtgtttgcggctccaaaaagtagaagcaaaatttgttttatataatttatttttctccacttgcgttgcttttggttatggtccttatggatacttgttttggattgagattgagaaatggaggtcatggaagggtggatggatatcggtggtggagaaagattgcctcaagtttgctaacatacgacaatgacaaccatgttgtgctttaaatttaatactaattatccaaatagacaacgatggtaagttgtattaataaagccatatcctttctgtccaaatccacatttagtttaaacagaattgatagagactagttttgcagtttgcaccatgattgaactgattataatgtgaaaatgattaaacaatttatagttggattaagttatgttcaatttaatcttctacgtaattgctaaatactctaagattagacactaagtaaaataatacaacacacaataggtattccaataactcgtcattttacttgtttgctatatgagaaagaaagagatgagtaatattttcttaactatttaaatatataataatatttcttaattattattattttttttttttaaaaaaaagttgtcatttctttatctacaaaacaatggattttttttttttggaactttgcaatccataaccatatttctgtttcgttcttttccaccttactaaacaaaaataatctaataaagatgtacagcctttttccacattctttaattcattattcctccaatcgtaccaaagaagctattaaagtcagaatataaattttctcaaaaagaaaaaaaaaacagataataaataatttagtataatgtttctatatatgtacaaaaagtcaaataataaataatttgatataaaatacatgaaacaaataaattttttaatgtaaataattaaatataattttgagcctatatagattttagtcatatttaagggtagacttcacgttaaggatcttagaggattaaaatcttttgcttaagtccattgtcactcattttgtacccaagtaatcaactataataaataaaaatacataaataatttagtcactattatcccaataatattatatcaatctttcttttattgttttaaaaaaattgtattaatatttcaacataagatattaattacatttttaaaattatacaataatttgttttctttagttttttgacagttttttttagtatgttgaggaatacatcttttttatatcaattaattaaaaatacattcatattatatttcgttaaaatttatttatttttatgagtggattgcttaatatactactgtcctacacttaagtgtagcacatgatttatattaatctaaggggtataatggggatatcatttagaaaagtaggtatattttaaagaatatgaaaaataaaggtaaaaatgaaaacaaataaaataaagtaggtatacgtaatttctaattttttttgatactagacaaaagagtccagtccagtccggtccggtccggtaacaaattaggtccaataaagcccaagaaaagggcccatacaataattctgacttcccaccttagccgcctcctccactccaacgcaattccctctctgcccaaccaaccgccggcgccgaggtcatctggtgaagaagttgctttctccagtgacacaatttctctagagaagaagaccgactgggctctccgtcctgttttcgctcttcaccgagactctgctagactctacaacatcatcgacttaatgttatacacttttgttgcagattcagttcacaaccatttttgttgaatagcttacgtacaatgctagacgaaagtaaatttgatttgaatttgaagttgtgggcacttcgaatacctcgccaactttgcaaagctgccactcgattactaaatgggttcgcctctttgcctaatatacagttcctgtaattatttgttagaagaatccattaatttatttttctgccattttatttacagctacttgctcgataagcctcgtgttaagcctattactgaagacccaacatgtgagaagaaccgttacatgatattgtctgaaagtgtccaaaactctggtaaggggattttgaactgtttttgtaattatatgtttatgaatctgctttgaaatttcagtttctataatgtttattagtatgaagatgtttaacttgtcttaagggttcattggttatatgtaacaatggtttcttttataaaaataaaatgaatatgagctccatctgtagagattcgtgaggtttcatggtattgttgggtctatgtaattgtttatttagttcgtaattactgtagtaaagagccaaaatgctgattttagttcatggtatcaatcatcgttgagcttgactggttgctcgttgttaattcttaaattgtagtcaaagttaattcatcaaataaagtagattagtcaacttttaaaatggataaatcacatgtggtgacattaacaaaattttcttgtagattatttttttttttgcataacatgattattggttgcaaaatttatgtatatattgtttgcttttgaggcagatttatctgatatccccaatgacaaacttgaggagctgagaggattgtgcgaaattgatgtagttccatatacattgacccttggatattcatattggggtgcaggttagtgaagctaattgattatattttctgagatatcaatttttattcggtttctactgtcataaacttgattttcttttggacttgtccttactggtatagaaaagaaaaataaatgtttcttcattctaccttgttgtatagtgaagcgtttaaagaaaacaggagatgtttaaatttcaaccaggcacggttttatgattagaaattagaatgttaaatttagaatctggaatgttataaagtgtcattggctacgctttttatttaccgagattatctgttgtcagttttttggaattatgatcatgacccttgtcacatgcgagggaaaatccttgctaataaagaaagataccaaagacaatccatcatgcgtatctgctttagaattatctttctgcagtaaagtttgttttagaaagtgggctgtttgatgttctgtatacattaagatgtcattccagtttctgcctatttaagatgtttattctagtttctgctttgattatttggtttgcagatcatatcttgaagcaaatactgcctgctggagttgaggtgccttcatctttcgaaacaatagttaagtatttacgatattctttattgaaaccttttctcttctgtttatattcagcttagcaatcaaaacttttttactgtagccagccaatttgagcattttaagatttttattttgttatgctagtaccaccgtcaatgttacttttgttttatttaattttatctgcaggtggaatagcgaagctcatttgtgttgcttgcttgtacttgtgcaggtcacattgcccatctgaatatccacgatgagttacttcccttcaaggatgttatagcaaaagttatatatgatgtatgtttccatcacttcttctgactttacatctttacaaacgttttctatttttgtgccactgaaaaagtacagcaacatattctatacggttttgtgtagtttgctagtgatagagttatcccttttttaattgaagaatatttgtttggtattggcatcattctttgcaatgtgaagacggactttatcaaccaagagtttgagtctcttttactattggtgtctaatgttgttttcgtctctcttttagtcatgagtcataagcacagttgatactacattttctgtgcttataatgtgtttgactttttttttgttttgtaatgacagaaaaattatccaagaatcaaaactattgttaataaagttggtacaatctcaaatgagttccgcgtgcccaaatttgaagttctagcaggagagaatgatatggttacagaagtgaagcagtatcgattgactttcaagcttgattatggcttggtgtactggaattcgagattggaacatgaacacgctaggttggtttctcaatttcaggcagggcaaattatttgtgacatgtttgctggcattggtccttttgccattcctgcagcacagaaagaatgcatagtctttgcaaatgacctaaatccagatagcattcgttatctgaagattaatgctgaagttaacaaggttgatgattatgtctgtccttataatactgatgcaagaaaattcattgctcaaatgatgactgtacccgaagagatagaattgaaccatatctctcccttaaaatcaagtgaacagcagaaggagacggttatcaatcaggaatcagaatcagaatgcagcaaagtaactggtaatatgttttatgagtacaaccttctggtaggtaaaatatattagtgcacacgtcaagtaaatcttatatgttccttgcagttgaagtgaaagaattacaaaatggtgctgagggtaaatttgagagtgtagaaggctcaggtaagactgtggatgcttcagtagttgcagttaaaagaccttcagatgattgtcaagaaggtgaggatggtacaaacaggacttactactagtgaatctatgctattctcttaattctatttcaggtgtatatgtcatgcttaatatagggtgcatttatgaagtttaaaaattgctttgttacctatcgaattattgttttcctgaccaaaaatgctggatttacagtcttaaccatatgtatctgcaggaaatggaagcctttgtagcactaatacttctcttgctggaacaggaaaaggaaaaggaaacaagaataagagattacgaggctcaaaggttgttggcgtgaagacttgggaacatgttgatcatgttataatgaatctacctgcttctgctcttcagtttttaggtacagatgctctgcactattcatcatttatctagtggaacatggaacccttaaattctatcctcacaagcttaaaataatagaaccaacctttaattgttttttggtcatcagatgcgtttaggggcataatacaaaagaaatattggaagggtgatcttccttggattcactgctattgctttatacgggcaaatgaaacccaagattatattatatcggtaagtaatgtagcactcaaccatatttattatgttatgtaa

SEQ ID NO: 16655 - DNA, 4194 bp, Cannabis sativa
acattccgtaaaagtacatcacggtacaaaatcagatccctatatataatatatataaataatgcacaaaaatatatatatttattttattaaaaattagcatttttaaaaacttttatgaacactgcttcaataatactcacattttattttattttaaatataatatacatacaaaaatttcttaacccattattactcaaggctggccaatcttgtatatataataggaccatatagagattaatgtatgggggcagctgagaaactgatgtacggccaatacttaaatctttttagttgtttgcactttagtatttatattttttctggtcataatacaaaaattaatattttgttacaaaattagtttaacaactaaattttttatattattactgaaaaaaagaaattaactattaaagtgcaaccattaaataaaatttgaatatcattgtcacaaatattctatatatttatatccttagttccttttacgctttaattattaattcccacgatgccatgcataattaattagtggatatattatttatttatatttatatttataaggaaaatatataagaaatactaaaggatattaggtgtttagtatttttttttatgtgttaatattcttattgattcaattaattatattaagtttcatacaatttaatataataattttaatttaaaaaatattacaaatcaattacaaaataatatataagaattattagtatctgaaaatatatatatatattcatttggttattaagaatgttttcctttgactatttttacatgataattaaatgtagttttttttttttttgaaagagaagtgcaaatccctattttgaagttgggtgcacatgcatgtaataaatttttgacacaacatccaattgatgaaaaagccctctttaccattttccaatttaggaccacaattaatgctattttattacctttagactctgaatgtacctacgcacatgttcttattcatttgaagtaatgggagtattgttattaggtattagtgctctctaaaattattattattattattattattattattattatattgtcatgtgaatttaattttaatttaaaaatattattatttagtatttaaaagtatttaacatcctagtaaattatgattgatataatatttcataatagttttaggcactactacaaacaaatgtaaagatcactcgaatcttgttttgagtatatagcgggctatgtttgtgtctattcttattaattttagaaaatactacaatttttttttttaaataaaaggctcaaaaatatttttttatgactcactatattttaggacctgccttgcccatagtacctaacaaccttaatgggattattattattagtacaatttaatatctagtctaattacttattttacataaagattaaataatatctaactaattataaggcataacttgataatagtattaaacaccttaatatcatataataatgctctttatctctatatttagatggtcattatgacacatgctgagaactaaaattaagtaattgtttttagtaaaacaaaaaaaaaaagaggttgatgttttgggggcttaattaggtaattgatatatagctaattatataatattttatgtatatatatagaatatagtagttaattgatttctgttgaattggatgtgggcgcaggtggttgccattgcaccaaacattccagctctttacgagttacactttggggttccaatggctggtgcaatcctctctgctcttaattacaccctagatcataccacattagccaacatatttctccaactaaatcctaaattcatttttgttgactaccaatttcttgatcttgttcttaaagcattgcactctctcacacaaaatcataatcatattaataaccatcaaccaccaccaacccttgtccttattccacctaatatacaatcctcatcatcttcttcttcatcttttaatttgccacaaggttccttggattataaccaattgcttgagttagcaccaccacctcatcttcataagtttgagatagtacgacgaccaaatgatgaacgcgatccaatctcagtgaactacacttcaggctccacaggaaaccctaaaggagttgtgtatagccatcgagctgtgtatctcaactccatggcaaatattatcaacatgggcatggctaggagtactattactagtactactagacatgctactgtctttttatggacagtagacatgtttcgttgcaatggttggtgtttcccttgggcgattgcagccattggtggaaccaatgtctgccttagaaacaatgacatctccgcagatgtcatattcgacgccattactcaacacaaagttactcacttgtgtgggaaacctacccttttgagcattctggctaaagcatcggaaaataataagccattatcatcgagagtggagcttgtggttgcaggaacactcccgtgtgagcatgttatgaagaaggtgagcgagctagggtttaacataagcaacggttatggtatgactgaggctcttggtccaattattatcgaaccatggatacctaatgataatgtaaaagcaaaacacgaccaacgtttaaggagtagtgttataacaatggaaggattcgatgtaaaagattcaaaaaccatggagagtgttccaaaagatgggaaaacaattggcgagatcatgttaagaggaaatactttgatgtctgggtatgtaaaaaaccctaatcataataacaaagaaagtcatagtggtttcaaagaagggtggtatagaacaggagatgtcggagtgaggcacccagatgggtatgtagaaatgaaagatagagccgtggatgttgtgataagtagagaaggccatgttgtgagcacactcgaggttgaagctgtgctgttgtgtcatcctcttgtgtcggcagttgctgtggttggaagaagattgtgcaaagaaactaatgatgctaatgagcaatgttcatcaaatattagtagtctttgtgcttttgtcaagttgaagatagagaatactaatactagtagtactattagttctcaagagattattgagttttgtaaggagagaaatttgccaagttatatggttccaaatgttgttatatttggagatttgcctcttaatccaactgggaaggttcagaaatttgctcttaggaacaaggtcaacaactccaataatggtattatattctaaatttatcatatgatgacgatgataagaaaattatgaacaaattattattattaatattctttgagcttttgttaacaatattcaagctgttcatttatattacatactaggtagttgtaatttttaattaattaatattatattactatagtgattttaattaagtgatgattataattatggtctttcaatggaatagtgtaactcttataaatcattactactacgtagtcaagtcttgatgagactgaatttttaatttaaaaaaataaaacaaaatatttttttattcaagaatacgagatattatattgcactaaaattgagttacaaagtatcgagtttctttcaaaaaaataaaaataaataattgtctaatcaaagagtatgcttagacaatttacaaatcacgatattaaaattatatgagctatggatccgaatcccgacccagacccggaccccaaacatggacccaagccccgacttggacccaaacttagaccctagaccttagaccccgacccgaacccaaacctggaccccaacccgaacccagacctggaccccaacccgaacctatagatctcagacccggaccccaaatctgaaccccggacccaaaactagacctgatctggacccaaaacctagacttggatccaaacccgaacccagacccagacccaaacttagaccccggaccccggacacagactcagacctagactcgaatccggaaccccaaaccttcaaaccacgaccccagacctagacttcgaaccctgccctgacccggaccccgaccctgccctgacccggaccccgaaccacgtccctcactcggaccccgaaaccaaactcgaacgccagcccaaaccc

SEQ ID NO: 16656 - DNA, 18067 bp, Cannabis sativa
ttttgagtattttcaataaaagtttattgtcaaaaaaaaaatatatatatatatatttatttttattttaagaaaggtagtcaaaatattactaagacgatgtcgttttacattgaatctttttaaacgtgtaattacaagattgccatacgtttgtccaaattatgagtcacattctttaaaatggatatggtattctcttttgtattttttttttttttttataaattcaaaatatataattaagaattaatggactgagagagtccctcccaaaatctacgacaaccactcatttcaatcgattttgcaatcagccaaatccattctcaccctctcttcctctccacccagaaaaaatagaatcaaaattcaatttttatttttttaaaaaaaaaaaattaaaacaaaagtataatccatttgagaaaggaaaatatgtacagtcctccatttttctacaaccacctactacttctactcttctttctccttcaccaaactccatggttaagattacagctgttgaataacaccattactaatctcctttccttctcttccccttaacaatatgactccctctttttgtttatcttcttcaaaaaacactacaagcattgaaactcaccatttctatcttcttaagcatcgttactctcttttctgccatgaaactcaattgcccagaaaagaaatcagttcattcaagccttacaaaccatttctcccaaatttgaggcttaaaagctcaaactttattcacacttttgctagtttatcctcttttgcagaagctgaaggtggggaagaacataaagaaggaataaccctcaacgatcatcatcataaccatgtcaaagaagttgaagaagaacaaaaagaagataacttgccaggaatggctcaagcttttcacatatcttcaaacactgctaaagccatttccatatgcatagcctttgctgctcttactctacccttgttcatgaaaactctggctcaaggtctgaccttgaagaccaaaatgttgtcttatgccacccttttgtttggattttacatggcttggaatattggggccaatgatgtggctaatgccatgggaacttcggtgggttctggggcgttgagtcttaggcaagctgtgttgactgctggggtgttggagttctcaggggcattgttgatgggaacacatgttactaatactatgcagaaaggtattcttgttgctaatgtgtttcagggcaaggattctttgctctttgctggcttgctgtcttctcttgctgctgctggaacttggctccaggtatacactgtggttttcatttttagaaactcaattgttgtattgtgaaaagtttaatgatggttctggtatagttaataggattattgatcgatcaaaagcatgaaaattaaatcttaatcaactaataatgtgttgtgttacattgtttggatatctattttatatacacatgtagtgattacattttatttgtgtttggatatcaaatcataatttgtattgttatgtttagaaaatagtttataattacatgataattaatatttagtaataatttcaaattaaatagtaatcagaattaaagagtgtaattagtatactttaatcatctttaattatgcagttaatgaaattatcggattaaacaaatatccaatttagtaattatttagaacaaaatagtaattttgtgtcaagcaaagttttgtttttgtatttttaggagagaagcaatgaaggttaaaataacaaaggtaattacattaagcaaaaagtggaagattttcttccatctataaaaattcattgtttatcctatgggcatacagaaatacggcagaactagaccataaaatcttaatattaaaaaagaaaacttcaaacttgagagttgtgacttctatcccaccaataaaacacctacaaaataaagaagaaaaaaatgattaatatcaattatttaattaaatacaaaaaacttataaaaatattgtcacacataattctatgatgtaaagactaagacttatttgtgcttgtctccattactaaaagtgtctataaacttatttgtgcttgtctccattactaaaagtgtatagtacatcaatattttttttattagaccatactggtcgtacaaaatcaaaattatccatactgaccttacaaaattaaaactatccatattcctggtacaaaaccaaaattagcaaacctagttttgttaatccatgatgttctctaccttttgctacatctgattttacatgctaggcacccataatatcataaagtgagcatgcaaagaaatatttatattatatatattgttgatttgggagaaactttaaacaaatcacacaaaagttggtttgttgcaaattttcaatgcctgcttgccttggattataataaacaacattacactagaaactcgtttataattgggtgcaatgcagttacttgtgcttttggcctatcttcatttgaccaacgttattttttattcctttggcccttgttaatttcaactgttaacatcccacttaagacaaaatggttagttaataacgaagtcccaatgcaaaaaatcaattagatatctttgttagtgtagaatataataaagaagttaaaacatgaaggatttgatgctagattgcaggctagtttgagaaacaatctgttgcaaaaggattaagaacaaggctatttgaatatcttaatagacaaatatacataatttgatcctgcaaaaagggttaacaaaaacattgttttacttaatcaaatatagagaaggtttatttgatatcatgtagaaatccaaaacatctttaagtatttcttagagtttttgtttgaagtaatcagtgtcttaattttgatctaggtagcatcatatttcgggtggcctgtctctactacacactgtatagtaggatcaatggttggctttggacttgtctatggaggatccggtgcagtcttctggagttcgttggcaagagtgacttcttcgtgggtgatctcgccattaatgggggcagctgtgtcgtttctcgtttataaatgcatccgaagggtatgttgttttctattccattaatttgttcatgaagatataaacggtttggaaggaactttaggaatgtacaacgcattttcctatggcaatgtacaaagtccatgcctaagacttgaaaagtaacaaagccttaaaaataagatactttctaatcctattgatgtctttcttaattttctttcattcccagtttgtatacagtgctcataatcccggagaagctgcagcagctgcagcaccaattgcggtattcatgggagttacaggaatctcatttgcagcctttccactaagcaagacttttcctgtggctttggctcaggctctagcctgtggaaccgcaggagcagtcttagttgatagaatcatccgaaaacagcttggtcctctcatagaaaaggcgcactcatcagaagaagagtccaaagaggactcttcacaaaacaagtctataggatttctctctgacatagccggtccaaagggtacccaactgaagatagtttacggtgtgtttggatacatgcaaatcctctcagcctgcttcatgtcatttgctcacggcggaaatgatgtctccaatgccataggtcctttagctgctgccctttctatactccacggcggtagcagtggaacagaaattgttattcccatggatgttcttgcatggggaggttttggtatcgttgctgggcttactatgtggggttacagagttatagcaactattggaaagaagattacagagctaacaccaactagagggttcgcagctgagtttgctgcagcctcggtggttctattcgcctcaaaactggggctaccaatctcagccacacatactttggtgggtgcagtcatgggagttgggtttgccagaggacttaacaatgtgagatcagaaactgtgaaagagattgtcctttcttgggcaataactatcccagccggtgcattgttttctgtaatctacacatggatcttgaccaagattttaccttctgttttatgagattatacaagtttgaacattggagtgatggacatcatatgcaacgtggttaattgaaaaatatccacctttttttccaaccaattcttttttttttctccttttcatttggtaagtatgatttcctctgttggaaatctatgttatcaggaaccaaagtaatttttaacttaattcctgtctagctttttcagtcatccttttcctcttatcatttctagtacctaatgaaatttataattatggaaagtgtgtttgagattttctggaagatatgtatgcatgcatgcaaggactgaactcgttgttttgttgtgaaatctgcttaactagatacgtggtaaagaacaaaatagcagaagttcctaatataatattgtctttgtgtggtacaataatattcttacaactgatatataccaaatttatataatagaagattaaaagggtggaatatactttttgttaatccttatcaggttgttcccacattctttgttgggatatctgtacgatggcttctaaaattttcttgttgaaacctaaagagacatgaataatttatgttttttgctgaattcttggccagattagaatggaagctacatattttcaaatgaagtacaacagtttctaattaatcattattcagtgagaaaagaaataagaacacatggttactgcaacccaatgattctctataccctcttgtacaaaacacgctgtctactgagaaaagtctgtgaactcgcgaaacaaaacaaaacaaaacagaaaagaaagaaaaattgtagacataatataggataaatttgacagcaggtagttgaaactattagcactgcatagtggaaacagtgcattatcattttattgcagtgtgacaaagcaatccaactacttagtacttaccagatagaaccaaaatcatggagaaagctcttgtacagaagttaagcttggttcccacatgggtcctctgtatgctcttgactttggaagtggaggtacaaaaggcttcctttttcttatgccttttactaataaatttctagacaacttttctttggaagcatataattcttttgcagaggaagcagattcatcaaagttagttccacctgaatcagttattttgacatctcgcatctcctcatcatcacctcttcctttcaatttctctggatgttttcgcataagtttctgtacagttgaagttgggattatgagatatttctgacccggcaagagcttttcttgtggccataaaagggattcatggggattcttgaaaacttcaggccgggcaacacactttccaggatacttttccaacaattgaaatgctgtaagtgcagacgggtaccactcctctcgcccacctggatgaactatcctcacaaatatatccttaaagctcagggggactggcattgaattttcctcttctttcttttcttcacaatctttaatgagaagaggcagttttctggtttccttttttctgttggatttccagtaaagcccaaataacttagcaagcttgatcagcatagctgcaaataacagtttgtctgaaccaattgtttcatagcagtaaactcacctaatattggtagttttctctattagttaagaggtgaatgtcaaagctaatcaaccttctccactgtttttgtttatatatggccggctgtttaaactttgtttacttgttttgaacaataagggtggagaaaccgaagttcttcatgagacaaaaaatggtctctatcttttggaaagcgaaaagtgaaaaccaaagtcagtcactagaagatatagaagcaccaactcaaagatcaacattttagactaatgccagctttttcggcacatccttgtgcccatatcatactcccataggcctgaaaacacctggcgttctagcttcttctgccttccactgatccaattattatggagaacaaagcatcctattttagcacaggctgctgtcacatttttcatcttccaaaggccttggtatgcaccattcggaaaaaggtttctgtccaagaaatagacagtcagatttgattcaggttccaagcatttgttatctcccaggcgagtggatccattttctccacatagtgtatcataaaagcttggctgctctgacaagcctgaatttgcagcatgcttcactaccttttccatggctgcaatcgttgaaccatcagaaaaagcaaagtaaaatccagagttcaatcgccttggcaagttaatcggtcctgcataaacaaaaatttagaacataacattaagttctgatatatgtacataatgatggaagacaacttccattcttgcataaaagggagacactagatatgttttagtacctgtttctttgtattcatcagactgagccatcagaacagcaggaccataagaataaagaaatggcaatggattcttaaaccagtatacgtcaacatcactaagaataacattgtaacccaatttaagtatcttaagaaccattctagacttcaccttagtcacactctgaaagcattttgttccgaaatggcaattgttgaagcttatctcatttggagctaacacatccctaaagacaggcaggccctaacaacaaaaataaaatctttaataaagtttaaacaatcaagaaaattgcatcaattgaagcaggaaatataatgagtgaacatgttaagtaaaaaattaaatagttaatgaagcagctagtagtacttgcaagatagagaactgatatgtttcttcatcaagagcagaaacaatgaaatttggtatctgcaagtggcgtaatctgcaaacccagctcatgagcatgtccttataactatacccggcaactgcaagcacaattgtcttattcctgtctgccatcattggaagaagtgactctaaggagaattgaaagtccattgattcaggaagcctcattggattcatcaaagagcaatttaacattttctttagaggtttcagggaatcaagacaatcactttttttcttcttcctcctccaggatcgaaaactccttccttttcctaagatcggtgcactctgatgtcgaaatggatgaaaagtgttctttcttgtgtcgaaaaaaaaatgttgcccatcacatttcagaagcttaaccagttcagaatacttggcattttggtaaaacaatgatccatataacatccccaatttagaattgccaacatattcccagcttctgttttcataagtaagagcattggaatctccaatagccccataagacttatcttctcgatcatttagataaaagctagagatggtcaagctagcatcaaacacaaacctgaaggctgatgatgaggcctcattaatcacccaattatcatgaactcctctcccatataggaaaggaggaagaactcctgaatgtaatggaagatctccactattccatgccataagctttctctcttcgcagggaatctgctgccaattttgaccgagtatgaactcctgcaactttggaaagagagaacaatttcaatggcttttgttttgaagggaccatcaacttttcattctgaagatgttctttcataatcatacctcctggcttcttatcatttttccattctctcttctccagtgctttccatcctcgtctaagtagaatgggaaatgggatacatttctcaacaatgcaactagtagccaatcattttcaagttcataagcatcattcagagtggaaatgaagtcaggaaagagaagagcttcagaatggaccacaactgaaatgtccgacctgaatgaatatgctcttgacatcatggaatgaaagaatggtgttccaaggaatctggaaacatgaaagaaacagatcatgtagaatggaacttactaaccacattgtcatgaatgatgaactataactcaaattgaattgaataacttaattttttgctaaaagcttttttctttctaatgatattccaattacaaattagcaaagtaaagcttcgtgattgtgagtaaatatctttttctaccgacactggcaaccaaagtaaagatcattactttcaacctaaaactcttaaagtaatttaccaactagcatagaagaataagaaaaactaataattaatgaaaacttacgtaaaatcaatgttgggttcaaccaaaacccgggaaccaaaagcttctgcaaaagaaaaaacagaagggtgttgactaaacagaacaactgtaatctgtgatgataaagcaagccatgaacgaatagctaggctctgcttagcagcaacagatcccataaaaggactaggagctgagaatatggtgattttaggattgcccacatgacgaaaccccttttgactgagtgtggacttagttttctgatctataactggcggtaacctttgaatagaatagaaagatagaataatcaacaaaaacccagatagccaaatcgaccatagtcccacccgagaggcctgtcaaaccaaaaacaacataagcttagctgcaatgcaatacaaaaaagaccctttttttaagtaataaagtgcataagaaagaaagaaataaccttcattgtgtgatctatgagaattagaagaatgatatggagaaatgttcataatgttttataagaagaatggtgagatggttagtatggtataggaccatatagtacataagtgtatgtatagttatgtaagtatgaatggcattaaaaaaggaagaaactttaactgaaaagaaaataaaataacattaaaaaaaagagagaaagagagagaattgcacgaataacgaacgcactctaagtagcggtaccatcaacaccaccaagacgcgtaaggcggcagagtcgtgaggcttccatgtgagaccgctgtcgtcatgcacacctcacctcattttcaagctttgttttttattaaattattgttattatatttactaatatcgaactgaaaaatatatgatcttttctaatcttagttttcacacacagtttactctaccttttgctttgtcactgaaaatgttacagacattaacgtagagagagagatagagagagaaaacgagcttgtagtatgtagggggttggttctaaagtcaaagcaaccgactccattgttaaatgcttaagttgccgacaaaagcaatcccggccttttctctcttttttattaatattattattatttgtatattaatttatttactttaaattaaagtttgtattaattatttattaccctctctcatttcatttaattcacttttgtccacttttttcagttttatttttcaagtgttaatcaaagaaaagcaaagtgacatttttcccaaaacagtccacaaaattaaataaataaccaaataaaggtctactataaaaaaagtctataacaatgaaagattccattaggaaaaaattataacgagctttaaaaaagaaaaaggaaatgtttatttttctctaccataggattgaatcacttgtccaattgaatttaatatgatttcagtttatttaaataaaaattacaaaacttaactgacaaaaagaaatagcagttattaatcttaaataacaacccttgtcttgttaaagagtttgttaatttgttttgcttggaccagttcctggttacaactggcagatcattaaaaactaaaaaatatacaaacaaataaaccaaagtgacattttggggaagaaaacaaaacacattgtttaaaataattaaagaaaaaataatcttatttatggatagtagtttttcatcttgtaacaaacaaatatattgggtttttttgtctcatcttctttctttcttttttcctttttgggtgtagcaagctaaataaatatataaatacaatagaaatcagaaataaaaaattttgaatagtttttcatcatgttgtaattatttctatttctggtgaactcttacattttttgtattcagaatgctaattcattcaatgaagttgatatgtcattaaaaaaaaaactgatgtctcactctacaacttaggatgactaacattgaatcattttagtccaaagggtcatcaccaggagcaagaaatttggggatgattgagctgagctgagctgccaaatattgacttcaatttcaggaaaaggccaatggttgcctgaatcatattgtaacttgacaatgaatgcatacatctctgttttaggaccactttcaacagcaaatgttcacataaaaaagggagttaaaaatacaagagaagaaaaacaacagccccttttgattctttttttcggattgtacatcatacattacttgtcacaactataaattgttaaacccttaaagacgagataaaccaaaatttactacattacttggtagccacagcttctgtgtgatgcaatataaactcgctatcacattcgatatgacctgaagcatcactttctctttatctattgctgttgaccggggcaccccatacagtaggacctaaagaacattcctttatccaatcatctccgtcgtcgactaggtgatttggaccttgatttcttttccctacaaaaagtttagcaaagtcaataagccagatgacaatgataattgaagatgcaaaagccctgcactttcacctgaattgctcattagtagtagcatgtctcaaaaacgtaagacagcttgaagttttcatagcattattaccttttggaatcaagagaagagtagggagaatgcctgcgttgagaatgcttgatatgtggagaccgcgaaacttgtctagaaatagaaacacccatatactgatatggtgagatggtttataaaagatgaccagccttgttaagacaactgctcaacaagcaaaccctagtctgcttctaatgatgaaaaattgaaatatataaaatcaactacgcactcccatacttaaacaagtatttataacaattaaccactgcttgaaatacccagccaaggaaataaaaaaaatcttaaatttttttttttaaaaaaaaaaagtctgattatatgtcctgaatttctaattttactacaagtacaaacctgaaccaatgtttgtcaacaccctgctacataaatagtttattcaatttattgttgaaatgcaaaacatggtgagtatctacttgaaatattgtgtctagctaagaattatgaaatgtattttagaggcgcagaaacaacaatgttaaatcaaacaattagcaagtataagtacaaattgcaagatgattttcacaatagtatttaaccataatcaaaaccaggaagcatcagctaacttatttccaatctccgaatgcataactggaaaatttaacaagtgtaacatagataatgaccttaactcatttagccacaacttaataattacaccataagcatggtaagggaatcaagaaacattggaggaaaggaagtgcatccaacaatcttaagtctacaagcattaaacaatattatttcccttccttttcaatgtggttagtttcttgctcctgactaatttttttttattgcaaaaaactactgtcaatcaataatataatataaataaaaagaaaaaagattctcctggctgtaatggtggactaagcaaaaggaattcgcttggttcagagaaaaggaatagctataagcatttgactgatcattagacatttcaaaatatgtattagccgttacacttacatattattctttctagccttacagtctaaccctaaaatattttgagtaacctgtgggaacaaacagcatacctgttccatttgagttacccaatcccttccctctagggtagtcattacataaacaaagctaaattgctagagttatcattctaaatcattttaaagctgacaaaagaatgcctattactacttacaactaagattcattgagtgattatcataacgtttgtggaagatatgtaattattaggagcataagttgaaacctccttatcactgtcatttctttttttagagctttatagttcacacacaacaggacacaataaaaacctgggagaaaaagtaaaaacaatgaaactctcataaaaagtaccttcttctagactttccaggtgagggggagcgtgacaagttacgtctccttgaaggcaacttcctgcagcaaggggagcccaatttaggtaaaagtagggtgaagggagagattccctcttttttacctttccccagcccagcccaaaatagaaaaagtaaagaaaaacaaaaatattttactataacaaatcaaacctctttgaatcattagaggcttcatcactagaatcattatcacggtgaactgagttgtccttgctgcttctacccctactaacagaggtcgaacgtcttctcttgtgcctgcttgaatcactagcatgtttatgccttgatctctcgctctccttttccctggtatgctcgtgctttctgttattttcttctttagcaccagctttatgttgcctctctgtttcttttctatcctccttggtattaacatgagaagaccttttcttcgactcagattccggcgctaagggcttattgctttgatctttggttttttctttagatcctttccgttcagctgtcttctccttcctcgagtgcctttcatcatgcctcttgtgattaccattgcccttcccatctgtcctcttatcactctcttccttcttttcaaagtctttcgtagaactcctcttactgtcatgtttatcattcttttcagcttttatcctgacttgcctaacctggttattatcttttgatgttttcatcacattctcatcatcttcaggaaggtcatatccacctacatcaactgtattttttgatctagaaacattgatatcatctggtacacttccaccagcattactttcattttttctgttcttatcagaattagaacttgtaatagcatcagtgttactatatttaggctcaaatgagatcgctttacttgtctcactctccaaaattttctgctttttgttgggctcttcagcttgggctatcgaactgccatttgcaccaacatcatgcttgtcttctgaagatttttcaaaatttgaatgtcgaagatcctttttcctggaatttgacaagctagggctctgaatttcatcaccaccaccaccatcatcatcatcatcatcagtagcataactgccaagacccagtacatctccaggggaactaaaactggacttttcaacgccttcactctcgtattccttggatttgcccgggattatgatctttgtggttgccttgttagatggaagtgtagacggagatggagataccctatggtttgaggttgaggggacaatctccttatcaactgtagatataaaatttgtcatttaaacagaatgaatttcaagggtattatgataatgtaccaactatcattgaaatatacaataagccatagaaaaacctagaattcatgacaaactaaccttcaactgttggatcttcattgagaacatttgttgcaatctcatgaaactcctcatcagttacctacaaataaaggtacccattaaaactgtaacagtgtgaagttggttaagaaaacatagcttgctcagagttgcaaccttcaacaaaacttcagttagcacacgctttatttcatggttaattgctgcagttctagctgcctccacataatcctacatagatcaaacatttttatgacatgagcacaaaattatacaatggtataacagcaacttaaccactaaaaaaataaataaagacgatacaaccacaaaaaagagctaaacctcatcatcctcatcttcttcagttgatctagatgaatcaatgcttttgctatccgcttgctcccccttcccaacagaattgtcaaaaccttcatcctcaatagattgtgtctcctccttggcatgatccatagacgaacttgtgattactgctttctttatttcatctttcagccaattaggaactgaagcctggatcaaattttatgacataaaactgagacagttgtggatttgttccaaaacataatatataaatagagaattatcaatattctaacgaacaaaattctgaaatactgagaaacgtacctttttaggacgttcagaaatacttggaattccgtaggcatcaccagaaaaggctgttgaagggtgaagtgaatttcctgcactgtgggcaaacgggggagcagcagatggaatagttggctgaaggcctgatacaggaaaactactaaatggatgtgcagcatgcccagaaacagaagaaggcacagctagtgcaggattgtgttgctggatgaaaattgtcagtaattactaactgataagccctgaaagttaaagtacaacttcatgtaactcaaattagtacctgaggccctgacggcagaactggagcaataggaggataacccacaccaggtgcaacaggggctgtccaactgttcatagaatgcactgtggtaacagtgtccatccctcttaccggtccaactgaatcatgataagcatagttggactgcatatgtggatcgtcacgattgaatctgggcataaattctaaaggctggtcggcaagaggcatagcctgaggtggttgcatatgctgctgtccttgctgagatgacgagtatgaaaaaggaataaccccattgcttcctgccaaccagtcagaaaaatagtacaatttaaaaattaatggaaaaaggaaacccatggatgatactgattcaaactggccaccaagatagagaaaagcaaaatcaattttcaattgtcagcaaggtagcactttcctttttttctttttgttttttataagagacaaaacttgtattaatgaggaaaaaagtgtgacaaaggaaacactcactaacactgtacaaaagaaagaatcaatttatagcctttctagcaataggtaggaaacaaaaactaaaaatatataattcatatccttcaatagctaatggctgtgtataaagcatctaaagattctaaacaaagatgcctcatccccaaagcaaagacacctgtataatttgcaatctagcaaaaacgcagccaactgtctgtattaaacatctaaacaaaagaaggcttaccttcgatgaaaagaaacctgtataacatgcaatctagtaataagaaactgtcactctgtctccacacaatttgttaaacgtgacatcaaattacaatatcatatcaggaatgtatatcttagtttagcctgacaaaaatgattattgcattacataagactacttttacatcgctaaatagtaaattcacccttcctaataaaagcctagatggggactcttgacctgcacagcaatgagttcatacaatacattacaatcaaaagtattcatgtgaatgaatgtgttggagaaacattaaattattttacggttcggcaaatggatcgaatccaagcactactactgatgttacgataagagaaatggtgtgaaagaaacaaaaggatagattagaattagggaagaaaaaaacacctttcaaacataaaaatatataaggtaaaaataggcatatttagaactctgaaaacaagtgatgtttatatagtaccacattaaaaatttagaaatgataacgattgctaagaggaacttgaacccgctatagagtttggaagatttctgggtatcaaataatgaaaacaataggaacagctacttatgagttctaaagagtttgagaagggaatcgttaataccaactataagtacaaatcaattgattaagcactcagaagaataatcacaatgttatatagagaaggtcagttacatattgttatgaacaataggactacgacatcaaattagtaatcaaagcaaatgccaagatagcagctctggaccagaggtttcacatgcaatttctatattatgtaaatcattacctgtaacagaagaataactagaaggtacctcctgctgatgaacagatggacttataggtagatttccatggcgttgaagcatagcatttgaatctgcaggtggcgttccatctctaacagagtgaagatgtccctctggaacataagtagaatcagagctgacggaaggaggctgtgaggactgagctaatggtggccgaggaaacggtgcagttggagcttgaggctgttgaacctgttgatagttagatgtaggcatagactgatgttgcatttctgcataatgaggctgaacagagtgagaatattggtcttggtaatggctttgatcttccggtctctcaactgctgtatgctgagattgttgatgctgattatccattgctgttttagcatctgcccatgctctcgccttggcagcccaatcttcttcattactatggccaactgctataaagtaaataacacaaaagtgaatctgtaattaaggataaaaagttgacctcaaacagtgaaaaaacaattgaatcaagaacaacttagtagggaacaaaagaagcgaactgcaaaatattatcaaaacactgatcattactgtgagttcgactctcaatatgacagcctttaattaattagcatgcacaactgatgatacccaattttaatgtctgtataaatattatgatagcctcaattgttggagttgaatgcaaaagtatcgccaagacaacacaacatgatctgcagtagtaaacagcttaacatcctattaaatcatcaggtctcaaaacaacaaatgcctctcaagttcacagaatacaatcaccacacagccggtcattaaacgaaaggaaaatacttgtataatctatctttactcagtgcctttaactcaaaggaagctcagatgactgtaatttttgtgtcctagttctacattgaatggtccagaagggtggctcattaatcttgataccctagaattttacaatcttgattgaattacacaaatctaaaacacaacatatttatattataatgtttgactgctgattttaagccaatgtaaatcccaggcagcaggggaaacggaagttcaaacggaaatgtaacaagaactaaccttgatgttcccaaccttgctgatgcgcccaattaggattcccccattcctacaaaatgtaacaaataaaagagaaaagaaaggttatgtatacataattgaatgccaggcctaaagccaccatcttgttaatcagaaagacttggagatccgaaaacaacagattgataaaaccataatctaaaaccctaaagatttttcgccgaacagagacacgttgcaataaagataataaatacctgattgggttgagggtaagaatgaggaggaggaaaatgaggtgaagaagccagctgaggccgaggaggaggtgaagcgaactggttctgatggacagggtgcggaggataatggtgttgaggcggaggataagaaccaggaggagggtaatggtcggagtgtggatgaggaggtggcggtgggccccactgtgggggaggcgagggagagtgtgatgaaggggcctggtgctggtactggtattggttctggttggggtaccatgagccctgaggatgtgccggtggcctgggcggcggctgttgcagctgctgttgttgctggtacggatccgaagacggcggttgttgtggcggcggcggtggcggtctcatgtaccagttatgttgttgttgttgttggtacgcatccatggtggttcttgttgttgttgttgatgaaagtttactgttaaaccgttggttgtgaataaaatttatgagaattgggattgggattgg

SEQ ID NO: 16657 - DNA, 6423 bp, Cannabis sativa
tttcactaagcaagggattaatttgcaagggattaatttagaagaaaagaggtttgaagaaaagaggtttaaggaaaagaggtttaagggtttatttgttaattaagagacttcgtaaggcctaattaataaataagttaaatagaaattttatttaataattaattataataattaaataaatagattttacatttaaaagtataaaattaaaatatggcatttgtgaaagaaaaagataaattattaaatagatagcaaaattaaaattagtggggtccacttcatggtcggccacttaaataattttaagccattttttttttatcttttttaattccatataaataaaacctaaccctacatgaaatcctatataaggaataagatgactctcattctcataacctagttttttaactctgtcaaacaactgaaaattgagagcctccttctatagattttgaaattcatctccctctttctcttcatcaaattcgaaccctatagtgatagagtaccttgcccactcatatcaagtcagtaataaatcatagtatggaaggtggtgaagaattccaaaacctaaaggagatctaggttcagatcttgttattaccctacgatagaaaggaacaaggattagaaatctgaatggaaggagccataatattttgctgtaaccaatgtaaggttttctaaaactttatatgtgtttaattcattattttaggaaattcatgtttaggatgttggattatagaatataataaacatacatgttagtaaatctagattctggtaaaataacttccaacaaggactctgactctgacgttcagattttgaatctctcattgagtcatatttcgtgccttgtcttgctcaataatggcaaggattggaggtttacggaacccaatttcttgcaaaaggaaggatacttgagaacttcttggttgtttgaagagaaagtctcaacttctatggtttctcatgggggattttaatgcaatcctttatgggaataaaaaaagggtgggccactgaaattgtctagttcgatccgtaaattttaggaggttcttaagtcatgtgaccttcaggacatgggattctcaagggaaaagtttacttggtcaaacagtcgaggcagttttgcaaatgtacatgagaggctggataggagattggtgtgttcaggttggtgtgattctttccaagattatcgactttctcatctcgagattcgggattcagaccacagggatcttttgctagatttgtttgaaagaagagtggggttgagtctggtgccgtgtggttgtgacttttgttttgaaccaagttagtttaggtaaagtgattgttttaaggtggttaatagtttttggaaaaattatgggtttactggtggtgtgaatgattttttgaagggtcttgatgaatgtggcaaggtcctggtaaattggaagacaatgaaatttgacaatattcctaggaaaattgctcagctgaggaatgaaattgatgctcttcacttgggtattcaattggttgcaacagttgagagaattcgtatgcttaatcttaaggttagaaagtatcaagctgtggatgaagattacgagaagtagctgtctagagtagattggttggcctacattgatcgcaatttgatgttttttcatcaaaaagcgagctctaaaaagtggaagaatagaatcaaaggtttagaggatgccaatggggtttggagggaggatgataggagtatgactagaattgttactctcttttatgaagaccttttcacttctaatggggtggattggggagccatttctacaattactgccgatataactccagttgtaactaatgagctaaatgatgagttgaataggccttttaaagttgatgagattgagaaggctttggctagtgttaggggaatgaaggaacctagactcaatggtttccactttgtgctttatcatagatgttaagacatagttaaaggtgaagttatcgagggtttgcttgaatgtcctgaattgaggatcttcgatgaatagattgaataagatgcatgcaattttcattcctaaggttaaaaatcctcacaaaatctttgagtatttgtctattcttctttgcaatgttgtgtatgagattattacaaaagttgtggctaatcgtttcaaaaaggtacttctttgattttttcagagacccaaagtgtgttcattctgggtcatttgatctcgtttaatactgttgtggcttatgaggttctacattctatgaaaaatgtaccaatgggcgtaatgggtggatgtgcgctaagttggatatgaggaaagcttatgatagagtagagtggaaatttttgggtgctatgatgaaggctttgcattttagtgcttattggtgtgatttagtcttgtgctacattagtttccctcaattttcacttctaattaatgagacacccaaagataatgtggtggctagtagggctcttcggcaagggtgcccactctcctcttatcatttcctattgtgtgtagaaggcctctttatactcattttttatgctcaaaatgatggcggggtaattggtttctcttgtaaccgggggccaaaggtgagccatttattttttatggatgatagtgtggctttttgtaaggcttctatcttggagtgtaccaatcttctagatctctttaatgtttatgaaagggcatcgggccagagtgtgaatttagcaagtctttcatcaccttcagtctgaatgttgtgtcaggattgagaagcaatatctaagttttattggggttagcttctatcttagagatagaaaaatacctgggtcttccctcttttgttggatgaaagaagaaacaagattttcaagatgttattgatcgagtgtgaaaaaggctccaagggtggaaaggaatgctcctctctactggaggaaaataggtgttgatcaagtcgtttgcgctggccattcctaataactccatgggtatgttttgtcttccgtctactctgtgtgatgaattacatgctatggtagctcatttttggcgggggatctatggagtgtaagcataacatccattagaaaagttgggataagctttgtattcccaagaaaaaaggtgggttgggattttgtgaccttgtggctcatatccagacccttgtggccatgcaaagttggtgtattcttacttcatctaattttcttatggcccaagttatcaaatccaaatattttaagcatgagaatttcacagagctggaacttggtaagggtcgtatgtttggaaaggttttttttttttgggttgtgaggtgcttagactagggactaggtggcgtgttggtgatgtcacttctattaatccatttacgaattcttggctccctagactaactacttttaagcctaccacgagtaagtctggtcctctttttgattggtccgtggctaattttatcatttcaaaaagtagtgagaggaatgtggttttgttaaacaagtgctttgggaggtggacagtaaccttattctttctctcccgttgagctatcgtaacatcaaagatgagttggtctggcattttgagaatgatggttgttactctgtcaggtcgggatacaaagaaaatatggaagctagttatgaagactcttcttcccacaagaatggctcatggtggacaaccatatggaatcttcaacttccaccaaaattgaagatttttatatggcgtgtgtttcatggtatcatacctgtgacatttgtgttgcttcaaaggaagattccagttgatcctcgttaatttcaatgtagatatgagcgagagacaattcgccattcactttttgaatgctcgttgtcaagagtttgttgggatgttaccccttgggtagctaaagtggcggattggagtaaggatcaccatgagaaggtgattgtaataatcatgtgcatcaatccctcttcggatcgtgaggcttgctttatgatgatatggttgatttggcatgtgcgcaatagagggaagtttggggatcgagttgatcaacccttggttgtgaaggaaaaggtgagtgtcattctctttgagttccaagaggctgtcaatggtgtgggtgttactttgtctggaaagttcactcactttcaatacatggatcaaaacgataagcttattggtggtaatagttgtgtggccagaaagtagggggctcatcactctcgagatgctatgtcccacacatggaagccttatgatcgggactgttttaagctcaacatagatgctattataagtttggacagttgcgctattgggttgggggtagtgagtcgagacaaagtgggttgtgtggtttgggtcttcacaaaggtgatggcaggaagtttctcgccttattcaactaaattatatgcttgctttgatgctctcaaatggtgttacgctaatagactgaagattgattgcatggagagggattctcttaatgaaatccatgcaataaacaagggaagtagttgtaatgaagatggtgttattgttagtgatatttaatattttcttgagttctgtaatattggttcttgtcatttatattttgtgagggaaatattatggcccatacattagctaaactatattttagagaggactttgatcatctctgtaagagtaatattatatggactatattactcacttgatagtgagacaatttaattaatataattttgatgatacttttttagaagaaaaaaaaaaaacattattcgtaccaatataaaagtaatatatatatacgaatatcattatacattctttatcaatttaacaataatcatgtaaacatgatcaataaaaaatagatttctaaaacaatatgaatctataaaataaccctaattcatctgtgttaatataaaatttcataaccctaataatctaacaaaaagagggctctgataccacttgataagaattagatctaaaatacatatggatcataaactcacgccaaattatcaagattactctataaatcaataagatggaagacatacttgattccatgatattagatatgagatgagatggatgggtatatggttttctacaaactaatcttctctctatgagttctcactcaattaatgagaatggaggagaagagtggttgggattagccttggggaccaaaactttatcttttatttatagcaaactaattagagccccataaaccataattagatttactattgggtattacacattacaaaatacataccaaataagatgtttattgagctcatttatttagacaacttatttagtccaatttaaaatattaactcaaacaaattgtcttaatttataaacctacatattgatttttttttttaaaaaaaataatccaacatttgtccagtacaaatttagcatccttcctataatcaaaatttatcttaaaacataaagcatcaatcacctctaccttcctattcaccatattttcccacatcctactaaaaatactttaaaacaaattgccattcacttcacacttgggaaccacccttcccagaagagtttgtgccccaaacttagttgccacctcttcattctcctctgaatcctcaatcttaacaacttgcttgtcatattcaccagttcctcaacttcatttgaagaacctaactatcaaactcaatagtgccagaatgccaacgtcccaaagataacaacaatcacgcaaggtccctcgtaccattaacctttcattcctccttcaaactatgcgaattgtaatacattttaatcatttttatcattcttaatagagtaatgttacaaacgtgcttgcaccttgattccattatatatatttttttaattccactatatataaatacatatttcattgaataaaataggatgggctaattaagatgaagtatagttgattcttaaacaaaaagaatttgaaataaggaagttgattggttatagtaattttcggtcattttttattaagcttatttaaattatccttgtaaatgtttgaataaaagctatttttcttaagaactaatttaaataagggttttttattcagttttaactaaaaaaaataataatattacaaaaatacttttagctagccaaataaataaatatacaacccaaataaaaaaaattacacaaatactacttacacacactttcaatccaagatccatgcttcctgggtaactatcgtgcaactatcgggcaaccacgcaacaacccaatgcaaccgaaacaaaaattcaaccaaaaagagaaccaccattaattatgacgacttcacttgagaagacga

SEQ ID NO: 16658 - DNA, 7170 bp, Cannabis sativa
aaaaatcagttctcatttcattctttgttatatttcctagacagcatgactcacaaagagactattagcgatcttgacaagaacgacggaaggtaccatgagacagctcgcaaaaagcccgcacgttgacagccaaatgagaagttaaacaggttgcagccgcacctatcggcagaagagactgcatgcatcccaattctcccaagtgcctaaaaatgccacaccatcgtaaacttagtaaataacatatgaataaaacgtttatataatcaatacacaccagggcaatgaaagatctatgtaacaagtctttctagtagaaagccctgaattatattataaccaccaagttcaagagtataaacccgaacaatagaaaaccataatgaatactgtagaagattatcatttcattaaggaagaaaggtgtatctttagatactcacttaacggatatacctggtttttctctagtgttcactaacacaaactgggaattttctacattttattgttgttaggtgcttaaactaaattaaaggcaaaacatagtaagcaaaaagagcacatttgcactgtaaaacctattatttccctaaaatcgaatattttccaaagtccaaatctttgaggggtaatttatcagaattcagcagaaaacacaaaaccctaatcgaaaagagtgaaaagtgattaaaggaaggaatgaagtgaaaaggtaaacctgggagaggagaaggagagacgacgaggaggggcagcgacgttgggaggacgcaatcgagggagcgagggagcagagcgttgagccgaaaccctagcgctagagatgagggaacgagagagcgatccagcagagcgccaagccattttgggagatggttgatggctgttgcagttgcgagagaggaaggggtaaggggaggctttggccgagggcttttgcgagggtttaacgaggtgtgactgtggctgtatatttctacaaaactcgatctgcaacatgcatttgcagcccttgattcttatttattattatttttttaaaaaaaaaaaatactaaattacactagtaatactttattagtccaattaagtgtgagatctcgtatacatgtttagaggtgataggtattttttttttttcttaaacaatggtagattttagattttatgttttttttattaaatttgaaatttacgttttttttattattttttttaaaagaaaatgtctcaaaactatatctcttaaaggtagtgtctaatattctcgctattagtctaattaaatatcggatctcatatatatgtcaagaggtaataagtacacaaatgcttaatagcaatgctttttttttcttaaacattggtttttattaaatttgagttttgatgttttttttttattattatttaattagagaaaatatctcaaagaaactccacctctcatgacatgtttacttaaagggaatgctaatcaattgtatggtattgattctcataaaattatttactaaattttgggaaaagataaagtaatagacgccacacaaattaggaaaaaaataaagggaaagattctcctatttcctaacttattttattttattcgattagggccagggtctacattcattcgagttgagttctgggtctaggtcgaagtcaccatttgagttaggtcagggttaagttcatatcaagatctcaaagtaatgaagtattttataaaataaaaaatgaaaattatttttaaaaaataataaccaatcccgtcttttgttttgaaaatttcgaaaaagtgtttttgttctattttttaaaacacaatttgtagaacactctatttttagtgttttgctttctttctacctaccattaagcaagataatttcaaaagcgatgccaccacaaactatatcaccaaggtggccatttctgatgggaagcacaccgatctagtgcttcttgggatccttgaacctgaccttgagatgccatgaacattaaccctcagtcctcagagtggattagggttgaactcaactctttgaaagttcttccacccattctccatcttccataactgaagatggagatgttgatgcggggaaaaagaagaaagcaaagcttttttccttagcataatctttaatgctagtttagcatttcatataaccgtcgttacaactatcataggtcatagtaaacgagacatcttttaccatttagaagttcacactatttttggtatcttaaccaacaaaaatgaaaattcttctcagcaaaaaaaaaaaaatggcaatttcttctcgagtaaaggtttatgtttaatgtttaatacaaatgataattcaattaattattgtcggacgagtcattagtctaataattcattaaaatgactctcacaggctaacaaagaattaaatgtaaactggtcaaaagaagaaaaaaaatgctctttaatttaaagaaggctcaaaatcttaaatttaaagctttagttgcctattgaaacacagtaagttttgacacattttagttgcctattgaaagtgaagaccctgccagctgatatattggtcatgactgtactccctctatagtgtaatctttggatagaattttggtcctttgaccaaataccaacttcatgaagatcaccttctttccagcagatgttaaccgtcaccccaccgcgtgccttgagaccttttacacagccatttgcccacttatcacgaggcagagctggaagtaagaaaaggtcctttgtagtactttgaacaagcatttctgcaattgctgctgaaaatctgccaccaaaaacacaaaaacatgaaaaatggctttgcattgttaatcttataacttatcaccaagtccctcatgtcaaggctttcaaattgagttagatttttaatgtgagaatataaaaaaagctgatgtgatacagttcagtttcgatcaaattccatcaggagcagagttgttcagagacataacacagaatgtggctcacccaaagttggcatctatttggaaaggagggtgtgccgtgaacaagttgctatagagtcctccctcgtaatcagcttcgtgatctggatccaccaaatcaattagatgtttgatcatacgataggcgtgctcgctgttgtgaagacgagcccacaatgaagctttccatgttgttgaccatccaggaccttcctctcctgtttcattttttttcaaaaaaaagataatatgtaatttggtataaaaataaatatcatcaaaacaacaaaacaaatttcatgcacgttcataaaatcttaataggccaaatggatatcctctttttagtcttttcttcatcatagtcattatacacatacctcttttaaagagagtatagtctgcagctttacagagctctggagttttgtcaacagttattgtatgccctggaaacaggccaaaaagatgcgatacatgtcgatgatgcgggtctggatcctcaaaatcttgtgcctgccataaataaagcagaaaaaatatctaagctctcattttatgagcagattctcaacatatatgagatctgcacaaggttgtataagatggaaccaaaggataaagcttacccattccataatggaaccatctctagcaatttttgtaggtggaagcttggattgagcctcttggacttttgtaagaagagcatcctgactacccaaaatctgtttatagagaaaatttattatcaaagcacacagatttaacagacaaggaatgcttcagctgttgaaacaagagctcgacctcagaagcagagataaatgcagagaaaacttctttaataatagcaatgtccatggttgctgagtagctcacgctggcttgcttgccctctggagacataaacatatgctctggagaagttgatgggtttgtttctagatatcctccagggccttcaatcaaccaatccaacagaaatgaagtacatccttccaacaaaggatatgccttatttttcagaaaatcctaattatgtaaaaaagttatacatatatgtatattagaaacatttgcccaccagaaatttgaataagagtaagcactaagatttcctatatcatccataaacttgcatggaagtttttcttggactgaatctgtgatgttacatgattggatatagctaagaaagagttcgacagttcagcattcatacaggttactgagtttgtaaaaattattaattttatataaaactccctgctgtgggtgaaatgaaaatgcttacaatgaacacaacccatttgactgattatgcaagaatgtaaggattcgagtaggaagaggtatacagcagaagcttactttgtccattgtgtaagtaaaatgttcccatagatgggtgcagagccaagctcctcccattggccataaagcccacacagcttcaccccgatctggtgatgtttttgcccataagtcagaaacttgatgagcaacccagccactggcctcatagttcacctgaaagtttgttctaagtaaataaaacaatttgcgcattctctctctttctcttatccatcgaattagcctcaaaatcagggtacttccacagcaatatgtgaaaaaataaactgtaaatgcaactagaaagagctgaatcttactttggcagttttactcccagtttctgataaagatgatatgtaatcaaataatggctcctggcattcttttaggttgcaagaaagggaaggccaatagttcatttgaaggttgatattcagatgaggagcaccactgcatggtaaagagctctgaatgtgtcacaaaaatggaacttaaagccacataaaatgctgatgcaatgtaacttgcattatagagttagcaactcaaaggcaagaaggcaatcattccaactagttaatcctctctgaattaaatttataatatctatatcatcctgtaaagcttaactctgcacatatctatttttgtttgaagaattaagatgctgagagaaagagttacatactcccatgcaggctccacgtccttgttccaaataccctgcaggttcgccggctgagttcctggtcgtgaacaagatataagcagataacgaccatactggaacaatagctccacaaacgaaggatcttcatcagttttgaaagatttaaccctgtctgcagttgagatagatatgtcattgttttttgagatgctcttggaactttttgaaagctccaacgagacacgatggaacaaattctgatagtcactcaaatgatgagctaagaggtcagaatatgacaactcttttattgcatttaaagctttcagagtgtcagaagatggatctttcttagaatcaacaggctttgtaaatggcccatcaaatgaagacgccgccaacagaagcaagacagcggaatccgaattcttaatttctaacttcttatcatccaaaacacgaatgaccccattgctgccactaatctgcaaattaagaactgcagaaaactgaactccctttggattgtcattgtcattcacctttggtcggatccttctaccaggacagctcccttccattagaatttgagttgtccctttcacttcagaatggtgatgcatcttgctgtctaaaaatactgtaaatgaaagagaccccggtttactggctgaaatctttgttacaaccacttgatcaggatttgaagcaaaatgttccctagtaaattctacatcaccgacagaatattttatttttactgttgcagtgtctaagtccagctctctactgtacgtgtccttggcgtaatcaatatgagaaggatcaaattctagcttaatgtctcccagtagttgataaaccttcattacacaatgtattcataatgttagataaccttcattgcatatggaactcatcaaatttagttcctatattaacaataatcagttataactagtacaaaataacagaggtagacataattccatccatttttcatttttgctgagtaattgataaaatgtacatacatcagaaggatctgctgacagcttgactgcttcttttgtagcttcaacatattctccattgtcaacaagctttctaacctctgctagtgcctcgggagctttggggttcgtataatttcccggagttccagtccataacgtgtcatctacaatattcacaataagcttgctaagaatcacatcttatctatgcatgagaacaattctaactaagccattcaaacaccaactttgggaaatcaacagttgaacagttccgttctaattcagattacaagacaaaagtaaagctgtgtgttttacatcactttgttggaaaaaatggatttcctttcctcctatttggatttaaacaaaaaaaattgagaccattatagatatattcaggaaaacaaaaatatttatataatttttccctcaatgatttacctagttttttctctaacaaaatatttccttcctaagcatttcacatttcatataagtctgtttcgaattatatcttatacaaactcacattactctagtaacaattgtatatatatatatatatacacacacaatcgaagagttcagtttcaaaatctcttaacataaacagataaccattaccctgttacgtacaatgtacccataacccacaaccagatcaaaataaacatagcagaaaaagatttgaaaatggagcttcaccattgagctggagagtgtcagaagcaacaccaccccaaaccatggcaccaaggcgaccatttccgattggaatcgcatcggtccagtgtttggcaggctgagtaaaagtaagctttaaaggcttggaatcatcgtcgttgagcgaactcgggtgccacatgtccttctccggcggtggctgaaccagaacccatccactatcctccataggtttttgttgtgggtttagtaattaagctgtagcagtagtagtagtagcaaagggtaatgggggagtagttggggaataagtagtgaccaaaactgagattagcttcgccattatttgattattttcagacgccataaacaaggccccacgtcacctggtaccttttgtagctttcctaattattattatta

SEQ ID NO: 16659 - DNA, 9335 bp, Cannabis sativa
  modified_base (5647)..(5651): a, c, t, g, unknown or other
ctgactgtacaattgtccaatccagtccaattggccaaaacgggccctaagggtaattgtgttacatataagtttaatccaatattttgacacccatgccttatccagcatgggagaaaatattattacaataaattacaactactgagaagattaacaatagaattaaattgaatgcacagtaatatttttgaattccaatggacaaatatatcatggaagagtaaccaagcatccatagtcaactcacccagaagaaaagatcaactaaataccgaaaaacaatggctagaaaaaagaaattcaagtcaaagcatgaaagaagagagtacctcgaattatgctttgataggccttttgttacttgacattcaaaatcagttgcagctttagataagccattaaaaagaatagccattgactccaattgtttcctaaccaccctttcattcctttcatgcaatgacattgcagcctgcttctcctgggtaacagtcataagtatttttctctctttatcagcttcacttaactctctagctgtacgttcaaaatctttattcaactcggatactttcttcttatacagttcaatttcttccaatgcagcagccaaatcacatttcataacatctgattctttactgctttttgaaatcaatgtctgttggtcacatatttgaagccttaaacactcgacttccgctgtagctaataccaattgctccttctcaatctccaatgcagctgctgcctcctgagccaacttcatcttctcttctacatgataaactatttcttgctttaacctttctttctctgctacctctatttctagtgttttttctttttcaaataattccttctcgagggaaactcgagcttcattttcatgaatatattgtgtgtgtaccatacttagtttactcttggcttctttccatgattctttataaatagcttcagtcagccccagcatgatgataggcagcatatctgaatctgttattttacagtcgctagcaagttgagcagcatcagaaacttctttaattatgctttcatataactcttgcataacactgtactccaaaaatgactcttccgccatgcaattcatttggcccaccatttccttcagaagacatgtaaatacatctgcaccaatggaagcttcaatatgaagatcttctatagaagacttaagagatctaatggtgtgtaataactttgtctcagacaatgagtgatgtgacattctctccgcaccatcagaaacttgtcttgaaaggaccttaacttccttcttcttctctgtaagagaatccctgagctggcgattttctgcaagtagcatttccattctttccttcaaaccactaagagtctctgcattacttgcaaagatcggtaatttctcattttctgcaataatatcatccaatttcgaaatcacctctgggatttttctcctcaacatatcaaactccttatccttctttgaaagcaaagaccccttttctctcaaatattccctcttaagggtaaaatagtcttccgtcatctcttgtactttagattcatgatttctcttcatcttagtcatctcattattgtagtagctaattagttcaacatttgacatgtgcttcaatcggctcagatccaaactctctagctttttagcttgaggatcctcgtgttttccattttcttccgggtgggaggatgtcggtgtcacgtgattactcagaactttgtggtgaaaatgatcatttactttaccattacaccacccttcactatcaaaggatccatgagaaattagatgacctgcttcagaaatacacaaagcattagaaatgacacctagttcctcgcgcagacctgaaatctcctgcacccttccaaaccaacttatacttttgtcaccagaaattctgccccacactttttcttcgaattctcgctcaagactacgaatacagttcccaatcaccagtgcttcaatttctgcttgaaactcctgctgtagcttccaatcatgcagtgattccttagacaagtgcactacgtcttccgcccctttacaaatagtttctagagtgttattaaggctatcaagtatcttatccacatcacaccgtttttcagatgaattttcatgcagtatgccacccaatcctagcaactccgaacttgaacttttcctctttatagaattacaccctcttatctggttgatttctttcctaagcttcactaactgttctctacctgtgtttctaagacttcccaaattgtctttcatcttattgtgctcagtaatggcttctacaaagcaacaatgcaccttaccttttgactccggctcccttgccaaagatccaacagtttctttttcatccataccaacacgataagcatttaacatttccttcaaccctgcaatttcttgttctttctgaaagattttctctgctgcctcttgtgtaatggcagtcaccatgccctttattacagaatcactaaccattctagataaggtcaaccggtcggtcaactggtcatagagatcttgccaataagaatcgaaatcagcaacaataacatcacccaaattctcactttctttaaaatcaccactcgtttgcatggaaccatttaaacaagattcaaccccagaatctacaacttccatatgtcccatgatcatttagcttctacacaattatttaacaacaaaattacctccactacaactcaagaaattatagaacctagcataataaattcatccacaggctccacaattagaacattaaattaccatatggagcaaccaaactgcaaaatttcagttacaagaaagaaagaaaaaagttcagaagcatgcccagataatgctattacatataagtaacaaaaaatcacgaaacttgatagcatttagttaatttgcaatatgaaaaaaatctcaaaaagggtattcttcttgctaagcaaaaaaagaaagcagaatctttatctttatagcactttctcggcaaccaaacggactgcaaataaataagcattaacccatttctcttcttcttcttctatgaacaagtctaaaccaaccaaaaaaaaaacactgaatagttgaaaaagaacaaaaaaaaaatgctaaaaccagatacttactggtgaagtatgttaaatccacaaaagtgagatcatgattggaagaagaaatcaacggtgaaaaggggcttcaaaatcccaagatgaccgttaaattaacttttttgaaaagcttttttgtaagtttttctgactggtttttagggttttcggaggtggttatgccgagcaagagagagagagtactggaatttttgagagcgggagtaatattaacatatcaaattgcccccttaattccaattatttacaattctgccactcttatttttgcaaaaataccctctttttttgtgttcctcaggtgagatttgtgatgtaagcatacaatgaatttgtttctactgaaacttggcagttttggcctaacaattgtaaattcatttttgaaattaccaatttacccttttctttcatgaaatatattaattaaaacttttggggaaattttgtggactttatgattcttatctactactcaataatagcctgttagttaatatattgtcttcaattattcaatttagtttatgcattattattttatttttcattgtaaagtacaaaatggtcatttgtcatttccttggcaaactacttgaatttggattcatttctttgttttttttatatttattattcttcattttacacaaataaattaataaagacaactcatctaacaactgtaataattaaaacatgcatttttatttatttattttaagacaaagatttaggtttaatttaagaatcttaaaaagtagtttgtacagcctttttttttaatggaataataggttttttcttttaatttgtggaataaaagattgtacaactttgataagtataacaaaccaaacatacttgtttatttaaagcaatcatgtgtgtcatcataaccaagtgctctttcttttaaatttttattcattttccatctttttagtcaaatagagggtactttagtcatttactacatctcaaggaatttgaaacctgtggcccaccattgaattgatgattaaattttattattattattttatttgaaatgagggaaatgaagcttaacaaaggcttttttcacaagaacaaaggctatgattaattatacacctaaatgttgttgtgataggtttgcttaatcatttctgttttttcatttcttaaaaaaaaaaaacaattttcaagagatttagatacctaaattaatgagatttcgagaaaaaaaaaaattaataaaagggtaactctatctatcttcaatttcaaaatatgaataataattacaattttttttctttattattcttttagcactcatttttattattatttttataaaattaattgcggcaaaattttaaattcttttattttacttgcacatagtctttaaaacttaaattttagtagcagaattctcaatactcgtgttctgttagtagtttaccacctctatttaattttgattattaactattatcctagattatccacatgtatataatatacacgtggcacaatcttattagtccatgtaattacattatttgaaaaaataaaaataatattttaaaataaaaataaaataaattatattaaaattaaaaatttacataattatttttttcttctctcttcgtaactccctctctccccgaaactattctcacataaccacgatttctctctcccccaaaactacttctctctataactcctactctccccaccaccataaatacaccattttaattctcacacattttaaaccccattttattttattttctaaaataaaaaaaattaacccatttttttaaaccaaatccctaatcccttcctcctatacctctctcttctccccctaaaacttccatagctgccactttctttctcaccagaaccctctacttattattattcccttttcatttgaacccaaaaacttatccaccttcatctcttcgttgcatataaactgaccatcatttctaccttctctctttttccgacctgcttgagcccgatttcatcccatcagcacaaccagttcatctcctctaaaccaggggcacgacccactgcaagtttcagatttgaaagatcttcatgaaaggagcccactttcgaaactgacttggtccgctaagatagtgatggacaaagaggacctaagggtattgaggtttaaatagtcaaggaggcccgcattggtctctattttggtcgagtgtcactgaaggtggctcatcggtgttgagccgagaccgatgaaggagaaagagaaagatcaaagatagcatgtcggggtttttgggtcttcgtcgggttcgtacggcggtggtgctgtattgcaatggtggtactgggttacggtggtggtgagttgcagtgggtagtggtggtggttaggtttgtaaatgaagaagagaaatgtagagagagagagagnnnnngagagagagagagagagagatatcgtgaaaaaaagaacgagaaaagaaagaaaaaaaattgctttttaatgattttttattttaatttcttaatttttgaataaatttttatgtagactaataaaattgtgctatgtgtacactatgatcgcgtagatatacatatggatagtccaatatgacacttaacacctaaaatagatgaatatattaaattgctaacagaatacgagtattaagagttttgttgctaaaatttgaattttagagactaagtgaaagcaaaataaaaatatttgagattttaccacaattaactttctttatatactctttttaaagtctaaaagtaaattatagacttgcattattattaaacacaagtagataataacgctactataagatgacatttttgttaatacataaattttttaataataactattactttaaaatatataaaatttgatatttaattatactaataatattataacactttataaatcatcgtgatcatcactagtgccctttaataattttcatgtgtcaattttatatcttttttacaaattatagaaagttatttgattacctaagatgcgtacaaagggtttgcctaaacctaaaagccgaatagacaaaattaaacttgtaaaatacaagtgaccaagagtgaaaagtttgctcagtcacttagggagcaactatactcgtacaatcattggtaaaaaacaagctcaagcaaaaattaaattcagacttaaaggaaaatatttatattaagataacaaaccaggataagttcaggattaaaagctgcacggccagtcaattgtcttaagtaaaatgaaaatatttttccaagtttaaaaccgcttggtcggccacattgtactaaaaaataggcccttaggccaaacagatcaaaaaagttttaaaattttactccaaaggagttccatggtctttgtattactcggatgaatcttgagtggcaacagttgaatcttcagcagcagggttctcgtgctcttgggtggtagaggagtccttatcagccatccttgcttcttcctcggctttctgagcctcgtagaagtcaaaaaaagctagtacggagatctcccttaagatagtcgaagttggcctctagattcactttccaaaaatcatagaaatcgtctaaggcgggtttgtcgtagctctgaacttccttttgaagtgctttctgctcaacactaaaagttacttgcttaacatcaagagtttcctacaaggtagctttctctcatgctagctctttaaccttagcttcctagttttgaaagagagtacagagaccttccctttcatccttcatggctttcatttcctcggtcaccacctcaaagtcctccttgagcttggctgtggacgacatggccttaatctcttgccttaaatcttcaatgagcttgtatgcagcaacaatttgcttgtttactttgcctaactaaaaactcttttgctcggcctttttcttagcatcttccaatgccttctttagttcactgatagttgttgtggcctttagagcagcatatttggctcgagaataagtgtatgtcaacttcagattaacccgcacgggaaaacagagttaaagcatgtacaaagcaaagtctatataaagataatcttaaggcaaaacacttacttgagtgacctctttcagaactcctccgaccagtaatttcactggaatctcctccgcccctgtgagttgctcatttacttctggcatcatgcaatcttgataaaaaatgagcatttttttgcccttcttagtttttgggtgaagtataggtggagtagccaatgaccttggcagcttgggccccttagtgttggcccctttagagtttttggttgaggtagtggaggcctcatactttgcatttttcttagtccgaggaacaactttagggacgacatcaggaatatttgaggagtcagtagccaaactcctctcagtgttgacttgaggagccttggagcttggaggaatactcttaggcagagtatcgtccacctttggatgtttggtgggagagttctagcgggatacatcgcatgtcatcttcttcatagcatgcaacattttctccaacataactgcataaaaagaaagtatacttgttaaaaatataaacaaacaaggataagtgaaaaataaactaccctacatgtcaacaggagcaccctcttgaacaagtattgaaggggtattctcatcaaaagagtcctcctcttcatcctcgaccatcatggcctttcctctccctaccacctagacggaaggatgatcaacctccttaagatcattcctaatcatgatgggccgctcaattggcacttggtcaccctggagagccttattcttctttttctttagagcctcttgctaagttgtaacctcctcagtcgcttgttcaggctcttgaacttcatcagatgggtagagcccgtacctaatgaaattagcctcaatggccaagaaagaaatattctgagctgactctagcagttggagtattttttgggctcttaatctaagacctaaggtaaagggaggatgataataaggtggaatgtgctagaaactgatgtggctggtacccatgtccttgacaaagtagtagtcctctacaaatcctggacacatccgtgtccgtggtgccgatcaaccatttacactcattctgggaaaagtagaaaaacccaaacctattctgcttggggctagactttagatcaaataaatagttagtgttgtgggtaggtggctgaccccatccttaggaagcataaagcacgcacagtgtgtcaaggtactttatgcccttggtggtgagctgggttggacatatgtcataataattggctatttctttgaaatagggatgcaaagacagcattgcactctgtttggcatgtggccccaaccatgcacaaaatccccctctaggatttgctgctagttgtttggactaggaaagaacgcttccaccttcccaaggagaccttcttcatagaaattagtcaatctcttgaaggttaccacggatggtggcgagacccatcgagcaccctttggaccttaattatttaaaggttgggcctttatgtattcttcctcaatgttatcttggcctgccaccaagacatcttcctcctcaaagacaaactctctgacctctttgtagccaccaaaatgaagtacttaagctctctcatcgtcttcttcttcgtctccattgaccttggagggaccggcagtgcaaatctctccatggtcctcaacctcttggacttcaatctcccctcctgtagttacttcatccttgtttggaggcttggcttgctccaccctagctgctgcaaatagccaagcaaagtgaggatcagtttttgaggccttcctcatagtctgcttggtccgtgccatcattctacatttggatggttgcttttttttagatgtatgcctcgcaacagtgatagcaatatcagctacgatagtactcttggcagattgggttgcccgaccctctataagtgtgtctacaacaccaggtcggacactatacgtccaagaagaaagaagatagcgcttccaacctgttggaaattatttta
